United States Patent Application Publication US 2007/0214517 A1 - sequence listing, part 85

SEQ ID NO: 109672 - protein, 193 aa, Zea mays subsp. mays
  misc_feature (1)..(193): Ceres Seq. ID no. 15177535
  misc_feature (5)..(192): Pfam Name: ADP-ribosylation factor family Pfam Description: ADP-ribosylation factor family
  misc_feature (1)..(191): Homolog of NCBI NO: 32403708 NR Description: hypothetical protein [Neurospora crassa]
  misc_feature (1)..(193): Homolog of NCBI NO: 25294173 NR Description: small GTP-binding protein Sar1BNt [imported] -
  misc_feature (1)..(192): Homolog of NCBI NO: 25294172 NR Description: ras-like small monomeric GTP-binding protein
  misc_feature (1)..(193): Homolog of NCBI NO: 1549222 NR Description: NtSar1 protein [Nicotiana tabacum]
  misc_feature (1)..(192): Homolog of NCBI NO: 15228793 NR Description: GTP-binding protein SAR1A, putative [Arabidopsis
  misc_feature (1)..(193): Homolog of NCBI NO: 3334321 NR Description: GTP-binding protein SAR1A
  misc_feature (1)..(192): Homolog of NCBI NO: 3334322 NR Description: GTP-binding protein SAR1B
  misc_feature (1)..(193): Homolog of NCBI NO: 15235226 NR Description: GTP-binding protein SAR1A [Arabidopsis thaliana]
  misc_feature (1)..(193): Homolog of NCBI NO: 34894960 NR Description: putative GTP-binding protein
  misc_feature (1)..(192): Homolog of NCBI NO: 15223516 NR Description: GTP-binding protein SAR1B [Arabidopsis thaliana]
MFLFDWFYGILATLGLWQKEAKILFLGLDNAGKTTLLHMLKDERLVQHQPTQHPTSEELSIGKIKFKAFDLGGHQIARRVWKDYYAKVDAVVYLVDAYDKERFVESKRELDALLSDEALASVPFLILGNKIDIPYAASEDELRYHLGLTNFTTGKSNVSLGESGVRPLEVFMCSIVRKMGYGEGFKWLSYYIK

SEQ ID NO: 109673 - protein, 155 aa, Zea mays subsp. mays
  misc_feature (1)..(155): Ceres Seq. ID no. 15177536
  misc_feature (1)..(154): Pfam Name: ADP-ribosylation factor family Pfam Description: ADP-ribosylation factor family
  misc_feature (1)..(153): Homolog of NCBI NO: 32403708 NR Description: hypothetical protein [Neurospora crassa]
  misc_feature (1)..(155): Homolog of NCBI NO: 25294173 NR Description: small GTP-binding protein Sar1BNt [imported] -
  misc_feature (1)..(154): Homolog of NCBI NO: 25294172 NR Description: ras-like small monomeric GTP-binding protein
  misc_feature (1)..(155): Homolog of NCBI NO: 1549222 NR Description: NtSar1 protein [Nicotiana tabacum]
  misc_feature (1)..(154): Homolog of NCBI NO: 15228793 NR Description: GTP-binding protein SAR1A, putative [Arabidopsis
  misc_feature (1)..(155): Homolog of NCBI NO: 3334321 NR Description: GTP-binding protein SAR1A
  misc_feature (1)..(154): Homolog of NCBI NO: 3334322 NR Description: GTP-binding protein SAR1B
  misc_feature (1)..(155): Homolog of NCBI NO: 15235226 NR Description: GTP-binding protein SAR1A [Arabidopsis thaliana]
  misc_feature (1)..(155): Homolog of NCBI NO: 34894960 NR Description: putative GTP-binding protein
  misc_feature (1)..(154): Homolog of NCBI NO: 15223516 NR Description: GTP-binding protein SAR1B [Arabidopsis thaliana]
MLKDERLVQHQPTQHPTSEELSIGKIKFKAFDLGGHQIARRVWKDYYAKVDAVVYLVDAYDKERFVESKRELDALLSDEALASVPFLILGNKIDIPYAASEDELRYHLGLTNFTTGKSNVSLGESGVRPLEVFMCSIVRKMGYGEGFKWLSYYIK

SEQ ID NO: 109674 - DNA, 1566 bp, Zea mays subsp. mays
  misc_feature (1)..(1566): Ceres Seq. ID no. 15179015
attactaacccattttcccaatcaatcactcttcacttctcccactcctactcctttttctcctttctaagcaatctctctctctctccttatattctcaaatttgattctctctctctcatacctgcacaccactaccaacagagctaaattgctacactgtaaaaaagaagatgtttggacaaagcttcccggaggatattgattgtggcaacttctttgacaacatggacgacattcttgactttcccggttgtgatatggatgtcggtttcaacatcggtgactccgactctttccctaacatctggaccaatcatcaggacacatggcccgccgcttctgaccctctcttctcttccaacacaaactctgactcatcacctgagctctatgttccgtttgaagatattgtgaaagtggaaaggccagcaagctttgtatcggagtctttggtcgcgaagaaggaagattcgttttccacaaacacggactcatcttcttctcacagccagttcaggagctcaagtccagtgtcggtactcgaaagcagctcctcatcgtctcaaaccaccaacgcaacctcacttgtcctctctggaaagcacggtcgtccacgcacaaaacgccctcgcccaccggttcaggagatggacagagtcaatgtttgcggggcggattcgcgtctcatcgttagaataccaaagcagtttctctctgaccacagcaagatgatcaccaagaagaagaagaagaaggccaaggttacttcttcctattcttcgtcggggattgatcttgaaaccaacggaagcaacaacaacaacaacgttgattcatatgattcagagcagcatccggttaggaaatgtatgcactgtgaggtcaccaagactccacagtggaggcttgggcctatgggtccaaagacgctttgcaacgcgtgtggcgtgcgttacaagtctggaaggcttttcccggagtaccgtccagctaatagtccaacattcactccagctcttcactcaaactcacacaagaaggtggctgaaatgagaagcaagagatgcagcggtggaagctacacaaacgaagagagtgatctgcaagatttgattccgaacaatgcctacattggtgtggattaagatcgaaaaaagatggttcagtttccaagcgttgaagtgattagagttgcgaggagtaggaaagagtcagtgagcagaaaagttttagctttagaagagatgaatgaagaagagaggatcaagagttagatgaaaagtgattgtgtttgtattttgtatttgtagtgtgtatgtgcaaaactcttgaacacaaaagaagagcagaagattttgaagacactagagaacgttaggttttacattaaatcttcctctccttttcttctttcaattctttgtatttttactgtgaggattctttttgtagttgatttgtttatttttttgtttttgttaaaattttattttattcattagctgcacttaagagcatctccaaaccattgttatttttgcttctattatagcatttagaatc

SEQ ID NO: 109675 - protein, 324 aa, Zea mays subsp. mays
  misc_feature (1)..(324): Ceres Seq. ID no. 15179016
  misc_feature (231)..(307): Homolog of NCBI NO: 37572445 NR Description: AG-motif binding protein-2 [Nicotiana tabacum]
  misc_feature (19)..(298): Homolog of NCBI NO: 15239503 NR Description: GATA zinc finger protein [Arabidopsis thaliana]
  misc_feature (115)..(297): Homolog of NCBI NO: 15223085 NR Description: GATA zinc finger protein [Arabidopsis thaliana]
  misc_feature (68)..(297): Homolog of NCBI NO: 8778844 NR Description: T6D22.9 [Arabidopsis thaliana]
  misc_feature (115)..(308): Homolog of NCBI NO: 12711287 NR Description: GATA-1 zinc finger protein [Nicotiana tabacum]
  misc_feature (103)..(297): Homolog of NCBI NO: 15451574 NR Description: Putative GATA-1 zinc finger protein [Oryza sativa]
  misc_feature (17)..(297): Homolog of NCBI NO: 15223086 NR Description: GATA zinc finger protein [Arabidopsis thaliana]
  misc_feature (3)..(297): Homolog of NCBI NO: 37572451 NR Description: AG-motif binding protein-5 [Nicotiana tabacum]
  misc_feature (3)..(297): Homolog of NCBI NO: 37572443 NR Description: AG-motif binding protein-1 [Nicotiana tabacum]
  misc_feature (1)..(324): Homolog of NCBI NO: 15233101 NR Description: GATA zinc finger protein [Arabidopsis thaliana]
MFGQSFPEDIDCGNFFDNMDDILDFPGCDMDVGFNIGDSDSFPNIWTNHQDTWPAASDPLFSSNTNSDSSPELYVPFEDIVKVERPASFVSESLVAKKEDSFSTNTDSSSSHSQFRSSSPVSVLESSSSSSQTTNATSLVLSGKHGRPRTKRPRPPVQEMDRVNVCGADSRLIVRIPKQFLSDHSKMITKKKKKKAKVTSSYSSSGIDLETNGSNNNNNVDSYDSEQHPVRKCMHCEVTKTPQWRLGPMGPKTLCNACGVRYKSGRLFPEYRPANSPTFTPALHSNSHKKVAEMRSKRCSGGSYTNEESDLQDLIPNNAYIGVD

SEQ ID NO: 109676 - protein, 306 aa, Zea mays subsp. mays
  misc_feature (1)..(306): Ceres Seq. ID no. 15179017
  misc_feature (213)..(289): Homolog of NCBI NO: 37572445 NR Description: AG-motif binding protein-2 [Nicotiana tabacum]
  misc_feature (1)..(280): Homolog of NCBI NO: 15239503 NR Description: GATA zinc finger protein [Arabidopsis thaliana]
  misc_feature (97)..(279): Homolog of NCBI NO: 15223085 NR Description: GATA zinc finger protein [Arabidopsis thaliana]
  misc_feature (50)..(279): Homolog of NCBI NO: 8778844 NR Description: T6D22.9 [Arabidopsis thaliana]
  misc_feature (97)..(290): Homolog of NCBI NO: 12711287 NR Description: GATA-1 zinc finger protein [Nicotiana tabacum]
  misc_feature (85)..(279): Homolog of NCBI NO: 15451574 NR Description: Putative GATA-1 zinc finger protein [Oryza sativa]
  misc_feature (1)..(279): Homolog of NCBI NO: 15223086 NR Description: GATA zinc finger protein [Arabidopsis thaliana]
  misc_feature (1)..(279): Homolog of NCBI NO: 37572451 NR Description: AG-motif binding protein-5 [Nicotiana tabacum]
  misc_feature (1)..(279): Homolog of NCBI NO: 37572443 NR Description: AG-motif binding protein-1 [Nicotiana tabacum]
  misc_feature (1)..(306): Homolog of NCBI NO: 15233101 NR Description: GATA zinc finger protein [Arabidopsis thaliana]
MDDILDFPGCDMDVGFNIGDSDSFPNIWTNHQDTWPAASDPLFSSNTNSDSSPELYVPFEDIVKVERPASFVSESLVAKKEDSFSTNTDSSSSHSQFRSSSPVSVLESSSSSSQTTNATSLVLSGKHGRPRTKRPRPPVQEMDRVNVCGADSRLIVRIPKQFLSDHSKMITKKKKKKAKVTSSYSSSGIDLETNGSNNNNNVDSYDSEQHPVRKCMHCEVTKTPQWRLGPMGPKTLCNACGVRYKSGRLFPEYRPANSPTFTPALHSNSHKKVAEMRSKRCSGGSYTNEESDLQDLIPNNAYIGVD

SEQ ID NO: 109677 - protein, 295 aa, Zea mays subsp. mays
  misc_feature (1)..(295): Ceres Seq. ID no. 15179018
  misc_feature (202)..(278): Homolog of NCBI NO: 37572445 NR Description: AG-motif binding protein-2 [Nicotiana tabacum]
  misc_feature (1)..(269): Homolog of NCBI NO: 15239503 NR Description: GATA zinc finger protein [Arabidopsis thaliana]
  misc_feature (86)..(268): Homolog of NCBI NO: 15223085 NR Description: GATA zinc finger protein [Arabidopsis thaliana]
  misc_feature (39)..(268): Homolog of NCBI NO: 8778844 NR Description: T6D22.9 [Arabidopsis thaliana]
  misc_feature (86)..(279): Homolog of NCBI NO: 12711287 NR Description: GATA-1 zinc finger protein [Nicotiana tabacum]
  misc_feature (74)..(268): Homolog of NCBI NO: 15451574 NR Description: Putative GATA-1 zinc finger protein [Oryza sativa]
  misc_feature (1)..(268): Homolog of NCBI NO: 15223086 NR Description: GATA zinc finger protein [Arabidopsis thaliana]
  misc_feature (1)..(268): Homolog of NCBI NO: 37572451 NR Description: AG-motif binding protein-5 [Nicotiana tabacum]
  misc_feature (1)..(268): Homolog of NCBI NO: 37572443 NR Description: AG-motif binding protein-1 [Nicotiana tabacum]
  misc_feature (1)..(295): Homolog of NCBI NO: 15233101 NR Description: GATA zinc finger protein [Arabidopsis thaliana]
MDVGFNIGDSDSFPNIWTNHQDTWPAASDPLFSSNTNSDSSPELYVPFEDIVKVERPASFVSESLVAKKEDSFSTNTDSSSSHSQFRSSSPVSVLESSSSSSQTTNATSLVLSGKHGRPRTKRPRPPVQEMDRVNVCGADSRLIVRIPKQFLSDHSKMITKKKKKKAKVTSSYSSSGIDLETNGSNNNNNVDSYDSEQHPVRKCMHCEVTKTPQWRLGPMGPKTLCNACGVRYKSGRLFPEYRPANSPTFTPALHSNSHKKVAEMRSKRCSGGSYTNEESDLQDLIPNNAYIGVD

SEQ ID NO: 109678 - DNA, 857 bp, Zea mays subsp. mays
  misc_feature (1)..(857): Ceres Seq. ID no. 14309053
atagctgttaaaggaacctaaaatggcgaaagttttagatctttctctggttctctgtgttctgtgtgtgtccactgcagcaatagccatggcaagaaaccttggagaggaatctagcgatgatactgagttcatcaaatcctcttgtgagacagcaacgtacccggaactatgttttcagtctctgtcttcttacgcaagcgagatcaagaagcggccactacagctcgccgagacagcgctcgccgttagcatggcccaggcaaagtctgccaaaacatatatctcggacatgactgactacaaaggaatcacaaagaggcagcacgaggctgtgttggactgtgttgaagaaatgggagatactgttgataggttgagcaagtcgctgaaggagttgaagaatctggaggaaggagagagcaaagaagacttctggttctgtttgagcaatgtccggacgtggacaagcgcggcgctgacagatgagaccacgtgtcttgatgggtttggagggaaaggcatggatggggagctgaaaagcttagtcagagcacacattgtgcgtgtggcgcaagatacgagtaatgccttggctttgatcaatgtctatgcttccaagcattgaatatattgcaacggtttggtcctgaggacttgagctttttatacttttggatttggtttgtattgtgtttccaagaaatgtgttttggtttggttccgagtcatatcagtttctcttgccacattgttatatcatctacggtctatatagtttgaagctgttcattttgatgtttgattggtgatatagttttgtaagccatgaagagtattttgcaatattctctttt

SEQ ID NO: 109679 - protein, 201 aa, Zea mays subsp. mays
  misc_feature (1)..(201): Ceres Seq. ID no. 14309054
  misc_feature (5)..(200): Homolog of NCBI NO: 18407657 NR Description: pectinesterase family [Arabidopsis thaliana]
  misc_feature (1)..(201): Homolog of NCBI NO: 15232790 NR Description: pectinesterase - related [Arabidopsis thaliana]
  misc_feature (1)..(201): Homolog of NCBI NO: 21555297 NR Description: unknown [Arabidopsis thaliana]
  misc_feature (1)..(201): Homolog of NCBI NO: 15234547 NR Description: pectinesterase - related [Arabidopsis thaliana]
  misc_feature (31)..(201): Homolog of NCBI NO: 7488727 NR Description: 21K protein precursor - alfalfa
  misc_feature (36)..(201): Homolog of NCBI NO: 112717 NR Description: 21 KD PROTEIN PRECURSOR (1.2 PROTEIN)
  misc_feature (4)..(201): Homolog of NCBI NO: 21618088 NR Description: ripening-related protein-like [Arabidopsis
  misc_feature (2)..(201): Homolog of NCBI NO: 7406663 NR Description: putative ripening-related protein [Vitis vinifera]
  misc_feature (18)..(201): Homolog of NCBI NO: 15241799 NR Description: pectinesterase family [Arabidopsis thaliana]
  misc_feature (1)..(201): Homolog of NCBI NO: 15234982 NR Description: pectinesterase - related [Arabidopsis thaliana]
MAKVLDLSLVLCVLCVSTAAIAMARNLGEESSDDTEFIKSSCETATYPELCFQSLSSYASEIKKRPLQLAETALAVSMAQAKSAKTYISDMTDYKGITKRQHEAVLDCVEEMGDTVDRLSKSLKELKNLEEGESKEDFWFCLSNVRTWTSAALTDETTCLDGFGGKGMDGELKSLVRAHIVRVAQDTSNALALINVYASKH

SEQ ID NO: 109680 - protein, 179 aa, Zea mays subsp. mays
  misc_feature (1)..(179): Ceres Seq. ID no. 14309055
  misc_feature (1)..(179): Homolog of NCBI NO: 7406663 NR Description: putative ripening-related protein [Vitis vinifera]
  misc_feature (1)..(179): Homolog of NCBI NO: 15241799 NR Description: pectinesterase family [Arabidopsis thaliana]
  misc_feature (1)..(179): Homolog of NCBI NO: 15234982 NR Description: pectinesterase - related [Arabidopsis thaliana]
  misc_feature (1)..(178): Homolog of NCBI NO: 18407657 NR Description: pectinesterase family [Arabidopsis thaliana]
  misc_feature (1)..(179): Homolog of NCBI NO: 15232790 NR Description: pectinesterase - related [Arabidopsis thaliana]
  misc_feature (1)..(179): Homolog of NCBI NO: 21555297 NR Description: unknown [Arabidopsis thaliana]
  misc_feature (1)..(179): Homolog of NCBI NO: 15234547 NR Description: pectinesterase - related [Arabidopsis thaliana]
  misc_feature (9)..(179): Homolog of NCBI NO: 7488727 NR Description: 21K protein precursor - alfalfa
  misc_feature (14)..(179): Homolog of NCBI NO: 112717 NR Description: 21 KD PROTEIN PRECURSOR (1.2 PROTEIN)
  misc_feature (1)..(179): Homolog of NCBI NO: 21618088 NR Description: ripening-related protein-like [Arabidopsis
MARNLGEESSDDTEFIKSSCETATYPELCFQSLSSYASEIKKRPLQLAETALAVSMAQAKSAKTYISDMTDYKGITKRQHEAVLDCVEEMGDTVDRLSKSLKELKNLEEGESKEDFWFCLSNVRTWTSAALTDETTCLDGFGGKGMDGELKSLVRAHIVRVAQDTSNALALINVYASKH

SEQ ID NO: 109681 - protein, 124 aa, Zea mays subsp. mays
  misc_feature (1)..(124): Ceres Seq. ID no. 14309056
  misc_feature (1)..(123): Homolog of NCBI NO: 18407657 NR Description: pectinesterase family [Arabidopsis thaliana]
  misc_feature (1)..(124): Homolog of NCBI NO: 15232790 NR Description: pectinesterase - related [Arabidopsis thaliana]
  misc_feature (1)..(124): Homolog of NCBI NO: 21555297 NR Description: unknown [Arabidopsis thaliana]
  misc_feature (1)..(124): Homolog of NCBI NO: 15234547 NR Description: pectinesterase - related [Arabidopsis thaliana]
  misc_feature (1)..(124): Homolog of NCBI NO: 7488727 NR Description: 21K protein precursor - alfalfa
  misc_feature (1)..(124): Homolog of NCBI NO: 112717 NR Description: 21 KD PROTEIN PRECURSOR (1.2 PROTEIN)
  misc_feature (1)..(124): Homolog of NCBI NO: 21618088 NR Description: ripening-related protein-like [Arabidopsis
  misc_feature (1)..(124): Homolog of NCBI NO: 7406663 NR Description: putative ripening-related protein [Vitis vinifera]
  misc_feature (1)..(124): Homolog of NCBI NO: 15241799 NR Description: pectinesterase family [Arabidopsis thaliana]
  misc_feature (1)..(124): Homolog of NCBI NO: 15234982 NR Description: pectinesterase - related [Arabidopsis thaliana]
MAQAKSAKTYISDMTDYKGITKRQHEAVLDCVEEMGDTVDRLSKSLKELKNLEEGESKEDFWFCLSNVRTWTSAALTDETTCLDGFGGKGMDGELKSLVRAHIVRVAQDTSNALALINVYASKH

SEQ ID NO: 109682 - DNA, 1022 bp, Zea mays subsp. mays
  misc_feature (1)..(1022): Ceres Seq. ID no. 15177682
aaaaaccacacattcaaaacttactctgaggaactgaacagagaagaagactagacagacagagaggagactctgtgtgtgtgtgaggaagcaacaaatgtccatatccatggcgttattctctccgccaatctcttctccacttcaaaactctaacctcatccccaagatcccactctctctcctctccaccaagcgcctctctctcgtcgccctcactcgagcctcgtccgacaacggtacgtcaacacccgcttccgcaaccaccgtggaggctccaactccaaagcctgcctctgtagaagaggttccggtaaaatctccggcggaaagcccctccgcgtctgaaaatggcgccgttggagcccaagagattgatgatatgacaaccaccacgatgacggagatcaagtttcaggacgcgaagtgggttaatggaacatgggacctgaaacagttcgagaaagaaggcaaaacggactgggactctgttatcgttgctgaggcaaagaggagaaagtggcttgaagataacccggagacaactagtaacgacgagcctgtcctcttcgacacctccatcattccatggtgggcatggatgaagagataccatctacccgaagctgaactcctcaatggtcgtgcggcgatggtagggttcttcatggcttactttgttgacagccttacaggagtaggacttgttgatcaaatggggaatttcttctgcaaaacactcttgtttgtggctgtagccggagttcttttcatccgcaagaacgaagatttggataaactaaagggtctgattgaagagacgacgttatatgacaagcaatggcaagcggcatggaaagagccggagtcatcatcatcatcaacggtttcttcaaagaagtgaagaaaatttatggcttaaaatgtttcctcttttgttatgtgatgatgataagtgacagtcccaagataatttctttattgtattactgatattgagattgtaatctttctggctttag

SEQ ID NO: 109683 - protein, 268 aa, Zea mays subsp. mays
  misc_feature (1)..(268): Ceres Seq. ID no. 15177683
  misc_feature (5)..(268): Homolog of NCBI NO: 18414927 NR Description: Lil3 protein [Arabidopsis thaliana]
  misc_feature (5)..(268): Homolog of NCBI NO: 7485188 NR Description: hypothetical protein - Arabidopsis thaliana
  misc_feature (5)..(268): Homolog of NCBI NO: 21555799 NR Description: Lil3 protein [Arabidopsis thaliana]
  misc_feature (5)..(268): Homolog of NCBI NO: 8978078 NR Description: Lil3 protein [Arabidopsis thaliana]
  misc_feature (1)..(268): Homolog of NCBI NO: 30695110 NR Description: Lil3 protein [Arabidopsis thaliana]
MSISMALFSPPISSPLQNSNLIPKIPLSLLSTKRLSLVALTRASSDNGTSTPASATTVEAPTPKPASVEEVPVKSPAESPSASENGAVGAQEIDDMTTTTMTEIKFQDAKWVNGTWDLKQFEKEGKTDWDSVIVAEAKRRKWLEDNPETTSNDEPVLFDTSIIPWWAWMKRYHLPEAELLNGRAAMVGFFMAYFVDSLTGVGLVDQMGNFFCKTLLFVAVAGVLFIRKNEDLDKLKGLIEETTLYDKQWQAAWKEPESSSSSTVSSKK

SEQ ID NO: 109684 - protein, 264 aa, Zea mays subsp. mays
  misc_feature (1)..(264): Ceres Seq. ID no. 15177684
  misc_feature (1)..(264): Homolog of NCBI NO: 18414927 NR Description: Lil3 protein [Arabidopsis thaliana]
  misc_feature (1)..(264): Homolog of NCBI NO: 7485188 NR Description: hypothetical protein - Arabidopsis thaliana
  misc_feature (1)..(264): Homolog of NCBI NO: 21555799 NR Description: Lil3 protein [Arabidopsis thaliana]
  misc_feature (1)..(264): Homolog of NCBI NO: 8978078 NR Description: Lil3 protein [Arabidopsis thaliana]
  misc_feature (1)..(264): Homolog of NCBI NO: 30695110 NR Description: Lil3 protein [Arabidopsis thaliana]
MALFSPPISSPLQNSNLIPKIPLSLLSTKRLSLVALTRASSDNGTSTPASATTVEAPTPKPASVEEVPVKSPAESPSASENGAVGAQEIDDMTTTTMTEIKFQDAKWVNGTWDLKQFEKEGKTDWDSVIVAEAKRRKWLEDNPETTSNDEPVLFDTSIIPWWAWMKRYHLPEAELLNGRAAMVGFFMAYFVDSLTGVGLVDQMGNFFCKTLLFVAVAGVLFIRKNEDLDKLKGLIEETTLYDKQWQAAWKEPESSSSSTVSSKK

SEQ ID NO: 109685 - protein, 173 aa, Zea mays subsp. mays
  misc_feature (1)..(173): Ceres Seq. ID no. 15177685
  misc_feature (1)..(173): Homolog of NCBI NO: 18414927 NR Description: Lil3 protein [Arabidopsis thaliana]
  misc_feature (1)..(173): Homolog of NCBI NO: 7485188 NR Description: hypothetical protein - Arabidopsis thaliana
  misc_feature (1)..(173): Homolog of NCBI NO: 21555799 NR Description: Lil3 protein [Arabidopsis thaliana]
  misc_feature (1)..(173): Homolog of NCBI NO: 8978078 NR Description: Lil3 protein [Arabidopsis thaliana]
  misc_feature (1)..(173): Homolog of NCBI NO: 30695110 NR Description: Lil3 protein [Arabidopsis thaliana]
MTTTTMTEIKFQDAKWVNGTWDLKQFEKEGKTDWDSVIVAEAKRRKWLEDNPETTSNDEPVLFDTSIIPWWAWMKRYHLPEAELLNGRAAMVGFFMAYFVDSLTGVGLVDQMGNFFCKTLLFVAVAGVLFIRKNEDLDKLKGLIEETTLYDKQWQAAWKEPESSSSSTVSSKK

SEQ ID NO: 109686 - DNA, 1426 bp, Zea mays subsp. mays
  misc_feature (1)..(1426): Ceres Seq. ID no. 15178891
cataattttttattaaagtctcttttgctctctcctttactttggtcgttcacaatgaaaggaggcaccgtctcgtttctcttcgttcttctcatctccaccgtcacctccatcttctgcttccgggacgggatgttaccaaacggagattttgagctaggaccaaaaccatcggacatgaaaggaacacaagtgataaacaagaacgctattccaagctgggagcttacaggcttcgtcgaatacataaaatccggtcaaaaacaaggagacatgctcctagtagtccctgccggaaaattcgccgtccggctaggaaacgaagcatcgatcaaacagagacttaacgtgaccaaaggaatgtattactcgctcacgttcagtgccgcaaggacttgtgctcaagacgaacggctcaacatatcggtggcccctgactcgggcgtcattcctatacagactgtatacagtaacagtgggtgggatctatacgcttgggcgtttcaggctgaaagtaacgtggcagagatcgtgattcataatcctggcgaggaagaagatcctgcttgtggaccactcattgatggtgtggccatcaaggctctataccctccgagacctaccaataagaacatattgaaaaatggaggattcgaagaaggtccatatctactcccaaactccacaaccggcgttctgattcctcccttcatagaagatgaccactctcctctacccgcttggatggtcgaatccctcaaagccgtcaagtacgttgacgtcgaacacttctcagtcccacaaggccgtaaagcagtcgagctagttgcggggaaagaaagcgcgatcgctcaagtggctaggaccatcatagggaagacatacgtgctttctttcgcggttggagacgcgaacaacgcgtgcgaaggctcgatgatagtcgaggcgtttgcgggaagagacacgttaaaggttccttaccagtcgaaagggaagggaggtttcaaacgagctactttgcggttcgtggcggtttcgacccgcacgagggttatgttttacagcacgttttacgcgatgagaagcgatgatttctcgtcgttgtgtggccccgtgatcgacgatgttaagctcctcagcgttcataaggcttaaaatggtccttgttttattttaaaggttttttcgtataaggagtgaggggtttttctaaaaaagtaatttttatctctggtgcttttgaaatgagatgatttatataccgagtgagttgttatggtgtagggttatatataaaacagaaatgtcttgcttatatctattttcttgtatgagaaggctgaaaaaatgttgttcgttttcgttactatatattggatttcgaggagatcatatcatttacaaagtttaataatggtgtgctatt

SEQ ID NO: 109687 - protein, 384 aa, Zea mays subsp. mays
  misc_feature (1)..(384): Ceres Seq. ID no. 15178892
  misc_feature (60)..(380): Pfam Name: Protein of unknown function, DUF642 Pfam Description: Protein of unknown function, DUF642
  misc_feature (60)..(383): Homolog of NCBI NO: 7486632 NR Description: hypothetical protein F8B4.160 - Arabidopsis
  misc_feature (26)..(384): Homolog of NCBI NO: 7488741 NR Description: hypothetical protein precursor - alfalfa
  misc_feature (27)..(383): Homolog of NCBI NO: 18418018 NR Description: expressed protein [Arabidopsis thaliana]
  misc_feature (19)..(383): Homolog of NCBI NO: 7488898 NR Description: hypothetical protein - castor bean
  misc_feature (19)..(383): Homolog of NCBI NO: 15809822 NR Description: AT5g25460/F18G18_200 [Arabidopsis thaliana]
  misc_feature (19)..(383): Homolog of NCBI NO: 21537379 NR Description: unknown [Arabidopsis thaliana]
  misc_feature (19)..(383): Homolog of NCBI NO: 15239438 NR Description: expressed protein [Arabidopsis thaliana]
  misc_feature (19)..(383): Homolog of NCBI NO: 21554402 NR Description: unknown [Arabidopsis thaliana]
  misc_feature (19)..(383): Homolog of NCBI NO: 23397043 NR Description: unknown protein [Arabidopsis thaliana]
  misc_feature (19)..(383): Homolog of NCBI NO: 15239049 NR Description: expressed protein [Arabidopsis thaliana]
HNFLLKSLLLSPLLWSFTMKGGTVSFLFVLLISTVTSIFCFRDGMLPNGDFELGPKPSDMKGTQVINKNAIPSWELTGFVEYIKSGQKQGDMLLVVPAGKFAVRLGNEASIKQRLNVTKGMYYSLTFSAARTCAQDERLNISVAPDSGVIPIQTVYSNSGWDLYAWAFQAESNVAEIVIHNPGEEEDPACGPLIDGVAIKALYPPRPTNKNILKNGGFEEGPYLLPNSTTGVLIPPFIEDDHSPLPAWMVESLKAVKYVDVEHFSVPQGRKAVELVAGKESAIAQVARTIIGKTYVLSFAVGDANNACEGSMIVEAFAGRDTLKVPYQSKGKGGFKRATLRFVAVSTRTRVMFYSTFYAMRSDDFSSLCGPVIDDVKLLSVHKA

SEQ ID NO: 109688 - protein, 366 aa, Zea mays subsp. mays
  misc_feature (1)..(366): Ceres Seq. ID no. 15178893
  misc_feature (42)..(362): Pfam Name: Protein of unknown function, DUF642 Pfam Description: Protein of unknown function, DUF642
  misc_feature (42)..(365): Homolog of NCBI NO: 7486632 NR Description: hypothetical protein F8B4.160 - Arabidopsis
  misc_feature (8)..(366): Homolog of NCBI NO: 7488741 NR Description: hypothetical protein precursor - alfalfa
  misc_feature (9)..(365): Homolog of NCBI NO: 18418018 NR Description: expressed protein [Arabidopsis thaliana]
  misc_feature (1)..(365): Homolog of NCBI NO: 7488898 NR Description: hypothetical protein - castor bean
  misc_feature (1)..(365): Homolog of NCBI NO: 15809822 NR Description: AT5g25460/F18G18_200 [Arabidopsis thaliana]
  misc_feature (1)..(365): Homolog of NCBI NO: 21537379 NR Description: unknown [Arabidopsis thaliana]
  misc_feature (1)..(365): Homolog of NCBI NO: 15239438 NR Description: expressed protein [Arabidopsis thaliana]
  misc_feature (1)..(365): Homolog of NCBI NO: 21554402 NR Description: unknown [Arabidopsis thaliana]
  misc_feature (1)..(365): Homolog of NCBI NO: 23397043 NR Description: unknown protein [Arabidopsis thaliana]
  misc_feature (1)..(365): Homolog of NCBI NO: 15239049 NR Description: expressed protein [Arabidopsis thaliana]
MKGGTVSFLFVLLISTVTSIFCFRDGMLPNGDFELGPKPSDMKGTQVINKNAIPSWELTGFVEYIKSGQKQGDMLLVVPAGKFAVRLGNEASIKQRLNVTKGMYYSLTFSAARTCAQDERLNISVAPDSGVIPIQTVYSNSGWDLYAWAFQAESNVAEIVIHNPGEEEDPACGPLIDGVAIKALYPPRPTNKNILKNGGFEEGPYLLPNSTTGVLIPPFIEDDHSPLPAWMVESLKAVKYVDVEHFSVPQGRKAVELVAGKESAIAQVARTIIGKTYVLSFAVGDANNACEGSMIVEAFAGRDTLKVPYQSKGKGGFKRATLRFVAVSTRTRVMFYSTFYAMRSDDFSSLCGPVIDDVKLLSVHKA

SEQ ID NO: 109689 - protein, 340 aa, Zea mays subsp. mays
  misc_feature (1)..(340): Ceres Seq. ID no. 15178894
  misc_feature (16)..(336): Pfam Name: Protein of unknown function, DUF642 Pfam Description: Protein of unknown function, DUF642
  misc_feature (16)..(339): Homolog of NCBI NO: 7486632 NR Description: hypothetical protein F8B4.160 - Arabidopsis
  misc_feature (1)..(340): Homolog of NCBI NO: 7488741 NR Description: hypothetical protein precursor - alfalfa
  misc_feature (1)..(339): Homolog of NCBI NO: 18418018 NR Description: expressed protein [Arabidopsis thaliana]
  misc_feature (1)..(339): Homolog of NCBI NO: 7488898 NR Description: hypothetical protein - castor bean
  misc_feature (1)..(339): Homolog of NCBI NO: 15809822 NR Description: AT5g25460/F18G18_200 [Arabidopsis thaliana]
  misc_feature (1)..(339): Homolog of NCBI NO: 21537379 NR Description: unknown [Arabidopsis thaliana]
  misc_feature (1)..(339): Homolog of NCBI NO: 15239438 NR Description: expressed protein [Arabidopsis thaliana]
  misc_feature (1)..(339): Homolog of NCBI NO: 21554402 NR Description: unknown [Arabidopsis thaliana]
  misc_feature (1)..(339): Homolog of NCBI NO: 23397043 NR Description: unknown protein [Arabidopsis thaliana]
  misc_feature (1)..(339): Homolog of NCBI NO: 15239049 NR Description: expressed protein [Arabidopsis thaliana]
MLPNGDFELGPKPSDMKGTQVINKNAIPSWELTGFVEYIKSGQKQGDMLLVVPAGKFAVRLGNEASIKQRLNVTKGMYYSLTFSAARTCAQDERLNISVAPDSGVIPIQTVYSNSGWDLYAWAFQAESNVAEIVIHNPGEEEDPACGPLIDGVAIKALYPPRPTNKNILKNGGFEEGPYLLPNSTTGVLIPPFIEDDHSPLPAWMVESLKAVKYVDVEHFSVPQGRKAVELVAGKESAIAQVARTIIGKTYVLSFAVGDANNACEGSMIVEAFAGRDTLKVPYQSKGKGGFKRATLRFVAVSTRTRVMFYSTFYAMRSDDFSSLCGPVIDDVKLLSVHKA

SEQ ID NO: 109690 - DNA, 1122 bp, Zea mays subsp. mays
  misc_feature (1)..(1122): Ceres Seq. ID no. 15174315
gaaaggattcggattctctgtcaattagggaagagaagagaagttatcagcagtattgggataagatagatagatgagttcatctctacctatgaggctcctcgtgcctctcacacttcccttgattcctcctcctccttcttcttcggattctctagcgctcagatcgaaaaatcctaactttagtctccgatcctcttcttcttgtacctcttgctcttcttccctgtggcagctattcccccggagatccagatcctcttctccttgtgttcccatgtgcacgaaagatcaagacaggacagatattttgagaaatgaagatgatctagttacgtgtgggcttgaatctgatgaagattccggaggcctccggattcctactcaggctcaggccatcgttgaaggatccggttcagttgctgtctctgagctcaaaccttcccctgatgttgattacattcaagagctactggcgatacagcagcaagggcctagaaccattggcttttttgggactaggaacatgggtttcatgcaccaagaactcatcgagattcttagctacgccatggttattactaaaaaccatatatatacttcaggtgcatctggaactaatgcagctgttatcagaggtgcacttagagcagagaggccagagcttcttacagtaatcttacctcaaagtttgaaaaaacaacctcctgagagccaagaactcttgtcgaaggtgcaaaacgtggtagaaaagccacacaatgaccatttgccattactagaagccagcaggctgtgtaatatggacatcatatcacaagtacagcaagtgatctgcttcgcgtttcatgacagtaggctgctcatggagacatgccaagaagctaaaaatctccgcaagatcgtcactctcttctacctcgattgattcccactctcttctcctgggaacacaagaggatggatacaagtctcttatgtaaattgtgaatcttttcccatcccaaaacatattttactattcttttgtctagattttgcgcaaactccatcattatgatttgtaggattaaattctcagctattttgtaactttacatgggttataaaatatttcttctc

SEQ ID NO: 109691 - protein, 284 aa, Zea mays subsp. mays
  misc_feature (1)..(284): Ceres Seq. ID no. 15174316
  misc_feature (148)..(284): Homolog of NCBI NO: 23043068 NR Description: hypothetical protein [Trichodesmium erythraeum
  misc_feature (117)..(284): Homolog of NCBI NO: 16331173 NR Description: unknown protein [Synechocystis sp. PCC 6803]
  misc_feature (130)..(284): Homolog of NCBI NO: 13812204 NR Description: hypothetical protein [Guillardia theta]
  misc_feature (95)..(220): Homolog of NCBI NO: 34894968 NR Description: B1088D01.6 [Oryza sativa (japonica
  misc_feature (1)..(260): Homolog of NCBI NO: 7486491 NR Description: hypothetical protein At2g43940 [imported] -
  misc_feature (1)..(284): Homolog of NCBI NO: 15232185 NR Description: expressed protein [Arabidopsis thaliana]
  misc_feature (1)..(284): Homolog of NCBI NO: 21537298 NR Description: unknown [Arabidopsis thaliana]
  misc_feature (1)..(284): Homolog of NCBI NO: 30689549 NR Description: predicted protein [Arabidopsis thaliana]
MSSSLPMRLLVPLTLPLIPPPPSSSDSLALRSKNPNFSLRSSSSCTSCSSSLWQLFPRRSRSSSPCVPMCTKDQDRTDILRNEDDLVTCGLESDEDSGGLRIPTQAQAIVEGSGSVAVSELKPSPDVDYIQELLAIQQQGPRTIGFFGTRNMGFMHQELIEILSYAMVITKNHIYTSGASGTNAAVIRGALRAERPELLTVILPQSLKKQPPESQELLSKVQNVVEKPHNDHLPLLEASRLCNMDIISQVQQVICFAFHDSRLLMETCQEAKNLRKIVTLFYLD

SEQ ID NO: 109692 - protein, 278 aa, Zea mays subsp. mays
  misc_feature (1)..(278): Ceres Seq. ID no. 15174317
  misc_feature (142)..(278): Homolog of NCBI NO: 23043068 NR Description: hypothetical protein [Trichodesmium erythraeum
  misc_feature (111)..(278): Homolog of NCBI NO: 16331173 NR Description: unknown protein [Synechocystis sp. PCC 6803]
  misc_feature (124)..(278): Homolog of NCBI NO: 13812204 NR Description: hypothetical protein [Guillardia theta]
  misc_feature (89)..(214): Homolog of NCBI NO: 34894968 NR Description: B1088D01.6 [Oryza sativa (japonica
  misc_feature (1)..(254): Homolog of NCBI NO: 7486491 NR Description: hypothetical protein At2g43940 [imported] -
  misc_feature (1)..(278): Homolog of NCBI NO: 15232185 NR Description: expressed protein [Arabidopsis thaliana]
  misc_feature (1)..(278): Homolog of NCBI NO: 21537298 NR Description: unknown [Arabidopsis thaliana]
  misc_feature (1)..(278): Homolog of NCBI NO: 30689549 NR Description: predicted protein [Arabidopsis thaliana]
MRLLVPLTLPLIPPPPSSSDSLALRSKNPNFSLRSSSSCTSCSSSLWQLFPRRSRSSSPCVPMCTKDQDRTDILRNEDDLVTCGLESDEDSGGLRIPTQAQAIVEGSGSVAVSELKPSPDVDYIQELLAIQQQGPRTIGFFGTRNMGFMHQELIEILSYAMVITKNHIYTSGASGTNAAVIRGALRAERPELLTVILPQSLKKQPPESQELLSKVQNVVEKPHNDHLPLLEASRLCNMDIISQVQQVICFAFHDSRLLMETCQEAKNLRKIVTLFYLD

SEQ ID NO: 109693 - protein, 216 aa, Zea mays subsp. mays
  misc_feature (1)..(216): Ceres Seq. ID no. 15174318
  misc_feature (80)..(216): Homolog of NCBI NO: 23043068 NR Description: hypothetical protein [Trichodesmium erythraeum
  misc_feature (49)..(216): Homolog of NCBI NO: 16331173 NR Description: unknown protein [Synechocystis sp. PCC 6803]
  misc_feature (62)..(216): Homolog of NCBI NO: 13812204 NR Description: hypothetical protein [Guillardia theta]
  misc_feature (27)..(152): Homolog of NCBI NO: 34894968 NR Description: B1088D01.6 [Oryza sativa (japonica
  misc_feature (1)..(192): Homolog of NCBI NO: 7486491 NR Description: hypothetical protein At2g43940 [imported] -
  misc_feature (1)..(216): Homolog of NCBI NO: 15232185 NR Description: expressed protein [Arabidopsis thaliana]
  misc_feature (1)..(216): Homolog of NCBI NO: 21537298 NR Description: unknown [Arabidopsis thaliana]
  misc_feature (1)..(216): Homolog of NCBI NO: 30689549 NR Description: predicted protein [Arabidopsis thaliana]
MCTKDQDRTDILRNEDDLVTCGLESDEDSGGLRIPTQAQAIVEGSGSVAVSELKPSPDVDYIQELLAIQQQGPRTIGFFGTRNMGFMHQELIEILSYAMVITKNHIYTSGASGTNAAVIRGALRAERPELLTVILPQSLKKQPPESQELLSKVQNVVEKPHNDHLPLLEASRLCNMDIISQVQQVICFAFHDSRLLMETCQEAKNLRKIVTLFYLD

SEQ ID NO: 109694 - DNA, 963 bp, Zea mays subsp. mays
  misc_feature (1)..(963): Ceres Seq. ID no. 15179503
acaccagccaaaacaattgtcagtgtcttaaaagaaaagctttgcttctgaaacataaacacactttttaacaatctcaccaccgatcttcgattctttttgcgctttcctcagcacacaatggcgtcggcgaacaaagagatggctgtgtactgtttcgacactttggtctctcactacaacaacgaagactctcctccacctgcatttgacgacgccaatcacccattgtttgtcacctggaagaaaatagtgaacggtggggagcctcggctgcgtggatgtattggtacacttgaagcacgccgtttgatcagtggcttcaaggactacgccttgaccagtgccctgagggatcgtaggttcccaccaatccaacccaaagaactgccgtttctgcaatgcacggtgtccgtcctcactgattatgaagatgcagaggattatcttgattgggaggtgggaacgcatggtataatcattgagttcactgaacctgtgactaatataaagcgaaacgccacatatctccctgaggtgccagctcatgaaggctggacaaagatagaggcaatagattctctggtgcgtaaagccggatacaatggtgaaataactgaggcagtgcgtaggcgaatccagctaacaagataccagagcacattattcagcatgcattatagtgaatacctttcatacgtgaaggccacaagaggccttgtcccggctattaatgggaccagcaagcccttgtcctgatttgcaccaccaaactcctgcgaatgggtgcgagattggtcctgtttgggacctctcctaatttatcattgcatttgtgattcgaaactgtaatgctctctctgatttcaccttcaacgagacaagaatttagctgtttcaccattgtctgaaacgcaaccgtccgcacttaccatttctaatgaagttcatcgttttatcttc

SEQ ID NO: 109695 - protein, 212 aa, Zea mays subsp. mays
  misc_feature (1)..(212): Ceres Seq. ID no. 15179504
  misc_feature (4)..(187): Pfam Name: AMMECR1 Pfam Description: AMMECR1
  misc_feature (7)..(193): Homolog of NCBI NO: 7669554 NR Description: AMMECR1 protein [Homo sapiens]
  misc_feature (7)..(192): Homolog of NCBI NO: 34878672 NR Description: similar to hypothetical protein MGC32132 [Rattus
  misc_feature (7)..(192): Homolog of NCBI NO: 23943793 NR Description: hypothetical protein MGC32132 [Mus musculus]
  misc_feature (1)..(190): Homolog of NCBI NO: 31203679 NR Description: ENSANGP00000015575 [Anopheles gambiae]
  misc_feature (7)..(193): Homolog of NCBI NO: 34784081 NR Description: Similar to AMMECR1 protein [Danio rerio]
  misc_feature (7)..(193): Homolog of NCBI NO: 9506383 NR Description: AMMECR1 protein [Mus musculus]
  misc_feature (1)..(193): Homolog of NCBI NO: 24649478 NR Description: CG5902-PA [Drosophila melanogaster]
  misc_feature (1)..(193): Homolog of NCBI NO: 39597428 NR Description: Hypothetical protein CBG03076 [Caenorhabditis
  misc_feature (1)..(206): Homolog of NCBI NO: 37537060 NR Description: unknown protein [Oryza sativa (japonica
  misc_feature (1)..(209): Homolog of NCBI NO: 18404840 NR Description: expressed protein [Arabidopsis thaliana]
MASANKEMAVYCFDTLVSHYNNEDSPPPAFDDANHPLFVTWKKIVNGGEPRLRGCIGTLEARRLISGFKDYALTSALRDRRFPPIQPKELPFLQCTVSVLTDYEDAEDYLDWEVGTHGIIIEFTEPVTNIKRNATYLPEVPAHEGWTKIEAIDSLVRKAGYNGEITEAVRRRIQLTRYQSTLFSMHYSEYLSYVKATRGLVPAINGTSKPLS

SEQ ID NO: 109696 - protein, 205 aa, Zea mays subsp. mays
  misc_feature (1)..(205): Ceres Seq. ID no. 15179505
  misc_feature (1)..(180): Pfam Name: AMMECR1 Pfam Description: AMMECR1
  misc_feature (1)..(186): Homolog of NCBI NO: 39597428 NR Description: Hypothetical protein CBG03076 [Caenorhabditis
  misc_feature (1)..(183): Homolog of NCBI NO: 31203679 NR Description: ENSANGP00000015575 [Anopheles gambiae]
  misc_feature (1)..(186): Homolog of NCBI NO: 24649478 NR Description: CG5902-PA [Drosophila melanogaster]
  misc_feature (1)..(186): Homolog of NCBI NO: 34784081 NR Description: Similar to AMMECR1 protein [Danio rerio]
  misc_feature (1)..(186): Homolog of NCBI NO: 9506383 NR Description: AMMECR1 protein [Mus musculus]
  misc_feature (1)..(186): Homolog of NCBI NO: 7669554 NR Description: AMMECR1 protein [Homo sapiens]
  misc_feature (1)..(185): Homolog of NCBI NO: 34878672 NR Description: similar to hypothetical protein MGC32132 [Rattus
  misc_feature (1)..(185): Homolog of NCBI NO: 23943793 NR Description: hypothetical protein MGC32132 [Mus musculus]
  misc_feature (1)..(199): Homolog of NCBI NO: 37537060 NR Description: unknown protein [Oryza sativa (japonica
  misc_feature (1)..(202): Homolog of NCBI NO: 18404840 NR Description: expressed protein [Arabidopsis thaliana]
MAVYCFDTLVSHYNNEDSPPPAFDDANHPLFVTWKKIVNGGEPRLRGCIGTLEARRLISGFKDYALTSALRDRRFPPIQPKELPFLQCTVSVLTDYEDAEDYLDWEVGTHGIIIEFTEPVTNIKRNATYLPEVPAHEGWTKIEAIDSLVRKAGYNGEITEAVRRRIQLTRYQSTLFSMHYSEYLSYVKATRGLVPAINGTSKPLS

SEQ ID NO: 109697 - DNA, 784 bp, Zea mays subsp. mays
  misc_feature (1)..(784): Ceres Seq. ID no. 14309041
attaagattcactttttattccgatagatcagattcatttcctgaatctgttatataaaattctttctaaagaggaagaaatctcacggttccaacaggaaaaatgggttctgaacagaatgatagcacgagcttcacacaatcatcagagccgaaactttgtgcaaacggatgtggtttctttggttcgccatcaaacatggatctgtgttcgaaatgctaccgagacatatgcgcagaggaagctcaaacagctgttgcaaaagctgccgttgagaaatctttcaagccatcgccatcgcctcctcctcctaccctcttcatagcagagcctgatgtggcgaaaccagagaaagaaaaggcggttgctactgttcttgtggtggccgagccatcttctgcaacaggagaagctacagttcctgaacagaacaaaccaccatctaaacctgcacggccgaaccggtgcctttgttgcaacaagaaggttggtatacttgggtttaagtgcaaatgcgggagcactttctgcggcgaacatcggtaccctgagagacatgattgcagctttgatttcaaagaagctgggcgtggagagattgcaaaagccaatccggttattaaagctgataaacttcaaaggttctgagaaaggctacggtgttggtctctcttttcttttatctcaaattgtatttgaatggaattgggtttctactagtggattgtttccaaaggggggtaacatgatgaatttggttctttaataaactcagtcatctct

SEQ ID NO: 109698 - protein, 181 aa, Zea mays subsp. mays
  misc_feature (1)..(181): Ceres Seq. ID no. 14309042
  misc_feature (122)..(162): Pfam Name: AN1-like Zinc finger Pfam Description: AN1-like Zinc finger
  misc_feature (6)..(180): Homolog of NCBI NO: 25082726 NR Description: expressed protein [Arabidopsis thaliana]
  misc_feature (6)..(180): Homolog of NCBI NO: 18403408 NR Description: expressed protein [Arabidopsis thaliana]
  misc_feature (18)..(180): Homolog of NCBI NO: 14596167 NR Description: zinc finger-like protein [Arabidopsis thaliana]
  misc_feature (16)..(180): Homolog of NCBI NO: 15225894 NR Description: zinc finger protein -related [Arabidopsis
  misc_feature (18)..(180): Homolog of NCBI NO: 18404102 NR Description: expressed protein [Arabidopsis thaliana]
  misc_feature (18)..(180): Homolog of NCBI NO: 15231686 NR Description: zinc finger - like protein [Arabidopsis thaliana]
  misc_feature (1)..(180): Homolog of NCBI NO: 15221329 NR Description: expressed protein [Arabidopsis thaliana]
  misc_feature (1)..(180): Homolog of NCBI NO: 8778645 NR Description: F5O11.17 [Arabidopsis thaliana]
  misc_feature (1)..(180): Homolog of NCBI NO: 15234402 NR Description: expressed protein [Arabidopsis thaliana]
  misc_feature (1)..(181): Homolog of NCBI NO: 15235819 NR Description: zinc finger -related protein [Arabidopsis
MGSEQNDSTSFTQSSEPKLCANGCGFFGSPSNMDLCSKCYRDICAEEAQTAVAKAAVEKSFKPSPSPPPPTLFIAEPDVAKPEKEKAVATVLVVAEPSSATGEATVPEQNKPPSKPARPNRCLCCNKKVGILGFKCKCGSTFCGEHRYPERHDCSFDFKEAGRGEIAKANPVIKADKLQRF

SEQ ID NO: 109699 - protein, 149 aa, Zea mays subsp. mays
  misc_feature (1)..(149): Ceres Seq. ID no. 14309043
  misc_feature (90)..(130): Pfam Name: AN1-like Zinc finger Pfam Description: AN1-like Zinc finger
  misc_feature (1)..(148): Homolog of NCBI NO: 25082726 NR Description: expressed protein [Arabidopsis thaliana]
  misc_feature (1)..(148): Homolog of NCBI NO: 18403408 NR Description: expressed protein [Arabidopsis thaliana]
  misc_feature (1)..(148): Homolog of NCBI NO: 14596167 NR Description: zinc finger-like protein [Arabidopsis thaliana]
  misc_feature (1)..(148): Homolog of NCBI NO: 15225894 NR Description: zinc finger protein -related [Arabidopsis
  misc_feature (1)..(148): Homolog of NCBI NO: 18404102 NR Description: expressed protein [Arabidopsis thaliana]
  misc_feature (1)..(148): Homolog of NCBI NO: 15231686 NR Description: zinc finger - like protein [Arabidopsis thaliana]
  misc_feature (1)..(148): Homolog of NCBI NO: 15221329 NR Description: expressed protein [Arabidopsis thaliana]
  misc_feature (1)..(148): Homolog of NCBI NO: 8778645 NR Description: F5O11.17 [Arabidopsis thaliana]
  misc_feature (1)..(148): Homolog of NCBI NO: 15234402 NR Description: expressed protein [Arabidopsis thaliana]
  misc_feature (1)..(149): Homolog of NCBI NO: 15235819 NR Description: zinc finger -related protein [Arabidopsis
MDLCSKCYRDICAEEAQTAVAKAAVEKSFKPSPSPPPPTLFIAEPDVAKPEKEKAVATVLVVAEPSSATGEATVPEQNKPPSKPARPNRCLCCNKKVGILGFKCKCGSTFCGEHRYPERHDCSFDFKEAGRGEIAKANPVIKADKLQRF

SEQ ID NO: 109700 - protein, 143 aa, Zea mays subsp. mays; identical to SEQ ID NO: 61173
  misc_feature (1)..(143): Ceres Seq. ID no. 14309044

SEQ ID NO: 109701 - DNA, 950 bp, Zea mays subsp. mays
  misc_feature (1)..(950): Ceres Seq. ID no. 15178997
atcgtagtactgaacaagtgcgaagaaaaaaacatacatttttgtgtgtgtttgagtgaagaaggaaaaagtataaagagaagcgcagacgacgatctgcctactctgtctgtttgtctgtgtgcaagtaagtaatgtctgaagcagcagcacaaaaggcggctttcctcggtggacttgttgtctcattcaaggaacaaatgcacactgatgttctcgttcatcctggtgatcaatctccccccatcccgacccacaaggccatcctctcgtcaagatctaaggtcttcaggaacatgctagactccgatgaatgcaaggcctctgctgaggaatcgatcactctccccgacttgaaccacgacgagctccattctcttctcgagttcctctactccggcaacttaattgctccatacaatcagtaccgagccctctatctggctgctgacaaatacgacatcgcttatctccaagacgtttgccgcgaccatttcattgcatctctcacctctaggaacgtccttgacatcctggagctcgccagcatcccttctgacaccatcttgaaagccgctgccatcaaccttgtggtcaagcatatggaagatgtggttgttcccatgaaatacgagacttttgtgcagaggaaccccaatcttggcgttgagatcaccagagcttttctaagagagatcaaagctcaatccaaagacagcagatctgcttcttctaatcatcgccctcactctcgcttctactgattgatgaacaataaacagctacttgcctaatgtctcacttgccaaaggtgattgatgaatgatgatgccttcttcttcttcttattaaatttggaaagactttgttttagggatttatttcaaggtgttggttgatacatatacaatatctactagtattgtgaatttaactaaaatctgttatat

SEQ ID NO: 109702 - protein, 209 aa, Zea mays subsp. mays
  misc_feature (1)..(209): Ceres Seq. ID no. 15178998
  misc_feature (19)..(125): Pfam Name: BTB/POZ domain Pfam Description: BTB/POZ domain
  misc_feature (19)..(182): Homolog of NCBI NO: 34858214 NR Description: similar to speckle-type POZ protein-like 1; POZ
  misc_feature (19)..(182): Homolog of NCBI NO: 27661061 NR Description: similar to speckle-type POZ protein
  misc_feature (25)..(185): Homolog of NCBI NO: 22328490 NR Description: POZ domain protein family [Arabidopsis thaliana]
  misc_feature (15)..(183): Homolog of NCBI NO: 15233388 NR Description: hypothetical protein [Arabidopsis thaliana]
  misc_feature (44)..(192): Homolog of NCBI NO: 15224510 NR Description: hypothetical protein [Arabidopsis thaliana]
  misc_feature (8)..(202): Homolog of NCBI NO: 15238994 NR Description: hypothetical protein [Arabidopsis thaliana]
  misc_feature (6)..(193): Homolog of NCBI NO: 15226686 NR Description: hypothetical protein [Arabidopsis thaliana]
  misc_feature (3)..(194): Homolog of NCBI NO: 15228868 NR Description: expressed protein [Arabidopsis thaliana]
  misc_feature (1)..(204): Homolog of NCBI NO: 15223447 NR Description: expressed protein [Arabidopsis thaliana]
  misc_feature (1)..(204): Homolog of NCBI NO: 33589788 NR Description: At3g01790 [Arabidopsis thaliana]
MSEAAAQKAAFLGGLVVSFKEQMHTDVLVHPGDQSPPIPTHKAILSSRSKVFRNMLDSDECKASAEESITLPDLNHDELHSLLEFLYSGNLIAPYNQYRALYLAADKYDIAYLQDVCRDHFIASLTSRNVLDILELASIPSDTILKAAAINLVVKHMEDVVVPMKYETFVQRNPNLGVEITRAFLREIKAQSKDSRSASSNHRPHSRFY

SEQ ID NO: 109703 - protein, 187 aa, Zea mays subsp. mays
  misc_feature (1)..(187): Ceres Seq. ID no. 15178999
  misc_feature (1)..(103): Pfam Name: BTB/POZ domain Pfam Description: BTB/POZ domain
  misc_feature (1)..(160): Homolog of NCBI NO: 34858214 NR Description: similar to speckle-type POZ protein-like 1; POZ
  misc_feature (1)..(160): Homolog of NCBI NO: 27661061 NR Description: similar to speckle-type POZ protein
  misc_feature (3)..(163): Homolog of NCBI NO: 22328490 NR Description: POZ domain protein family [Arabidopsis thaliana]
  misc_feature (1)..(161): Homolog of NCBI NO: 15233388 NR Description: hypothetical protein [Arabidopsis thaliana]
  misc_feature (22)..(170): Homolog of NCBI NO: 15224510 NR Description: hypothetical protein [Arabidopsis thaliana]
  misc_feature (1)..(180): Homolog of NCBI NO: 15238994 NR Description: hypothetical protein [Arabidopsis thaliana]
  misc_feature (1)..(171): Homolog of NCBI NO: 15226686 NR Description: hypothetical protein [Arabidopsis thaliana]
  misc_feature (1)..(172): Homolog of NCBI NO: 15228868 NR Description: expressed protein [Arabidopsis thaliana]
  misc_feature (1)..(182): Homolog of NCBI NO: 15223447 NR Description: expressed protein [Arabidopsis thaliana]
  misc_feature (1)..(182): Homolog of NCBI NO: 33589788 NR Description: At3g01790 [Arabidopsis thaliana]
MHTDVLVHPGDQSPPIPTHKAILSSRSKVFRNMLDSDECKASAEESITLPDLNHDELHSLLEFLYSGNLIAPYNQYRALYLAADKYDIAYLQDVCRDHFIASLTSRNVLDILELASIPSDTILKAAAINLVVKHMEDVVVPMKYETFVQRNPNLGVEITRAFLREIKAQSKDSRSASSNHRPHSRFY

SEQ ID NO: 109704 - protein, 155 aa, Zea mays subsp. mays
  misc_feature (1)..(155): Ceres Seq. ID no. 15179000
  misc_feature (1)..(71): Pfam Name: BTB/POZ domain Pfam Description: BTB/POZ domain
  misc_feature (1)..(128): Homolog of NCBI NO: 34858214 NR Description: similar to speckle-type POZ protein-like 1; POZ
  misc_feature (1)..(128): Homolog of NCBI NO: 27661061 NR Description: similar to speckle-type POZ protein
  misc_feature (1)..(131): Homolog of NCBI NO: 22328490 NR Description: POZ domain protein family [Arabidopsis thaliana]
  misc_feature (1)..(129): Homolog of NCBI NO: 15233388 NR Description: hypothetical protein [Arabidopsis thaliana]
  misc_feature (1)..(138): Homolog of NCBI NO: 15224510 NR Description: hypothetical protein [Arabidopsis thaliana]
  misc_feature (1)..(148): Homolog of NCBI NO: 15238994 NR Description: hypothetical protein [Arabidopsis thaliana]
  misc_feature (1)..(139): Homolog of NCBI NO: 15226686 NR Description: hypothetical protein [Arabidopsis thaliana]
  misc_feature (1)..(140): Homolog of NCBI NO: 15228868 NR Description: expressed protein [Arabidopsis thaliana]
  misc_feature (1)..(150): Homolog of NCBI NO: 15223447 NR Description: expressed protein [Arabidopsis thaliana]
  misc_feature (1)..(150): Homolog of NCBI NO: 33589788 NR Description: At3g01790 [Arabidopsis thaliana]
MLDSDECKASAEESITLPDLNHDELHSLLEFLYSGNLIAPYNQYRALYLAADKYDIAYLQDVCRDHFIASLTSRNVLDILELASIPSDTILKAAAINLVVKHMEDVVVPMKYETFVQRNPNLGVEITRAFLREIKAQSKDSRSASSNHRPHSRFY

SEQ ID NO: 109705 - DNA, 892 bp, Zea mays subsp. mays
  misc_feature (1)..(892): Ceres Seq. ID no. 14309033
gttacaatctgcccccaaaaaatcgatctctggtctcaactatcgatttccaggcatctacaaatggctgtatgcaccaaactcggggttttacagaacagaaatgttccagtgacatcaatgctccgctacatgtccacaaaacttttcattggtggcctatcaccaggaactgacgaccagtccttaaaagatgctttctctaccttcaatggagtgacagaggcaagagtcatgacaaacaaagtgacgggaaggtcaaggggttatggatttgtcaatttcacaagtgaggattctgccaaatctgctatttcagctatggatggacaggagttgaatgggcgtaacatccgcgtggatgttgcaaaagaatggccgagcttgccgttttcttcggttgaaggtacagaagatgagaagaaaggcaataagatggtgagccgatctgtatggaaagatccgttcgttgacgccttcttgatgaagaagaaaaacgcagctctgaacaggaaaatatggtcaaggaggtcgacgattctgccagagtatgttgattcgtcggtgagaatctacaatggcaaaactcacgtgcgttgtaagatcacagaggggaaagttgggcataagtttggagagtttgcgtttacaaggaaagtgacaaagcatcctagagcaaagtaagttttaagttcttgagtatgaattggtcagcttgagaggatttgttggagaaaaaaccagaaacgaatcaataagaatttccaagtagggatataactcatttgagcttagaagtgtttttttgtatcagcctcgaagtcttgttttaatttttatgatgatacctatgtgacattagatcatttttgaagaccagtttcactttgat

SEQ ID NO: 109706 - protein, 227 aa, Zea mays subsp. mays
  misc_feature (1)..(227): Ceres Seq. ID no. 14309034
  misc_feature (149)..(223): Pfam Name: Ribosomal protein S19 Pfam Description: Ribosomal protein S19
  misc_feature (35)..(130): Homolog of NCBI NO: 322514 NR Description: glycine-rich RNA-binding protein (clone A81) -
  misc_feature (22)..(130): Homolog of NCBI NO: 30682622 NR Description: glycine-rich RNA-binding protein (AtGRP2)
  misc_feature (22)..(130): Homolog of NCBI NO: 15236359 NR Description: glycine-rich RNA-binding protein (AtGRP2)
  misc_feature (22)..(130): Homolog of NCBI NO: 2826811 NR Description: AtGRP2 [Arabidopsis thaliana]
  misc_feature (22)..(136): Homolog of NCBI NO: 21553972 NR Description: glycine-rich RNA binding protein, putative
  misc_feature (22)..(136): Homolog of NCBI NO: 15229525 NR Description: RNA-binding protein, putative [Arabidopsis
  misc_feature (22)..(130): Homolog of NCBI NO: 7439994 NR Description: glycine-rich RNA-binding protein - garden pea
  misc_feature (22)..(227): Homolog of NCBI NO: 18422781 NR Description: 40S ribosomal protein S19, mitochondrial
  misc_feature (22)..(227): Homolog of NCBI NO: 8809615 NR Description: 40S ribosomal protein S19 [Arabidopsis thaliana]
  misc_feature (22)..(227): Homolog of NCBI NO: 2129722 NR Description: ribosomal protein S19 precursor, mitochondrial -
VTICPQKIDLWSQLSISRHLQMAVCTKLGVLQNRNVPVTSMLRYMSTKLFIGGLSPGTDDQSLKDAFSTFNGVTEARVMTNKVTGRSRGYGFVNFTSEDSAKSAISAMDGQELNGRNIRVDVAKEWPSLPFSSVEGTEDEKKGNKMVSRSVWKDPFVDAFLMKKKNAALNRKIWSRRSTILPEYVDSSVRIYNGKTHVRCKITEGKVGHKFGEFAFTRKVTKHPRAK

SEQ ID NO: 109707 - protein, 206 aa, Zea mays subsp. mays
  misc_feature (1)..(206): Ceres Seq. ID no. 14309035
  misc_feature (128)..(202): Pfam Name: Ribosomal protein S19 Pfam Description: Ribosomal protein S19
  misc_feature (1)..(206): Homolog of NCBI NO: 8809615 NR Description: 40S ribosomal protein S19 [Arabidopsis thaliana]
  misc_feature (14)..(109): Homolog of NCBI NO: 322514 NR Description: glycine-rich RNA-binding protein (clone A81) -
  misc_feature (1)..(109): Homolog of NCBI NO: 15236359 NR Description: glycine-rich RNA-binding protein (AtGRP2)
  misc_feature (1)..(115): Homolog of NCBI NO: 21553972 NR Description: glycine-rich RNA binding protein, putative
  misc_feature (1)..(109): Homolog of NCBI NO: 7439994 NR Description: glycine-rich RNA-binding protein - garden pea
  misc_feature (1)..(206): Homolog of NCBI NO: 18422781 NR Description: 40S ribosomal protein S19, mitochondrial
  misc_feature (1)..(115): Homolog of NCBI NO: 15229525 NR Description: RNA-binding protein, putative [Arabidopsis
  misc_feature (1)..(109): Homolog of NCBI NO: 2826811 NR Description: AtGRP2 [Arabidopsis thaliana]
  misc_feature (1)..(109): Homolog of NCBI NO: 30682622 NR Description: glycine-rich RNA-binding protein (AtGRP2)
  misc_feature (1)..(206): Homolog of NCBI NO: 2129722 NR Description: ribosomal protein S19 precursor, mitochondrial -
MAVCTKLGVLQNRNVPVTSMLRYMSTKLFIGGLSPGTDDQSLKDAFSTFNGVTEARVMTNKVTGRSRGYGFVNFTSEDSAKSAISAMDGQELNGRNIRVDVAKEWPSLPFSSVEGTEDEKKGNKMVSRSVWKDPFVDAFLMKKKNAALNRKIWSRRSTILPEYVDSSVRIYNGKTHVRCKITEGKVGHKFGEFAFTRKVTKHPRAK

SEQ ID NO: 109708 - protein, 187 aa, Zea mays subsp. mays
  misc_feature (1)..(187): Ceres Seq. ID no. 14309036
  misc_feature (109)..(183): Pfam Name: Ribosomal protein S19 Pfam Description: Ribosomal protein S19
  misc_feature (1)..(90): Homolog of NCBI NO: 322514 NR Description: glycine-rich RNA-binding protein (clone A81) -
  misc_feature (1)..(90): Homolog of NCBI NO: 30682622 NR Description: glycine-rich RNA-binding protein (AtGRP2)
  misc_feature (1)..(90): Homolog of NCBI NO: 15236359 NR Description: glycine-rich RNA-binding protein (AtGRP2)
  misc_feature (1)..(90): Homolog of NCBI NO: 2826811 NR Description: AtGRP2 [Arabidopsis thaliana]
  misc_feature (1)..(96): Homolog of NCBI NO: 21553972 NR Description: glycine-rich RNA binding protein, putative
  misc_feature (1)..(96): Homolog of NCBI NO: 15229525 NR Description: RNA-binding protein, putative [Arabidopsis
  misc_feature (1)..(90): Homolog of NCBI NO: 7439994 NR Description: glycine-rich RNA-binding protein - garden pea
  misc_feature (1)..(187): Homolog of NCBI NO: 18422781 NR Description: 40S ribosomal protein S19, mitochondrial
  misc_feature (1)..(187): Homolog of NCBI NO: 8809615 NR Description: 40S ribosomal protein S19 [Arabidopsis thaliana]
  misc_feature (1)..(187): Homolog of NCBI NO: 2129722 NR Description: ribosomal protein S19 precursor, mitochondrial -
MLRYMSTKLFIGGLSPGTDDQSLKDAFSTFNGVTEARVMTNKVTGRSRGYGFVNFTSEDSAKSAISAMDGQELNGRNIRVDVAKEWPSLPFSSVEGTEDEKKGNKMVSRSVWKDPFVDAFLMKKKNAALNRKIWSRRSTILPEYVDSSVRIYNGKTHVRCKITEGKVGHKFGEFAFTRKVTKHPRAK

SEQ ID NO: 109709 - DNA, 1302 bp, Zea mays subsp. mays
  misc_feature (1)..(1302): Ceres Seq. ID no. 15177459
aagagaggaatcgataggactctgtaactcttcccttatatgagatctatagtttaacctaaacctaaaggtttatatatcaataatgatgctttcagtgatcgttgcaatccttgtctgccttgcaagctacatttaccgatcattgaagcctccaccgccgcgagtctgcggcgttcctcacggtcctccgattacttctccgagaatcaagctcagtgatggaagatatcttgcttatagagaatctggcgttgatagagccaatgctaatcacaagatcatcgttgttcatggatttaacaactccaaagacatggaacttcccatctctaaggatcttattgaggaactagggatatattttctgtttttcgatagagcagggtatggagaaagtgatccacaccctacacgtacggtcaaaagtgaagcatatgacattcaagaactcgctgataaactcaacatcggaccaaagttctatgttatagggttatcagtcggtgcttactcggtttatagctgcctcaaatatattccccacagattagctggagcagtcttagtggttccatttgtcagctattggtggactaaagtgcctcaggacatctcgagtaaagcgttcaagctattgcccgaagatgtccggtggacgtttagagtggctcattatgttccttggctcttgtattggtggttgactcatcaatggttttcgtcttcgagtataatctctggaaacagtgcgttactgagcgatacagatttggtcatcataaagaagatgttggagaatccgagtcctcacacggaaaaagtccggcaacagggagaccatgaatgtcttcaccgagacatgattgctggattcgcgacatgggagttcgacccaaccgaattggaaaacccgtttactgaaggtgtaggttcagtacacatgtggcagggtactgaagacagagtagttccacgagaaattaatgaatatatatcaaagaagctcccatggattaagtaccacgaagtccaaggttatggtcatcttctaagcgaggaggagcagaaatgtgaagacattattaaggcgcttcttgtggagtgatgatcatctatcaacggacactagtgctgaaggtggcatttaaacttttagtaaaaaataattcctttgataagtaagaggaatgttttagtcaaaaaaaagtaagaggaatgttattattgtaagtttgtgacaaaggagaaccacttaaacgtcctatattattatataaaactttattcttcaaagttgct

SEQ ID NO: 109710 - protein, 340 aa, Zea mays subsp. mays
  misc_feature (1)..(340): Ceres Seq. ID no. 15177460
  misc_feature (92)..(335): Pfam Name: alpha/beta hydrolase fold Pfam Description: alpha/beta hydrolase fold
  misc_feature (2)..(336): Homolog of NCBI NO: 6714434 NR Description: hypothetical protein [Arabidopsis thaliana]
  misc_feature (5)..(336): Homolog of NCBI NO: 15228496 NR Description: esterase/lipase/thioesterase family [Arabidopsis
  misc_feature (4)..(338): Homolog of NCBI NO: 18410575 NR Description: hydrolase, alpha/beta fold family [Arabidopsis
  misc_feature (2)..(336): Homolog of NCBI NO: 30678800 NR Description: esterase/lipase/thioesterase family [Arabidopsis
  misc_feature (1)..(338): Homolog of NCBI NO: 21537089 NR Description: unknown [Arabidopsis thaliana]
  misc_feature (4)..(338): Homolog of NCBI NO: 18410582 NR Description: esterase/lipase/thioesterase family [Arabidopsis
  misc_feature (4)..(338): Homolog of NCBI NO: 21592662 NR Description: unknown [Arabidopsis thaliana]
  misc_feature (1)..(338): Homolog of NCBI NO: 28416665 NR Description: At2g36290 [Arabidopsis thaliana]
  misc_feature (1)..(338): Homolog of NCBI NO: 18404095 NR Description: hydrolase, alpha/beta fold family [Arabidopsis
  misc_feature (1)..(339): Homolog of NCBI NO: 15242253 NR Description: esterase/lipase/thioesterase family [Arabidopsis
MMLSVIVAILVCLASYIYRSLKPPPPRVCGVPHGPPITSPRIKLSDGRYLAYRESGVDRANANHKIIVVHGFNNSKDMELPISKDLIEELGIYFLFFDRAGYGESDPHPTRTVKSEAYDIQELADKLNIGPKFYVIGLSVGAYSVYSCLKYIPHRLAGAVLVVPFVSYWWTKVPQDISSKAFKLLPEDVRWTFRVAHYVPWLLYWWLTHQWFSSSSIISGNSALLSDTDLVIIKKMLENPSPHTEKVRQQGDHECLHRDMIAGFATWEFDPTELENPFTEGVGSVHMWQGTEDRVVPREINEYISKKLPWIKYHEVQGYGHLLSEEEQKCEDIIKALLVE

SEQ ID NO: 109711 - protein, 339 aa, Zea mays subsp. mays
  misc_feature (1)..(339): Ceres Seq. ID no. 15177461
  misc_feature (91)..(334): Pfam Name: alpha/beta hydrolase fold Pfam Description: alpha/beta hydrolase fold
  misc_feature (1)..(335): Homolog of NCBI NO: 6714434 NR Description: hypothetical protein [Arabidopsis thaliana]
  misc_feature (4)..(335): Homolog of NCBI NO: 15228496 NR Description: esterase/lipase/thioesterase family [Arabidopsis
  misc_feature (3)..(337): Homolog of NCBI NO: 18410575 NR Description: hydrolase, alpha/beta fold family [Arabidopsis
  misc_feature (1)..(335): Homolog of NCBI NO: 30678800 NR Description: esterase/lipase/thioesterase family [Arabidopsis
  misc_feature (1)..(337): Homolog of NCBI NO: 21537089 NR Description: unknown [Arabidopsis thaliana]
  misc_feature (3)..(337): Homolog of NCBI NO: 18410582 NR Description: esterase/lipase/thioesterase family [Arabidopsis
  misc_feature (3)..(337): Homolog of NCBI NO: 21592662 NR Description: unknown [Arabidopsis thaliana]
  misc_feature (1)..(337): Homolog of NCBI NO: 28416665 NR Description: At2g36290 [Arabidopsis thaliana]
  misc_feature (1)..(337): Homolog of NCBI NO: 18404095 NR Description: hydrolase, alpha/beta fold family [Arabidopsis
  misc_feature (1)..(338): Homolog of NCBI NO: 15242253 NR Description: esterase/lipase/thioesterase family [Arabidopsis
MLSVIVAILVCLASYIYRSLKPPPPRVCGVPHGPPITSPRIKLSDGRYLAYRESGVDRANANHKIIVVHGFNNSKDMELPISKDLIEELGIYFLFFDRAGYGESDPHPTRTVKSEAYDIQELADKLNIGPKFYVIGLSVGAYSVYSCLKYIPHRLAGAVLVVPFVSYWWTKVPQDISSKAFKLLPEDVRWTFRVAHYVPWLLYWWLTHQWFSSSSIISGNSALLSDTDLVIIKKMLENPSPHTEKVRQQGDHECLHRDMIAGFATWEFDPTELENPFTEGVGSVHMWQGTEDRVVPREINEYISKKLPWIKYHEVQGYGHLLSEEEQKCEDIIKALLVE

SEQ ID NO: 109712 - protein, 263 aa, Zea mays subsp. mays
  misc_feature (1)..(263): Ceres Seq. ID no. 15177462
  misc_feature (15)..(258): Pfam Name: alpha/beta hydrolase fold Pfam Description: alpha/beta hydrolase fold
  misc_feature (1)..(259): Homolog of NCBI NO: 6714434 NR Description: hypothetical protein [Arabidopsis thaliana]
  misc_feature (1)..(259): Homolog of NCBI NO: 15228496 NR Description: esterase/lipase/thioesterase family [Arabidopsis
  misc_feature (1)..(261): Homolog of NCBI NO: 18410575 NR Description: hydrolase, alpha/beta fold family [Arabidopsis
  misc_feature (1)..(259): Homolog of NCBI NO: 30678800 NR Description: esterase/lipase/thioesterase family [Arabidopsis
  misc_feature (1)..(261): Homolog of NCBI NO: 21537089 NR Description: unknown [Arabidopsis thaliana]
  misc_feature (1)..(261): Homolog of NCBI NO: 18410582 NR Description: esterase/lipase/thioesterase family [Arabidopsis
  misc_feature (1)..(261): Homolog of NCBI NO: 21592662 NR Description: unknown [Arabidopsis thaliana]
  misc_feature (1)..(261): Homolog of NCBI NO: 28416665 NR Description: At2g36290 [Arabidopsis thaliana]
  misc_feature (1)..(261): Homolog of NCBI NO: 18404095 NR Description: hydrolase, alpha/beta fold family [Arabidopsis
  misc_feature (1)..(262): Homolog of NCBI NO: 15242253 NR Description: esterase/lipase/thioesterase family [Arabidopsis
MELPISKDLIEELGIYFLFFDRAGYGESDPHPTRTVKSEAYDIQELADKLNIGPKFYVIGLSVGAYSVYSCLKYIPHRLAGAVLVVPFVSYWWTKVPQDISSKAFKLLPEDVRWTFRVAHYVPWLLYWWLTHQWFSSSSIISGNSALLSDTDLVIIKKMLENPSPHTEKVRQQGDHECLHRDMIAGFATWEFDPTELENPFTEGVGSVHMWQGTEDRVVPREINEYISKKLPWIKYHEVQGYGHLLSEEEQKCEDIIKALLVE

SEQ ID NO: 109713 - DNA, 1420 bp, Zea mays subsp. mays
  misc_feature (1)..(1420): Ceres Seq. ID no. 15179532
aataaaaaaataaataaaacaaaaagctgtcttaaagctctgacgatctttcctgtcctagtcgcagactcgtcatcacagctctcaagcgaaattccccctgctttctccgcgcaatttctcctctataggattggaggtaggctttgtgtgtggcctggtttcagacatctctgcctgaggaaaagcttgttatacggagttatgtggttattctcaatgccactcaagacacttcgaggagctagaaaaacactcaagatcacacacttttgtagcatctccaacatgccttcttctctaaaaatcgaactggtgccgtgtagtaaggagaactatgcttatgttttgcacgatgaagacactggcactgttggagttgttgatccttctgaggctgcgcctgttatagaggcgttgagtaggaaaaattggaacttgacttacatattgaatactcatcatcatgatgatcacataggggggaatgctgagctgaaagcaaagtatggcgcaaaggtgattggctcagctgtggataaggatcggattcctggaattgacatacttctcaaggatagtgataagtggatgtttgctggccatgaggttcgggttattgacactcctggccacacacaaggccatgttagcttctactttcccgggtcagccacagttttcacaggagacctgatacatagcttatcttgtggtaccctttcggaaggtacccccgagcagatgctttcatcattccagaagattgtgtctttaccagatgatacaagtatatactgcggtcgtgaaaacacagcagggaatctcaagtttgcactatcaatagaaccaaagaatgaaactcttcggtcctatgcaacccgagtcgcccatcttcgcagccaaggactcccatcgattccaacgactgttaaggtggagaaagcgtgtaacccattcctcagaacatctagcaaagaaatccgcagatctttaaacattccagactcagcaaacgaagcagaagcactgcgtcgtatacacagagccagagaccgtttcttaagaagtttggggttatctcaccttattgtatagttggaagtcactcatcatcagctgcaaagattaatatatgataatgttttgagcttaaaaaaaaaaaaaaaaaagcgtgtttcatcagccgaagataactttgagagagcggttcaatctgtggcctgaagacgactcttccatggttcaagctgtgcagtatcggtttgctttaccacatagtctcccgtgtttggtaaacccaccagaataacccctttctgtctttgtctttttttgagatcagtatatgaaccagattttgtcattgggtgtgttacatttaccatttcattacttctaaatataaagctccaccgtt

SEQ ID NO: 109714 - protein, 365 aa, Zea mays subsp. mays
  misc_feature (1)..(365): Ceres Seq. ID no. 15179533
  misc_feature (111)..(269): Pfam Name: Metallo-beta-lactamase superfamily Pfam Description: Metallo-beta-lactamase superfamily
  misc_feature (20)..(354): Homolog of NCBI NO: 16209608 NR Description: glyoxalase II [Oryza sativa]
  misc_feature (84)..(354): Homolog of NCBI NO: 10334501 NR Description: putative mitochondrial glyoxalase II [Cicer
  misc_feature (48)..(354): Homolog of NCBI NO: 30684920 NR Description: glyoxalase II, putative (hydroxyacylglutathione
  misc_feature (43)..(354): Homolog of NCBI NO: 15224661 NR Description: glyoxalase II, putative (hydroxyacylglutathione
  misc_feature (50)..(354): Homolog of NCBI NO: 18390616 NR Description: glyoxalase II, putative (hydroxyacylglutathione
  misc_feature (43)..(354): Homolog of NCBI NO: 25406895 NR Description: hypothetical protein [imported] - Arabidopsis
  misc_feature (27)..(354): Homolog of NCBI NO: 30679573 NR Description: glyoxalase II, putative (hydroxyacylglutathione
  misc_feature (106)..(354): Homolog of NCBI NO: 25310959 NR Description: probable glyoxalase II [imported] - Arabidopsis
  misc_feature (18)..(354): Homolog of NCBI NO: 2570340 NR Description: glyoxalase II mitochondrial isozyme [Arabidopsis
  misc_feature (18)..(354): Homolog of NCBI NO: 18406237 NR Description: glyoxalase II (hydroxyacylglutathione
NKKINKTKSCLKALTIFPVLVADSSSQLSSEIPPAFSAQFLLYRIGGRLCVWPGFRHLCLRKSLLYGVMWLFSMPLKTLRGARKTLKITHFCSISNMPSSLKIELVPCSKENYAYVLHDEDTGTVGVVDPSEAAPVIEALSRKNWNLTYILNTHHHDDHIGGNAELKAKYGAKVIGSAVDKDRIPGIDILLKDSDKWMFAGHEVRVIDTPGHTQGHVSFYFPGSATVFTGDLIHSLSCGTLSEGTPEQMLSSFQKIVSLPDDTSIYCGRENTAGNLKFALSIEPKNETLRSYATRVAHLRSQGLPSIPTTVKVEKACNPFLRTSSKEIRRSLNIPDSANEAEALRRIHRARDRFLRSLGLSHLIV

SEQ ID NO: 109715 - protein, 297 aa, Zea mays subsp. mays
  misc_feature (1)..(297): Ceres Seq. ID no. 15179534
  misc_feature (43)..(201): Pfam Name: Metallo-beta-lactamase superfamily Pfam Description: Metallo-beta-lactamase superfamily
  misc_feature (1)..(286): Homolog of NCBI NO: 16209608 NR Description: glyoxalase II [Oryza sativa]
  misc_feature (16)..(286): Homolog of NCBI NO: 10334501 NR Description: putative mitochondrial glyoxalase II [Cicer
  misc_feature (1)..(286): Homolog of NCBI NO: 30684920 NR Description: glyoxalase II, putative (hydroxyacylglutathione
  misc_feature (1)..(286): Homolog of NCBI NO: 15224661 NR Description: glyoxalase II, putative (hydroxyacylglutathione
  misc_feature (1)..(286): Homolog of NCBI NO: 18390616 NR Description: glyoxalase II, putative (hydroxyacylglutathione
  misc_feature (1)..(286): Homolog of NCBI NO: 25406895 NR Description: hypothetical protein [imported] - Arabidopsis
  misc_feature (1)..(286): Homolog of NCBI NO: 30679573 NR Description: glyoxalase II, putative (hydroxyacylglutathione
  misc_feature (38)..(286): Homolog of NCBI NO: 25310959 NR Description: probable glyoxalase II [imported] - Arabidopsis
  misc_feature (1)..(286): Homolog of NCBI NO: 2570340 NR Description: glyoxalase II mitochondrial isozyme [Arabidopsis
  misc_feature (1)..(286): Homolog of NCBI NO: 18406237 NR Description: glyoxalase II (hydroxyacylglutathione
MWLFSMPLKTLRGARKTLKITHFCSISNMPSSLKIELVPCSKENYAYVLHDEDTGTVGVVDPSEAAPVIEALSRKNWNLTYILNTHHHDDHIGGNAELKAKYGAKVIGSAVDKDRIPGIDILLKDSDKWMFAGHEVRVIDTPGHTQGHVSFYFPGSATVFTGDLIHSLSCGTLSEGTPEQMLSSFQKIVSLPDDTSIYCGRENTAGNLKFALSIEPKNETLRSYATRVAHLRSQGLPSIPTTVKVEKACNPFLRTSSKEIRRSLNIPDSANEAEALRRIHRARDRFLRSLGLSHLIV

SEQ ID NO: 109716 - protein, 292 aa, Zea mays subsp. mays
  misc_feature (1)..(292): Ceres Seq. ID no. 15179535
  misc_feature (38)..(196): Pfam Name: Metallo-beta-lactamase superfamily Pfam Description: Metallo-beta-lactamase superfamily
  misc_feature (1)..(281): Homolog of NCBI NO: 16209608 NR Description: glyoxalase II [Oryza sativa]
  misc_feature (11)..(281): Homolog of NCBI NO: 10334501 NR Description: putative mitochondrial glyoxalase II [Cicer
  misc_feature (1)..(281): Homolog of NCBI NO: 30684920 NR Description: glyoxalase II, putative (hydroxyacylglutathione
  misc_feature (1)..(281): Homolog of NCBI NO: 15224661 NR Description: glyoxalase II, putative (hydroxyacylglutathione
  misc_feature (1)..(281): Homolog of NCBI NO: 18390616 NR Description: glyoxalase II, putative (hydroxyacylglutathione
  misc_feature (1)..(281): Homolog of NCBI NO: 25406895 NR Description: hypothetical protein [imported] - Arabidopsis
  misc_feature (1)..(281): Homolog of NCBI NO: 30679573 NR Description: glyoxalase II, putative (hydroxyacylglutathione
  misc_feature (33)..(281): Homolog of NCBI NO: 25310959 NR Description: probable glyoxalase II [imported] - Arabidopsis
  misc_feature (1)..(281): Homolog of NCBI NO: 2570340 NR Description: glyoxalase II mitochondrial isozyme [Arabidopsis
  misc_feature (1)..(281): Homolog of NCBI NO: 18406237 NR Description: glyoxalase II (hydroxyacylglutathione
MPLKTLRGARKTLKITHFCSISNMPSSLKIELVPCSKENYAYVLHDEDTGTVGVVDPSEAAPVIEALSRKNWNLTYILNTHHHDDHIGGNAELKAKYGAKVIGSAVDKDRIPGIDILLKDSDKWMFAGHEVRVIDTPGHTQGHVSFYFPGSATVFTGDLIHSLSCGTLSEGTPEQMLSSFQKIVSLPDDTSIYCGRENTAGNLKFALSIEPKNETLRSYATRVAHLRSQGLPSIPTTVKVEKACNPFLRTSSKEIRRSLNIPDSANEAEALRRIHRARDRFLRSLGLSHLIV

SEQ ID NO: 109717 - DNA, 947 bp, Zea mays subsp. mays
  misc_feature (1)..(947): Ceres Seq. ID no. 15174410
actttccttgatcagaaaacaaatccgattctctcctctcttcgaatcccttcgatatgcagcagcaagacccgaacgcccgacccgccaccgggtatccatacccgtatccgcctcaacaacccgccaacggttaccctcccaacgccgcaaccgcctacccataccaaaaccacaacccccactacgcgcctcagcctagcccacgcgccgtcctactccgccgcctcttcaccgccttcaccgtcttcctcctcatcctaggcctcatcctcttcatcttcttcatcgtcgtccgcccccagctcccgaccgtctacctcaactccctctccgtctccaacttcaccgtctccgacaaccgcctcgccggaaactgggacctcggtctccaattccaaaaccctaattcgaagatgtcgcttcactacgacggcgtcttgtgcacgctctattacgaccgcgcgtctctctccgagacgcgtttgcagccgttcgatctggggacgaaggatcagactccgatcaacgccacgctctccgtctccgggacgtacgtggacaatcggttggttgattcgattgggaaagagaggggcgagaagggaagcgtggagttcgatttgagggtggtttctttggttacgttccggtacggagtgtaccggaggaggaggtacgtcacggttttctgcgatgacgtggcggttggtgtcggggggaatagtagttcgtggaacatggttggttcggctaggagatgcaaaccttaatgatgttagaatgtgagtttcttacattaggagttttataattttaaccaattacttgcgatgttgatgattgaaatttattcatgttttataatatgaatttgaatgtaaatcgagtcgacaatggtattttttttcagtgtttatgatgaattatacatgttttggaagacc

SEQ ID NO: 109718 - protein, 238 aa, Zea mays subsp. mays
  misc_feature (1)..(238): Ceres Seq. ID no. 15174411
  misc_feature (36)..(214): Homolog of NCBI NO: 27261042 NR Description: hypothetical protein [Oryza sativa (japonica
  misc_feature (43)..(236): Homolog of NCBI NO: 7489141 NR Description: hin1 protein - common tobacco
  misc_feature (1)..(226): Homolog of NCBI NO: 15231224 NR Description: proline-rich protein family [Arabidopsis
  misc_feature (4)..(237): Homolog of NCBI NO: 18401372 NR Description: expressed protein [Arabidopsis thaliana]
  misc_feature (1)..(222): Homolog of NCBI NO: 25518342 NR Description: hypothetical protein F22L4.1 [imported] -
  misc_feature (21)..(216): Homolog of NCBI NO: 15227542 NR Description: harpin-induced protein 1 family (HIN1)
MQQQDPNARPATGYPYPYPPQQPANGYPPNAATAYPYQNHNPHYAPQPSPRAVLLRRLFTAFTVFLLILGLILFIFFIVVRPQLPTVYLNSLSVSNFTVSDNRLAGNWDLGLQFQNPNSKMSLHYDGVLCTLYYDRASLSETRLQPFDLGTKDQTPINATLSVSGTYVDNRLVDSIGKERGEKGSVEFDLRVVSLVTFRYGVYRRRRYVTVFCDDVAVGVGGNSSSWNMVGSARRCKP

SEQ ID NO: 109719 - DNA, 879 bp, Zea mays subsp. mays
  misc_feature (1)..(879): Ceres Seq. ID no. 14309027
cacatcgagttcttcttctcggttctcaatttccacgataaaatggtgaccggcgacgtaaagctgattggctcatgggctagtgtcttcgtcatgagggccagaatcgctctcaacctcaaatctattaggtacgagtttctccaggagacatacggtactaagagcgagttgctccttaaatctaatcccgttcacaagaagatcccggttctgattcacgatgacaaacccgtgtgtgagtccaacatcatcgttcagtacatcgacgaggcttggagctcatatggaccgtctattctcccttcccagccctacgacagagccatcgctcggttctgggccgcctacgtcgacgataagtggtttattgctctgagaagtatcctaaccgctcgaggagaagaggagaagaaagcagccatagctgaagtcgaaggaaggactgaccatttagagaaagccttcatcgagtgcagcaatgggaaaccgttcttcaacggtgaccatatcggttacctagacattgccctagggagcttcttgggttggtggaaagtcgtggagttagacgccaatcatatacttcttgacgagaccaagactccctctctgttcaagtgggcagagcggttctgtaatgaccctgatgtgaagcctctcatgcccgagacagcaaagctagctgaatttgcgaggaaactctttcccaagccgcaggcttgatggcaaagtatattgactccttttaaatatattgttggagatagaaacaatataatatatcggttagtggaaatatgaaactggtttactagaacgtgtaagttatgttccatttcaatgtatccaagaccttctatcaagcaaatattttgt

SEQ ID NO: 109720 - protein, 241 aa, Zea mays subsp. mays
  misc_feature (1)..(241): Ceres Seq. ID no. 14309028
  misc_feature (101)..(216): Pfam Name: Glutathione S-transferase, C-terminal domain Pfam Description: Glutathione S-transferase, C-terminal domain
  misc_feature (15)..(183): Homolog of NCBI NO: 15218518 NR Description: glutathione transferase, putative [Arabidopsis
  misc_feature (19)..(239): Homolog of NCBI NO: 6652870 NR Description: glutathione S-transferase 1 [Papaver somniferum]
  misc_feature (19)..(239): Homolog of NCBI NO: 6652874 NR Description: glutathione S-transferase 3 [Papaver somniferum]
  misc_feature (19)..(235): Homolog of NCBI NO: 6856103 NR Description: glutathione S-transferase [Gossypium hirsutum]
  misc_feature (15)..(241): Homolog of NCBI NO: 15375408 NR Description: glutathione S-transferase [Arabidopsis thaliana]
  misc_feature (15)..(241): Homolog of NCBI NO: 11096016 NR Description: glutathione S-transferase [Arabidopsis thaliana]
  misc_feature (15)..(241): Homolog of NCBI NO: 15218517 NR Description: glutathione transferase, putative [Arabidopsis
HIEFFFSVLNFHDKMVTGDVKLIGSWASVFVMRARIALNLKSIRYEFLQETYGTKSELLLKSNPVHKKIPVLIHDDKPVCESNIIVQYIDEAWSSYGPSILPSQPYDRAIARFWAAYVDDKWFIALRSILTARGEEEKKAAIAEVEGRTDHLEKAFIECSNGKPFFNGDHIGYLDIALGSFLGWWKVVELDANHILLDETKTPSLFKWAERFCNDPDVKPLMPETAKLAEFARKLFPKPQA

SEQ ID NO: 109721 - protein, 227 aa, Zea mays subsp. mays
  misc_feature (1)..(227): Ceres Seq. ID no. 14309029
  misc_feature (87)..(202): Pfam Name: Glutathione S-transferase, C-terminal domain Pfam Description: Glutathione S-transferase, C-terminal domain
  misc_feature (1)..(169): Homolog of NCBI NO: 15218518 NR Description: glutathione transferase, putative [Arabidopsis
  misc_feature (5)..(225): Homolog of NCBI NO: 6652870 NR Description: glutathione S-transferase 1 [Papaver somniferum]
  misc_feature (5)..(225): Homolog of NCBI NO: 6652874 NR Description: glutathione S-transferase 3 [Papaver somniferum]
  misc_feature (5)..(221): Homolog of NCBI NO: 6856103 NR Description: glutathione S-transferase [Gossypium hirsutum]
  misc_feature (1)..(227): Homolog of NCBI NO: 15375408 NR Description: glutathione S-transferase [Arabidopsis thaliana]
  misc_feature (1)..(227): Homolog of NCBI NO: 11096016 NR Description: glutathione S-transferase [Arabidopsis thaliana]
  misc_feature (1)..(227): Homolog of NCBI NO: 15218517 NR Description: glutathione transferase, putative [Arabidopsis
MVTGDVKLIGSWASVFVMRARIALNLKSIRYEFLQETYGTKSELLLKSNPVHKKIPVLIHDDKPVCESNIIVQYIDEAWSSYGPSILPSQPYDRAIARFWAAYVDDKWFIALRSILTARGEEEKKAAIAEVEGRTDHLEKAFIECSNGKPFFNGDHIGYLDIALGSFLGWWKVVELDANHILLDETKTPSLFKWAERFCNDPDVKPLMPETAKLAEFARKLFPKPQA

SEQ ID NO: 109722 - protein, 210 aa, Zea mays subsp. mays
  misc_feature (1)..(210): Ceres Seq. ID no. 14309030
  misc_feature (70)..(185): Pfam Name: Glutathione S-transferase, C-terminal domain Pfam Description: Glutathione S-transferase, C-terminal domain
  misc_feature (1)..(152): Homolog of NCBI NO: 15218518 NR Description: glutathione transferase, putative [Arabidopsis
  misc_feature (1)..(208): Homolog of NCBI NO: 6652870 NR Description: glutathione S-transferase 1 [Papaver somniferum]
  misc_feature (1)..(208): Homolog of NCBI NO: 6652874 NR Description: glutathione S-transferase 3 [Papaver somniferum]
  misc_feature (1)..(204): Homolog of NCBI NO: 6856103 NR Description: glutathione S-transferase [Gossypium hirsutum]
  misc_feature (1)..(210): Homolog of NCBI NO: 15375408 NR Description: glutathione S-transferase [Arabidopsis thaliana]
  misc_feature (1)..(210): Homolog of NCBI NO: 11096016 NR Description: glutathione S-transferase [Arabidopsis thaliana]
  misc_feature (1)..(210): Homolog of NCBI NO: 15218517 NR Description: glutathione transferase, putative [Arabidopsis
MRARIALNLKSIRYEFLQETYGTKSELLLKSNPVHKKIPVLIHDDKPVCESNIIVQYIDEAWSSYGPSILPSQPYDRAIARFWAAYVDDKWFIALRSILTARGEEEKKAAIAEVEGRTDHLEKAFIECSNGKPFFNGDHIGYLDIALGSFLGWWKVVELDANHILLDETKTPSLFKWAERFCNDPDVKPLMPETAKLAEFARKLFPKPQA

SEQ ID NO: 109723 - DNA, 652 bp, Zea mays subsp. mays
  misc_feature (1)..(652): Ceres Seq. ID no. 15175181
atttttctctcgagtgttgttttttcctttctctcaaagatggctcaggaagatgttgcttcggttgttgagaagtctgttaccttcaccgcgtacaagccccagctgatcgtggagtctcagagggtcggtgacgctgttgccttctacaagaccgtgtttggtgcggaggagactggacactctctctaccctaagcgtaaggctgaccaagagcttcctcaccttgtctctgccgagctcaagctcgctggcactaccgtcgttgtttctgacgtctccgttaactctaatgcgaagatagggactatgcctgcgattctcgaaactgatgacgtggaagctgctgttatgaaagccgttggcgccggagctgtcaaagtggaggaggaggttgaaggtggagtcaagggtaaagtgacggatcccttcggtttcacatggatctttgtttctccggcgaagaagagtgagaacgacgagaccaaagaggtctaactgtcgtcgttgtctgatcggtttctgaacaaacttttattatcctagtctgtttatgcttttagtttgtctttttgtggaatctccggtatcaataaaccggatcggttagctaaatgactttatttcaagtttaattttcacccattttgac

SEQ ID NO: 109724 - protein, 165 aa, Zea mays subsp. mays
  misc_feature (1)..(165): Ceres Seq. ID no. 15175182
  misc_feature (26)..(158): Homolog of NCBI NO: 28565534 NR Description: early tobacco anther 1 [Nicotiana tabacum]
  misc_feature (14)..(165): Homolog of NCBI NO: 18422918 NR Description: expressed protein [Arabidopsis thaliana]
IFLSSVVFSFLSKMAQEDVASVVEKSVTFTAYKPQLIVESQRVGDAVAFYKTVFGAEETGHSLYPKRKADQELPHLVSAELKLAGTTVVVSDVSVNSNAKIGTMPAILETDDVEAAVMKAVGAGAVKVEEEVEGGVKGKVTDPFGFTWIFVSPAKKSENDETKEV

SEQ ID NO: 109725 - protein, 152 aa, Zea mays subsp. mays
  misc_feature (1)..(152): Ceres Seq. ID no. 15175183
  misc_feature (13)..(145): Homolog of NCBI NO: 28565534 NR Description: early tobacco anther 1 [Nicotiana tabacum]
  misc_feature (1)..(152): Homolog of NCBI NO: 18422918 NR Description: expressed protein [Arabidopsis thaliana]
MAQEDVASVVEKSVTFTAYKPQLIVESQRVGDAVAFYKTVFGAEETGHSLYPKRKADQELPHLVSAELKLAGTTVVVSDVSVNSNAKIGTMPAILETDDVEAAVMKAVGAGAVKVEEEVEGGVKGKVTDPFGFTWIFVSPAKKSENDETKEV

SEQ ID NO: 109726 - DNA, 908 bp, Zea mays subsp. mays
  misc_feature (1)..(908): Ceres Seq. ID no. 14309068
aatcttttttgatatactgttcacttcccagattatcaagctgatattcgagaagggttttttaagttcttgaaatcttctcgatcgaaggattccaaatgggttcggtttcgggtcaaacccgaattgctacgatgaacctctccctctcctcatcagagaagagctctaataatcgctcctcctcgcttctcaatcctaagaacgcagtttcagatagttacggggtctcttccaaatgcagcacattcctcaggggccagttccaaagaatacaactctcttatactcgccacactcgacctttgccaaaacgtgcaggccacgttgtgtctccgagctgcgtcatgccgttgacggaagagaatgtggagagagtgctcgacgaagtacgccccgcgttgatggcagacggaggaaacgtggcgctgcatgagatcgacggactcgtggtggttcttaagctacaaggagcttgtggttcgtgtcccagctcgtcgatgacgttaaagatgggaatcgagagtcgtctccgcgacaagattccggagatcatgtccgtcgagcagtttcttgaagcggagactggagggttggagctcaacgaggaaaacatcgaaaaggttctcgctgagctacggccttacctatcgggaacaggaggtggagggcttgagcttgttgagatcgatggttatatagttaagattcggctcactggaccagctgctggagtcatgacggttcgtgtcgcgttgactcagaaactgagggaaaacattccttcaataggtgcagtccagcttctagagtgaccactttttgtattgttcatctacgagagcctatatttcgattatatgtacatcattttcaaatctaacatccataccattcagttcctggtg

SEQ ID NO: 109727 - protein, 238 aa, Zea mays subsp. mays
  misc_feature (1)..(238): Ceres Seq. ID no. 14309069
  misc_feature (91)..(158): Pfam Name: NifU-like domain Pfam Description: NifU-like domain
  misc_feature (89)..(156): Homolog of NCBI NO: 39995588 NR Description: NifU-like domain protein [Geobacter
  misc_feature (86)..(226): Homolog of NCBI NO: 18411785 NR Description: NifU-related metallocluster assembly factor
  misc_feature (83)..(159): Homolog of NCBI NO: 37522446 NR Description: gsl2877 [Gloeobacter violaceus]
  misc_feature (84)..(159): Homolog of NCBI NO: 33862527 NR Description: NifU-like protein [Prochlorococcus marinus str.
  misc_feature (9)..(224): Homolog of NCBI NO: 8777425 NR Description: gene_id:K9P8.8~pir||T09896~strong similarity to
  misc_feature (66)..(237): Homolog of NCBI NO: 30698492 NR Description: NifU1 [Oryza sativa (japonica cultivar-group)]
  misc_feature (9)..(237): Homolog of NCBI NO: 18423084 NR Description: expressed protein [Arabidopsis thaliana]
  misc_feature (13)..(238): Homolog of NCBI NO: 7485833 NR Description: hypothetical protein F20B18.20 - Arabidopsis
  misc_feature (1)..(238): Homolog of NCBI NO: 21554503 NR Description: nitrogen fixation like protein [Arabidopsis
  misc_feature (1)..(238): Homolog of NCBI NO: 18416645 NR Description: nitrogen fixation protein, putative  (NifU)
MGSVSGQTRIATMNLSLSSSEKSSNNRSSSLLNPKNAVSDSYGVSSKCSTFLRGQFQRIQLSYTRHTRPLPKRAGHVVSPSCVMPLTEENVERVLDEVRPALMADGGNVALHEIDGLVVVLKLQGACGSCPSSSMTLKMGIESRLRDKIPEIMSVEQFLEAETGGLELNEENIEKVLAELRPYLSGTGGGGLELVEIDGYIVKIRLTGPAAGVMTVRVALTQKLRENIPSIGAVQLLE

SEQ ID NO: 109728 - protein, 226 aa, Zea mays subsp. mays
  misc_feature (1)..(226): Ceres Seq. ID no. 14309070
  misc_feature (79)..(146): Pfam Name: NifU-like domain Pfam Description: NifU-like domain
  misc_feature (77)..(144): Homolog of NCBI NO: 39995588 NR Description: NifU-like domain protein [Geobacter
  misc_feature (74)..(214): Homolog of NCBI NO: 18411785 NR Description: NifU-related metallocluster assembly factor
  misc_feature (71)..(147): Homolog of NCBI NO: 37522446 NR Description: gsl2877 [Gloeobacter violaceus]
  misc_feature (72)..(147): Homolog of NCBI NO: 33862527 NR Description: NifU-like protein [Prochlorococcus marinus str.
  misc_feature (1)..(212): Homolog of NCBI NO: 8777425 NR Description: gene_id:K9P8.8~pir||T09896~strong similarity to
  misc_feature (54)..(225): Homolog of NCBI NO: 30698492 NR Description: NifU1 [Oryza sativa (japonica cultivar-group)]
  misc_feature (1)..(225): Homolog of NCBI NO: 18423084 NR Description: expressed protein [Arabidopsis thaliana]
  misc_feature (1)..(226): Homolog of NCBI NO: 7485833 NR Description: hypothetical protein F20B18.20 - Arabidopsis
  misc_feature (1)..(226): Homolog of NCBI NO: 21554503 NR Description: nitrogen fixation like protein [Arabidopsis
  misc_feature (1)..(226): Homolog of NCBI NO: 18416645 NR Description: nitrogen fixation protein, putative  (NifU)
MNLSLSSSEKSSNNRSSSLLNPKNAVSDSYGVSSKCSTFLRGQFQRIQLSYTRHTRPLPKRAGHVVSPSCVMPLTEENVERVLDEVRPALMADGGNVALHEIDGLVVVLKLQGACGSCPSSSMTLKMGIESRLRDKIPEIMSVEQFLEAETGGLELNEENIEKVLAELRPYLSGTGGGGLELVEIDGYIVKIRLTGPAAGVMTVRVALTQKLRENIPSIGAVQLLE

SEQ ID NO: 109729 - protein, 155 aa, Zea mays subsp. mays; identical to SEQ ID NO: 55945
  misc_feature (1)..(155): Ceres Seq. ID no. 14309071
  misc_feature (8)..(75): Pfam Name: NifU-like domain Pfam Description: NifU-like domain
  misc_feature (6)..(73): Homolog of NCBI NO: 39995588 NR Description: NifU-like domain protein [Geobacter
  misc_feature (3)..(143): Homolog of NCBI NO: 18411785 NR Description: NifU-related metallocluster assembly factor
  misc_feature (1)..(76): Homolog of NCBI NO: 37522446 NR Description: gsl2877 [Gloeobacter violaceus]
  misc_feature (1)..(76): Homolog of NCBI NO: 33862527 NR Description: NifU-like protein [Prochlorococcus marinus str.
  misc_feature (1)..(141): Homolog of NCBI NO: 8777425 NR Description: gene_id:K9P8.8~pir||T09896~strong similarity to
  misc_feature (1)..(154): Homolog of NCBI NO: 30698492 NR Description: NifU1 [Oryza sativa (japonica cultivar-group)]
  misc_feature (1)..(154): Homolog of NCBI NO: 18423084 NR Description: expressed protein [Arabidopsis thaliana]
  misc_feature (1)..(155): Homolog of NCBI NO: 7485833 NR Description: hypothetical protein F20B18.20 - Arabidopsis
  misc_feature (1)..(155): Homolog of NCBI NO: 21554503 NR Description: nitrogen fixation like protein [Arabidopsis
  misc_feature (1)..(155): Homolog of NCBI NO: 18416645 NR Description: nitrogen fixation protein, putative  (NifU)

SEQ ID NO: 109730 - DNA, 784 bp, Zea mays subsp. mays
  misc_feature (1)..(784): Ceres Seq. ID no. 14309018
aaatcgacaggcgactacacagaaaaatgcaagatccacggaatcacgttccatcttctcccaccatctcctccgtctcttcctccgatcttgatacagaggatccttcttccatgatagaagcatcacacttggaactcttatgggacttagtttcaccgcaaccatgcccatgatgccattccgagcttcttcccaccgccacgtgtcaccctccctcacagcctccgacgcaacaagactcaaccagaggaaacgtcctccgtcgaactcgtctgagcgacatcgacgccgcaagtggtggcgcttttgccgagacgacggcgatggccctggaaacgggttgcaacgcggggccggagactgtagtagacgttcgtctctcggtgagtatctggaggttgaacggaggtttggagatgaagccgtctacggctccgccgagtcggagctagagggtgcggtggcgcgttaccgggaacagcagccggcggtggcggaacgggcgttgttcgccgacgggagggtacttcctccggcttctgctgagattgttaccggagaaagtacaccggtggctacggcactttgtagattcccggtttccttaaccggtatatgcagcggaggagggtgatagatccatcgtcggtccatgtgcttatttgtttctttaaaaaaattatgtattcaataatctttagaatcgtaataatcattgttagtcgagaaaatgtgatgaagtttaataacagcaacacatatagtcaactaaagtattgag

SEQ ID NO: 109731 - protein, 164 aa, Zea mays subsp. mays
  misc_feature (1)..(164): Ceres Seq. ID no. 14309019
  misc_feature (1)..(164): Homolog of NCBI NO: 15229554 NR Description: hypothetical protein [Arabidopsis thaliana]
MGLSFTATMPMMPFRASSHRHVSPSLTASDATRLNQRKRPPSNSSERHRRRKWWRFCRDDGDGPGNGLQRGAGDCSRRSSLGEYLEVERRFGDEAVYGSAESELEGAVARYREQQPAVAERALFADGRVLPPASAEIVTGESTPVATALCRFPVSLTGICSGGG

SEQ ID NO: 109732 - protein, 156 aa, Zea mays subsp. mays
  misc_feature (1)..(156): Ceres Seq. ID no. 14309020
  misc_feature (1)..(156): Homolog of NCBI NO: 15229554 NR Description: hypothetical protein [Arabidopsis thaliana]
MPMMPFRASSHRHVSPSLTASDATRLNQRKRPPSNSSERHRRRKWWRFCRDDGDGPGNGLQRGAGDCSRRSSLGEYLEVERRFGDEAVYGSAESELEGAVARYREQQPAVAERALFADGRVLPPASAEIVTGESTPVATALCRFPVSLTGICSGGG

SEQ ID NO: 109733 - protein, 154 aa, Zea mays subsp. mays
  misc_feature (1)..(154): Ceres Seq. ID no. 14309021
  misc_feature (1)..(154): Homolog of NCBI NO: 15229554 NR Description: hypothetical protein [Arabidopsis thaliana]
MMPFRASSHRHVSPSLTASDATRLNQRKRPPSNSSERHRRRKWWRFCRDDGDGPGNGLQRGAGDCSRRSSLGEYLEVERRFGDEAVYGSAESELEGAVARYREQQPAVAERALFADGRVLPPASAEIVTGESTPVATALCRFPVSLTGICSGGG

SEQ ID NO: 109734 - DNA, 607 bp, Zea mays subsp. mays
  misc_feature (1)..(607): Ceres Seq. ID no. 14309011
attttaccgtaagcggttatcatctgcatcccgacgctcttcaaacgaggatacttctttgttcattatcatggcaacaagaagcgctatcagatttgtgtctcgcaggttctctaatggcaaagttcttagcgaagaggaaaaggctgctgagaatgttttcatcaagaaaatggagaaggagaagcttgagaagatagctaggcagggtccgggagaacaagcagcaggttcagccaaggctagtggtggtggaggaacatcatcagctgaatccacgggacctaaagtgtcagaagacaaggacaggaactatgcggtagtggcgggtgtggtggctgtcgtcggtgccattggttggtacatgaaatcaggcggaaagaagcagcagccagaggttcaagagtgaagaaaggtagtagaatgctggactttggagtggctttactataataaagtagagagtagcttactcattcctcttgtatgagaaaccttggaattgcctactactctttcttttggttttgaccaaattttcagaagagattttaagtcttttaaagtttgctggcgtttagcttcggaatctttaagttcattagtc

SEQ ID NO: 109735 - protein, 135 aa, Zea mays subsp. mays
  misc_feature (1)..(135): Ceres Seq. ID no. 14309012
  misc_feature (26)..(130): Homolog of NCBI NO: 5821432 NR Description: F1F0-ATPase inhibitor protein
  misc_feature (24)..(135): Homolog of NCBI NO: 21592886 NR Description: F1F0-ATPase inhibitor protein [Arabidopsis
  misc_feature (24)..(135): Homolog of NCBI NO: 18401511 NR Description: expressed protein [Arabidopsis thaliana]
FYRKRLSSASRRSSNEDTSLFIIMATRSAIRFVSRRFSNGKVLSEEEKAAENVFIKKMEKEKLEKIARQGPGEQAAGSAKASGGGGTSSAESTGPKVSEDKDRNYAVVAGVVAVVGAIGWYMKSGGKKQQPEVQE

SEQ ID NO: 109736 - protein, 112 aa, Zea mays subsp. mays
  misc_feature (1)..(112): Ceres Seq. ID no. 14309013
  misc_feature (3)..(107): Homolog of NCBI NO: 5821432 NR Description: F1F0-ATPase inhibitor protein
  misc_feature (1)..(112): Homolog of NCBI NO: 21592886 NR Description: F1F0-ATPase inhibitor protein [Arabidopsis
  misc_feature (1)..(112): Homolog of NCBI NO: 18401511 NR Description: expressed protein [Arabidopsis thaliana]
MATRSAIRFVSRRFSNGKVLSEEEKAAENVFIKKMEKEKLEKIARQGPGEQAAGSAKASGGGGTSSAESTGPKVSEDKDRNYAVVAGVVAVVGAIGWYMKSGGKKQQPEVQE

SEQ ID NO: 109737 - protein, 78 aa, Zea mays subsp. mays
  misc_feature (1)..(78): Ceres Seq. ID no. 14309014
  misc_feature (1)..(73): Homolog of NCBI NO: 5821432 NR Description: F1F0-ATPase inhibitor protein
  misc_feature (1)..(78): Homolog of NCBI NO: 21592886 NR Description: F1F0-ATPase inhibitor protein [Arabidopsis
  misc_feature (1)..(78): Homolog of NCBI NO: 18401511 NR Description: expressed protein [Arabidopsis thaliana]
MEKEKLEKIARQGPGEQAAGSAKASGGGGTSSAESTGPKVSEDKDRNYAVVAGVVAVVGAIGWYMKSGGKKQQPEVQE

SEQ ID NO: 109738 - DNA, 887 bp, Zea mays subsp. mays
  misc_feature (1)..(887): Ceres Seq. ID no. 14309007
atttaggggctctctcagactcgggtatcgtcatcgtcatcgtcatcgtcttcgcccccgcgaagctcagtcgaagatgttaacggcggatataccaccgaatcagtcaatctacatcaaaaacctcaatgaaagaatcaagaaagaagaattgaagagatctctttactgtttgttctcacagtttgggaggatacttgatgtggttgctttgaagactcctaagctccgtggccaagcttgggttgcctttagtgatgtcactgctgctactaatgctgttcgccagatgcagaacttccctttctacgataagccgatgcgcatacaattcgcaaaagaaaagtcagattgtattgctagagaggaaggaactttcgttcccaaagataagaagaggaagaaagaagagaaagctgaaagaaagcgtgaagaaacccaacgaccaaacacagctaatggcccaactccacagaacggtgcccctccgccatcatcgttcaagccgagcggacaagaagcgatgccaccaaacaacatactcttcattcagaatcttccgcacgatacaacaaccgctatgcttgaatttctcttccgtcagtatccgggattcaaagagataagaatggtcgccgctaaaccagggattgcatttgcggagttcgaagacgatgctaaatcttccatggctatgcaaggtcttcaggacttcaaaatcactccccagtacccaatgctcatctcttttgccaagaaatgaagagaaactgcctgtgttttgtttgtcttttaagatgatgacagtgagacttggtgtgtataaccgacggtttaatgtttcggttcgattgactccggtttggtttagtcacgcggtttcacat

SEQ ID NO: 109739 - protein, 253 aa, Zea mays subsp. mays
  misc_feature (1)..(253): Ceres Seq. ID no. 14309008
  misc_feature (37)..(109): Pfam Name: RNA recognition motif. (a.k.a. RRM, RBD, or RNP domain) Pfam Description: RNA recognition motif. (a.k.a. RRM, RBD, or RNP
  misc_feature (32)..(253): Homolog of NCBI NO: 34897622 NR Description: putative small nuclear ribonucleoprotein U1A
  misc_feature (30)..(253): Homolog of NCBI NO: 2119045 NR Description: small nuclear ribonucleoprotein U1A - potato
  misc_feature (26)..(253): Homolog of NCBI NO: 421960 NR Description: small nuclear ribonucleoprotein U2B'' - potato
  misc_feature (163)..(253): Homolog of NCBI NO: 25294325 NR Description: hypothetical protein [imported] - Arabidopsis
  misc_feature (26)..(162): Homolog of NCBI NO: 25294325 NR Description: hypothetical protein [imported] - Arabidopsis
  misc_feature (26)..(253): Homolog of NCBI NO: 19347861 NR Description: putative spliceosomal protein (U2B) [Arabidopsis
  misc_feature (26)..(253): Homolog of NCBI NO: 30679892 NR Description: small nuclear ribonucleoprotein U2B (spliceosomal
  misc_feature (26)..(253): Homolog of NCBI NO: 30679897 NR Description: small nuclear ribonucleoprotein U2B (spliceosomal
  misc_feature (26)..(253): Homolog of NCBI NO: 21593001 NR Description: putative small nuclear ribonucleoprotein U2B
  misc_feature (26)..(253): Homolog of NCBI NO: 15227729 NR Description: small nuclear ribonucleoprotein U2B (spliceosomal
FRGSLRLGYRHRHRHRLRPREAQSKMLTADIPPNQSIYIKNLNERIKKEELKRSLYCLFSQFGRILDVVALKTPKLRGQAWVAFSDVTAATNAVRQMQNFPFYDKPMRIQFAKEKSDCIAREEGTFVPKDKKRKKEEKAERKREETQRPNTANGPTPQNGAPPPSSFKPSGQEAMPPNNILFIQNLPHDTTTAMLEFLFRQYPGFKEIRMVAAKPGIAFAEFEDDAKSSMAMQGLQDFKITPQYPMLISFAKK

SEQ ID NO: 109740 - protein, 228 aa, Zea mays subsp. mays
  misc_feature (1)..(228): Ceres Seq. ID no. 14309009
  misc_feature (12)..(84): Pfam Name: RNA recognition motif. (a.k.a. RRM, RBD, or RNP domain) Pfam Description: RNA recognition motif. (a.k.a. RRM, RBD, or RNP
  misc_feature (138)..(228): Homolog of NCBI NO: 25294325 NR Description: hypothetical protein [imported] - Arabidopsis
  misc_feature (1)..(137): Homolog of NCBI NO: 25294325 NR Description: hypothetical protein [imported] - Arabidopsis
  misc_feature (1)..(228): Homolog of NCBI NO: 19347861 NR Description: putative spliceosomal protein (U2B) [Arabidopsis
  misc_feature (1)..(228): Homolog of NCBI NO: 30679892 NR Description: small nuclear ribonucleoprotein U2B (spliceosomal
  misc_feature (5)..(228): Homolog of NCBI NO: 2119045 NR Description: small nuclear ribonucleoprotein U1A - potato
  misc_feature (1)..(228): Homolog of NCBI NO: 421960 NR Description: small nuclear ribonucleoprotein U2B'' - potato
  misc_feature (7)..(228): Homolog of NCBI NO: 34897622 NR Description: putative small nuclear ribonucleoprotein U1A
  misc_feature (1)..(228): Homolog of NCBI NO: 30679897 NR Description: small nuclear ribonucleoprotein U2B (spliceosomal
  misc_feature (1)..(228): Homolog of NCBI NO: 21593001 NR Description: putative small nuclear ribonucleoprotein U2B
  misc_feature (1)..(228): Homolog of NCBI NO: 15227729 NR Description: small nuclear ribonucleoprotein U2B (spliceosomal
MLTADIPPNQSIYIKNLNERIKKEELKRSLYCLFSQFGRILDVVALKTPKLRGQAWVAFSDVTAATNAVRQMQNFPFYDKPMRIQFAKEKSDCIAREEGTFVPKDKKRKKEEKAERKREETQRPNTANGPTPQNGAPPPSSFKPSGQEAMPPNNILFIQNLPHDTTTAMLEFLFRQYPGFKEIRMVAAKPGIAFAEFEDDAKSSMAMQGLQDFKITPQYPMLISFAKK

SEQ ID NO: 109741 - protein, 157 aa, Zea mays subsp. mays
  misc_feature (1)..(157): Ceres Seq. ID no. 14309010
  misc_feature (1)..(157): Homolog of NCBI NO: 34897622 NR Description: putative small nuclear ribonucleoprotein U1A
  misc_feature (1)..(157): Homolog of NCBI NO: 2119045 NR Description: small nuclear ribonucleoprotein U1A - potato
  misc_feature (1)..(157): Homolog of NCBI NO: 421960 NR Description: small nuclear ribonucleoprotein U2B'' - potato
  misc_feature (67)..(157): Homolog of NCBI NO: 25294325 NR Description: hypothetical protein [imported] - Arabidopsis
  misc_feature (1)..(66): Homolog of NCBI NO: 25294325 NR Description: hypothetical protein [imported] - Arabidopsis
  misc_feature (1)..(157): Homolog of NCBI NO: 19347861 NR Description: putative spliceosomal protein (U2B) [Arabidopsis
  misc_feature (1)..(157): Homolog of NCBI NO: 30679892 NR Description: small nuclear ribonucleoprotein U2B (spliceosomal
  misc_feature (1)..(157): Homolog of NCBI NO: 30679897 NR Description: small nuclear ribonucleoprotein U2B (spliceosomal
  misc_feature (1)..(157): Homolog of NCBI NO: 21593001 NR Description: putative small nuclear ribonucleoprotein U2B
  misc_feature (1)..(157): Homolog of NCBI NO: 15227729 NR Description: small nuclear ribonucleoprotein U2B (spliceosomal
MQNFPFYDKPMRIQFAKEKSDCIAREEGTFVPKDKKRKKEEKAERKREETQRPNTANGPTPQNGAPPPSSFKPSGQEAMPPNNILFIQNLPHDTTTAMLEFLFRQYPGFKEIRMVAAKPGIAFAEFEDDAKSSMAMQGLQDFKITPQYPMLISFAKK

SEQ ID NO: 109742 - DNA, 848 bp, Zea mays subsp. mays
  misc_feature (1)..(848): Ceres Seq. ID no. 14309003
attttgacatttttctcgagcagatcaatcttcttcggttagggttccctcgccgaatccctagatctgtaacggtttccaaaagagccaatggagaacgggaaacgagacagagaagacatggaagtgcaagccgcaccacggaagccacgcgtcctcctcgccgcgagcggaagcgtcgccgccatcaaattcggaaacctctgccattgtttcgccgaatgggccgaagtgagagccgtcgtctcgaaatcgtctctccacttcctcgacaggctctccctcccgcgggaagtcactctgtacaccgacgaagacgagtggtcaacctggaacaagatcggcgatccagtgcttcacatcgagctccgacgctgggctgacgtcatggtcatagctcctttgtctgctaacacattagccaagattgctggtgggctgtgtgataatcttctgacttgtatcgtacgagcttgggattatagcaaaccggttttcgttgcgcctgcgatgaatactttgatgtggaacaatcctttcacggagaggcatctttgttcccttgatgagcttgggatcacgctcattcctcccatcaagaagagattggcgtgtggtgactatggtaatggtgcaatggctgagccttctttgatttattccactgttagactcttctgggagtcgcaggttcgtcagcaaagctgaaaccatggtttccactttgcattggttggttctgttttaatgcttgtctttgtacatcttatgtctctagaggaccattttcactggcttcactcgtgttactgtaggaatatttaagtttattgtctcgctgtttggtg

SEQ ID NO: 109743 - protein, 205 aa, Zea mays subsp. mays
  misc_feature (1)..(205): Ceres Seq. ID no. 14309004
  misc_feature (20)..(140): Pfam Name: Flavoprotein Pfam Description: Flavoprotein
  misc_feature (13)..(194): Homolog of NCBI NO: 28849879 NR Description: RIKEN cDNA 8430432M10 [Mus musculus]
  misc_feature (13)..(203): Homolog of NCBI NO: 34863489 NR Description: similar to RIKEN cDNA 8430432M10 [Rattus
  misc_feature (83)..(202): Homolog of NCBI NO: 12583571 NR Description: putative halotolerance protein HAL3 homolog
  misc_feature (2)..(199): Homolog of NCBI NO: 37590890 NR Description: Unknown (protein for MGC:73297) [Danio rerio]
  misc_feature (21)..(194): Homolog of NCBI NO: 40556079 NR Description: CNPV141 HAL3-like domain protein [Canarypox
  misc_feature (21)..(194): Homolog of NCBI NO: 9634784 NR Description: ORF FPV114 HAL3 domain [Fowlpox virus]
  misc_feature (10)..(204): Homolog of NCBI NO: 13124308 NR Description: Halotolerance protein Hal3b
  misc_feature (1)..(204): Homolog of NCBI NO: 8778701 NR Description: T1N15.24 [Arabidopsis thaliana]
  misc_feature (1)..(205): Homolog of NCBI NO: 28948673 NR Description: Chain A, Ppc Decarboxylase Mutant C175s
  misc_feature (1)..(205): Homolog of NCBI NO: 15229569 NR Description: HAL3A protein [Arabidopsis thaliana]
MENGKRDREDMEVQAAPRKPRVLLAASGSVAAIKFGNLCHCFAEWAEVRAVVSKSSLHFLDRLSLPREVTLYTDEDEWSTWNKIGDPVLHIELRRWADVMVIAPLSANTLAKIAGGLCDNLLTCIVRAWDYSKPVFVAPAMNTLMWNNPFTERHLCSLDELGITLIPPIKKRLACGDYGNGAMAEPSLIYSTVRLFWESQVRQQS

SEQ ID NO: 109744 - protein, 195 aa, Zea mays subsp. mays
  misc_feature (1)..(195): Ceres Seq. ID no. 14309005
  misc_feature (10)..(130): Pfam Name: Flavoprotein Pfam Description: Flavoprotein
  misc_feature (3)..(184): Homolog of NCBI NO: 28849879 NR Description: RIKEN cDNA 8430432M10 [Mus musculus]
  misc_feature (3)..(193): Homolog of NCBI NO: 34863489 NR Description: similar to RIKEN cDNA 8430432M10 [Rattus
  misc_feature (73)..(192): Homolog of NCBI NO: 12583571 NR Description: putative halotolerance protein HAL3 homolog
  misc_feature (1)..(189): Homolog of NCBI NO: 37590890 NR Description: Unknown (protein for MGC:73297) [Danio rerio]
  misc_feature (11)..(184): Homolog of NCBI NO: 40556079 NR Description: CNPV141 HAL3-like domain protein [Canarypox
  misc_feature (11)..(184): Homolog of NCBI NO: 9634784 NR Description: ORF FPV114 HAL3 domain [Fowlpox virus]
  misc_feature (1)..(194): Homolog of NCBI NO: 13124308 NR Description: Halotolerance protein Hal3b
  misc_feature (1)..(194): Homolog of NCBI NO: 8778701 NR Description: T1N15.24 [Arabidopsis thaliana]
  misc_feature (1)..(195): Homolog of NCBI NO: 28948673 NR Description: Chain A, Ppc Decarboxylase Mutant C175s
  misc_feature (1)..(195): Homolog of NCBI NO: 15229569 NR Description: HAL3A protein [Arabidopsis thaliana]
MEVQAAPRKPRVLLAASGSVAAIKFGNLCHCFAEWAEVRAVVSKSSLHFLDRLSLPREVTLYTDEDEWSTWNKIGDPVLHIELRRWADVMVIAPLSANTLAKIAGGLCDNLLTCIVRAWDYSKPVFVAPAMNTLMWNNPFTERHLCSLDELGITLIPPIKKRLACGDYGNGAMAEPSLIYSTVRLFWESQVRQQS

SEQ ID NO: 109745 - protein, 126 aa, Zea mays subsp. mays
  misc_feature (1)..(126): Ceres Seq. ID no. 14309006
FDIFLEQINLLRLGFPRRIPRSVTVSKRANGERETRQRRHGSASRTTEATRPPRRERKRRRHQIRKPLPLFRRMGRSESRRLEIVSPLPRQALPPAGSHSVHRRRRVVNLEQDRRSSASHRAPTLG

SEQ ID NO: 109746 - DNA, 807 bp, Zea mays subsp. mays
  misc_feature (1)..(807): Ceres Seq. ID no. 15179942
atgagacgggcatttctaaaccctcgtcgtggctggctcggtgttacaacagatcaagcgaagaagcgaaagctctggtgagcaagcaagcagccatgtcgtggatgaaaggagatttactttccaaaaccaggaggcttgttggtggactcgctaccagagagcccgtttggcttaaagccatggaagcatcacctcctcctgtatttcctcgctctaatgggaacctcaagaagatttttctccctgaagatccctacgttcgtagattctcccgtaagcatcctgaagccaaactcgtcgaccccaacaaggcttcggcgtttattccagatccagcacgcgtatatggttgccgggtccttgaactgaccaagaatggcatcagcgaggatgacgccatgtctgtagctaatatggagtatcttgcggagagaaaggaaaagaagaaagcatacaaacgcctaaaggagcttgctgtactgcaagacaagtctcctcctcctaaaccgtatcttagtaccaaaaaagagatgcaaatccaagagaagaaagcacctgcggatcctcctagcgtccgcaggctagtcaaccagttgaaacagcagaaagatgtgttactgcaggataaacctggaggtagtgctaatcaggatcattggatcgacgaatagtttctccatcatcctttttcttttatgcaagttccaagtcttttcatacaagtgttgttattcccatttgattgttttcagaacattttcaacaaacaagtgttacaggaaagcacaatggttatgtctctcc

SEQ ID NO: 109747 - protein, 223 aa, Zea mays subsp. mays
  misc_feature (1)..(223): Ceres Seq. ID no. 15179943
  misc_feature (134)..(223): Homolog of NCBI NO: 9295724 NR Description: T24P13.13 [Arabidopsis thaliana]
  misc_feature (32)..(223): Homolog of NCBI NO: 21555186 NR Description: unknown [Arabidopsis thaliana]
  misc_feature (32)..(223): Homolog of NCBI NO: 18396035 NR Description: expressed protein [Arabidopsis thaliana]
ETGISKPSSWLARCYNRSSEEAKALVSKQAAMSWMKGDLLSKTRRLVGGLATREPVWLKAMEASPPPVFPRSNGNLKKIFLPEDPYVRRFSRKHPEAKLVDPNKASAFIPDPARVYGCRVLELTKNGISEDDAMSVANMEYLAERKEKKKAYKRLKELAVLQDKSPPPKPYLSTKKEMQIQEKKAPADPPSVRRLVNQLKQQKDVLLQDKPGGSANQDHWIDE

SEQ ID NO: 109748 - protein, 192 aa, Zea mays subsp. mays
  misc_feature (1)..(192): Ceres Seq. ID no. 15179944
  misc_feature (103)..(192): Homolog of NCBI NO: 9295724 NR Description: T24P13.13 [Arabidopsis thaliana]
  misc_feature (1)..(192): Homolog of NCBI NO: 21555186 NR Description: unknown [Arabidopsis thaliana]
  misc_feature (1)..(192): Homolog of NCBI NO: 18396035 NR Description: expressed protein [Arabidopsis thaliana]
MSWMKGDLLSKTRRLVGGLATREPVWLKAMEASPPPVFPRSNGNLKKIFLPEDPYVRRFSRKHPEAKLVDPNKASAFIPDPARVYGCRVLELTKNGISEDDAMSVANMEYLAERKEKKKAYKRLKELAVLQDKSPPPKPYLSTKKEMQIQEKKAPADPPSVRRLVNQLKQQKDVLLQDKPGGSANQDHWIDE

SEQ ID NO: 109749 - protein, 189 aa, Zea mays subsp. mays
  misc_feature (1)..(189): Ceres Seq. ID no. 15179945
  misc_feature (100)..(189): Homolog of NCBI NO: 9295724 NR Description: T24P13.13 [Arabidopsis thaliana]
  misc_feature (1)..(189): Homolog of NCBI NO: 21555186 NR Description: unknown [Arabidopsis thaliana]
  misc_feature (1)..(189): Homolog of NCBI NO: 18396035 NR Description: expressed protein [Arabidopsis thaliana]
MKGDLLSKTRRLVGGLATREPVWLKAMEASPPPVFPRSNGNLKKIFLPEDPYVRRFSRKHPEAKLVDPNKASAFIPDPARVYGCRVLELTKNGISEDDAMSVANMEYLAERKEKKKAYKRLKELAVLQDKSPPPKPYLSTKKEMQIQEKKAPADPPSVRRLVNQLKQQKDVLLQDKPGGSANQDHWIDE

SEQ ID NO: 109750 - DNA, 803 bp, Zea mays subsp. mays
  misc_feature (1)..(803): Ceres Seq. ID no. 14308995
aagaaaaagcaagcccatcgtcctaccgtattagcaatggaggcagcagcaggagaggggccgacgacgacgatgaagacggtgtgcgtgaccggcgcggggggtttcgtggcctcgtggctcgtcgagcgcctcctcgccggcggacgatacaagatccacggcaccgtccgcgatcccggcgacgccaagaacgcgcacctgctggggctggacggcgccgcggagcggctgcggctgttcaaggccgacctgctcgacttcggcagcctggcggcggccattgcaggctgtgacggcgtcttccacgtggcctgccccgtccccgactataccctcaccgaccccgagaccgagctgctggctcctgccgtgacgggcaccatgaacatcctcagggcgtgctccgacgcccatgtcaggagggtcgtcgtggtctcctctctctcggctgtcatgataaaccctgactggggcgagtgcaaggtcatggacgaaggttgctggtctgatgtcgacctctgcagaactactaagcgaaatctcatcttttcctacatgactctaagggcatgtacaatgctgaaggcaactaccatctccaagtgttttgaggaatgcagaggcaagactgtgagaaaggatgttatgtactatatttaattcatacacaatctttatcactatgcatcgatcaagaatatattggatatttgtagccattttcttgcatgtttatggtggatactaaaataaggcatgtgaatttcatgtagaatcataaatataatttatatttatat

SEQ ID NO: 109751 - protein, 220 aa, Zea mays subsp. mays
  misc_feature (1)..(220): Ceres Seq. ID no. 14308996
  misc_feature (26)..(177): Pfam Name: 3-beta hydroxysteroid dehydrogenase/isomerase family Pfam Description: 3-beta hydroxysteroid dehydrogenase/isomerase
  misc_feature (26)..(179): Homolog of NCBI NO: 40233135 NR Description: cinnamoyl CoA reductase [Populus tomentosa]
  misc_feature (26)..(179): Homolog of NCBI NO: 9998901 NR Description: cinnamoyl-CoA reductase [Populus balsamifera
  misc_feature (11)..(179): Homolog of NCBI NO: 25989515 NR Description: cinnamoyl CoA reductase [Eucalyptus globulus]
  misc_feature (26)..(179): Homolog of NCBI NO: 31414896 NR Description: cinnamoyl CoA reductase [Fragaria x ananassa]
  misc_feature (11)..(179): Homolog of NCBI NO: 7431408 NR Description: cinnamoyl-CoA reductase (EC 1.2.1.44) CCR1 -
  misc_feature (11)..(179): Homolog of NCBI NO: 7431407 NR Description: cinnamoyl-CoA reductase (EC 1.2.1.44) CCR - cider
  misc_feature (11)..(179): Homolog of NCBI NO: 10304406 NR Description: cinnamoyl-CoA reductase [Eucalyptus saligna]
  misc_feature (28)..(185): Homolog of NCBI NO: 25140436 NR Description: cinnamoyl CoA reductase 2 [Solanum tuberosum]
  misc_feature (28)..(179): Homolog of NCBI NO: 15226134 NR Description: cinnamoyl-CoA reductase family [Arabidopsis
  misc_feature (28)..(179): Homolog of NCBI NO: 15226135 NR Description: cinnamoyl-CoA reductase family [Arabidopsis
KKKQAHRPTVLAMEAAAGEGPTTTMKTVCVTGAGGFVASWLVERLLAGGRYKIHGTVRDPGDAKNAHLLGLDGAAERLRLFKADLLDFGSLAAAIAGCDGVFHVACPVPDYTLTDPETELLAPAVTGTMNILRACSDAHVRRVVVVSSLSAVMINPDWGECKVMDEGCWSDVDLCRTTKRNLIFSYMTLRACTMLKATTISKCFEECRGKTVRKDVMYYI

SEQ ID NO: 109752 - protein, 208 aa, Zea mays subsp. mays
  misc_feature (1)..(208): Ceres Seq. ID no. 14308997
  misc_feature (14)..(165): Pfam Name: 3-beta hydroxysteroid dehydrogenase/isomerase family Pfam Description: 3-beta hydroxysteroid dehydrogenase/isomerase
  misc_feature (14)..(167): Homolog of NCBI NO: 40233135 NR Description: cinnamoyl CoA reductase [Populus tomentosa]
  misc_feature (14)..(167): Homolog of NCBI NO: 9998901 NR Description: cinnamoyl-CoA reductase [Populus balsamifera
  misc_feature (1)..(167): Homolog of NCBI NO: 25989515 NR Description: cinnamoyl CoA reductase [Eucalyptus globulus]
  misc_feature (14)..(167): Homolog of NCBI NO: 31414896 NR Description: cinnamoyl CoA reductase [Fragaria x ananassa]
  misc_feature (1)..(167): Homolog of NCBI NO: 7431408 NR Description: cinnamoyl-CoA reductase (EC 1.2.1.44) CCR1 -
  misc_feature (1)..(167): Homolog of NCBI NO: 7431407 NR Description: cinnamoyl-CoA reductase (EC 1.2.1.44) CCR - cider
  misc_feature (1)..(167): Homolog of NCBI NO: 10304406 NR Description: cinnamoyl-CoA reductase [Eucalyptus saligna]
  misc_feature (16)..(173): Homolog of NCBI NO: 25140436 NR Description: cinnamoyl CoA reductase 2 [Solanum tuberosum]
  misc_feature (16)..(167): Homolog of NCBI NO: 15226134 NR Description: cinnamoyl-CoA reductase family [Arabidopsis
  misc_feature (16)..(167): Homolog of NCBI NO: 15226135 NR Description: cinnamoyl-CoA reductase family [Arabidopsis
MEAAAGEGPTTTMKTVCVTGAGGFVASWLVERLLAGGRYKIHGTVRDPGDAKNAHLLGLDGAAERLRLFKADLLDFGSLAAAIAGCDGVFHVACPVPDYTLTDPETELLAPAVTGTMNILRACSDAHVRRVVVVSSLSAVMINPDWGECKVMDEGCWSDVDLCRTTKRNLIFSYMTLRACTMLKATTISKCFEECRGKTVRKDVMYYI

SEQ ID NO: 109753 - protein, 196 aa, Zea mays subsp. mays
  misc_feature (1)..(196): Ceres Seq. ID no. 14308998
  misc_feature (2)..(153): Pfam Name: 3-beta hydroxysteroid dehydrogenase/isomerase family Pfam Description: 3-beta hydroxysteroid dehydrogenase/isomerase
  misc_feature (2)..(155): Homolog of NCBI NO: 40233135 NR Description: cinnamoyl CoA reductase [Populus tomentosa]
  misc_feature (2)..(155): Homolog of NCBI NO: 9998901 NR Description: cinnamoyl-CoA reductase [Populus balsamifera
  misc_feature (1)..(155): Homolog of NCBI NO: 25989515 NR Description: cinnamoyl CoA reductase [Eucalyptus globulus]
  misc_feature (2)..(155): Homolog of NCBI NO: 31414896 NR Description: cinnamoyl CoA reductase [Fragaria x ananassa]
  misc_feature (1)..(155): Homolog of NCBI NO: 7431408 NR Description: cinnamoyl-CoA reductase (EC 1.2.1.44) CCR1 -
  misc_feature (1)..(155): Homolog of NCBI NO: 7431407 NR Description: cinnamoyl-CoA reductase (EC 1.2.1.44) CCR - cider
  misc_feature (1)..(155): Homolog of NCBI NO: 10304406 NR Description: cinnamoyl-CoA reductase [Eucalyptus saligna]
  misc_feature (4)..(161): Homolog of NCBI NO: 25140436 NR Description: cinnamoyl CoA reductase 2 [Solanum tuberosum]
  misc_feature (4)..(155): Homolog of NCBI NO: 15226134 NR Description: cinnamoyl-CoA reductase family [Arabidopsis
  misc_feature (4)..(155): Homolog of NCBI NO: 15226135 NR Description: cinnamoyl-CoA reductase family [Arabidopsis
MKTVCVTGAGGFVASWLVERLLAGGRYKIHGTVRDPGDAKNAHLLGLDGAAERLRLFKADLLDFGSLAAAIAGCDGVFHVACPVPDYTLTDPETELLAPAVTGTMNILRACSDAHVRRVVVVSSLSAVMINPDWGECKVMDEGCWSDVDLCRTTKRNLIFSYMTLRACTMLKATTISKCFEECRGKTVRKDVMYYI

SEQ ID NO: 109754 - DNA, 605 bp, Zea mays subsp. mays
  misc_feature (1)..(605): Ceres Seq. ID no. 14308991
agaagagaagaaatggctgcttcagtgatgctatcatcggtgacgttgaaaccggcgggtttcacggtggagaagatgtcagcgagaggattgccgtcgctcacaagaacttcattcaaaatcgtcgcgagcggtgtcaagaagatcaagaccgacaagccctttggagttaacggcagcatggacttgagggacggcgtcgacgcctccggcagaaagggaaagggatacggtgtttacaagttcgttgacaagtatggagctaacgtcgatggatacagtcctatctacaacgaggaggagtggtcaccaggtggtgatgtgtacaagggaggagtcactggattggctatttgggcggtaacactcgccggaattctcgccggaggagctcttcttgtgtacaacacaagtgctttggctcagtaaaaaatcttcaaaacatcatcatgtttctctacatgttttgtgtttattgtttctcttctctgtaatgctactttgaattttataaagaactctagtagcgtttgtgtaatacccatctttcagagatctcggtgtacaaaaacaagaagttgaatacagttttatagactgaactc

SEQ ID NO: 109755 - protein, 142 aa, Zea mays subsp. mays
  misc_feature (1)..(142): Ceres Seq. ID no. 14308992
  misc_feature (44)..(142): Pfam Name: Photosystem II 10 kDa polypeptide PsbR Pfam Description: Photosystem II 10 kDa polypeptide PsbR
  misc_feature (5)..(141): Homolog of NCBI NO: 38636958 NR Description: putative photosystem II 10K protein
  misc_feature (5)..(142): Homolog of NCBI NO: 33694227 NR Description: 10 kDa photosystem II polypeptide [Trifolium
  misc_feature (5)..(142): Homolog of NCBI NO: 3914472 NR Description: Photosystem II 10 kDa polypeptide, chloroplast
  misc_feature (14)..(142): Homolog of NCBI NO: 1418984 NR Description: photosystem II 10 kD polypeptide [Lycopersicon
  misc_feature (7)..(142): Homolog of NCBI NO: 21491 NR Description: unnamed protein product [Solanum tuberosum]
  misc_feature (7)..(142): Homolog of NCBI NO: 131399 NR Description: Photosystem II 10 kDa polypeptide, chloroplast
  misc_feature (7)..(142): Homolog of NCBI NO: 3914471 NR Description: Photosystem II 10 kDa polypeptide, chloroplast
  misc_feature (8)..(142): Homolog of NCBI NO: 28207611 NR Description: photosystem II 10kDa polypeptide [Brassica rapa
  misc_feature (5)..(142): Homolog of NCBI NO: 15219268 NR Description: photosystem II polypeptide -related [Arabidopsis
  misc_feature (5)..(142): Homolog of NCBI NO: 1346871 NR Description: Photosystem II 10 kDa polypeptide, chloroplast
RREEMAASVMLSSVTLKPAGFTVEKMSARGLPSLTRTSFKIVASGVKKIKTDKPFGVNGSMDLRDGVDASGRKGKGYGVYKFVDKYGANVDGYSPIYNEEEWSPGGDVYKGGVTGLAIWAVTLAGILAGGALLVYNTSALAQ

SEQ ID NO: 109756 - protein, 138 aa, Zea mays subsp. mays
  misc_feature (1)..(138): Ceres Seq. ID no. 14308993
  misc_feature (40)..(138): Pfam Name: Photosystem II 10 kDa polypeptide PsbR Pfam Description: Photosystem II 10 kDa polypeptide PsbR
  misc_feature (1)..(137): Homolog of NCBI NO: 38636958 NR Description: putative photosystem II 10K protein
  misc_feature (1)..(138): Homolog of NCBI NO: 33694227 NR Description: 10 kDa photosystem II polypeptide [Trifolium
  misc_feature (1)..(138): Homolog of NCBI NO: 3914472 NR Description: Photosystem II 10 kDa polypeptide, chloroplast
  misc_feature (10)..(138): Homolog of NCBI NO: 1418984 NR Description: photosystem II 10 kD polypeptide [Lycopersicon
  misc_feature (3)..(138): Homolog of NCBI NO: 21491 NR Description: unnamed protein product [Solanum tuberosum]
  misc_feature (3)..(138): Homolog of NCBI NO: 131399 NR Description: Photosystem II 10 kDa polypeptide, chloroplast
  misc_feature (3)..(138): Homolog of NCBI NO: 3914471 NR Description: Photosystem II 10 kDa polypeptide, chloroplast
  misc_feature (4)..(138): Homolog of NCBI NO: 28207611 NR Description: photosystem II 10kDa polypeptide [Brassica rapa
  misc_feature (1)..(138): Homolog of NCBI NO: 15219268 NR Description: photosystem II polypeptide -related [Arabidopsis
  misc_feature (1)..(138): Homolog of NCBI NO: 1346871 NR Description: Photosystem II 10 kDa polypeptide, chloroplast
MAASVMLSSVTLKPAGFTVEKMSARGLPSLTRTSFKIVASGVKKIKTDKPFGVNGSMDLRDGVDASGRKGKGYGVYKFVDKYGANVDGYSPIYNEEEWSPGGDVYKGGVTGLAIWAVTLAGILAGGALLVYNTSALAQ

SEQ ID NO: 109757 - protein, 133 aa, Zea mays subsp. mays
  misc_feature (1)..(133): Ceres Seq. ID no. 14308994
  misc_feature (35)..(133): Pfam Name: Photosystem II 10 kDa polypeptide PsbR Pfam Description: Photosystem II 10 kDa polypeptide PsbR
  misc_feature (1)..(133): Homolog of NCBI NO: 1346871 NR Description: Photosystem II 10 kDa polypeptide, chloroplast
  misc_feature (1)..(132): Homolog of NCBI NO: 38636958 NR Description: putative photosystem II 10K protein
  misc_feature (1)..(133): Homolog of NCBI NO: 33694227 NR Description: 10 kDa photosystem II polypeptide [Trifolium
  misc_feature (1)..(133): Homolog of NCBI NO: 3914472 NR Description: Photosystem II 10 kDa polypeptide, chloroplast
  misc_feature (5)..(133): Homolog of NCBI NO: 1418984 NR Description: photosystem II 10 kD polypeptide [Lycopersicon
  misc_feature (1)..(133): Homolog of NCBI NO: 21491 NR Description: unnamed protein product [Solanum tuberosum]
  misc_feature (1)..(133): Homolog of NCBI NO: 131399 NR Description: Photosystem II 10 kDa polypeptide, chloroplast
  misc_feature (1)..(133): Homolog of NCBI NO: 3914471 NR Description: Photosystem II 10 kDa polypeptide, chloroplast
  misc_feature (1)..(133): Homolog of NCBI NO: 28207611 NR Description: photosystem II 10kDa polypeptide [Brassica rapa
  misc_feature (1)..(133): Homolog of NCBI NO: 15219268 NR Description: photosystem II polypeptide -related [Arabidopsis
MLSSVTLKPAGFTVEKMSARGLPSLTRTSFKIVASGVKKIKTDKPFGVNGSMDLRDGVDASGRKGKGYGVYKFVDKYGANVDGYSPIYNEEEWSPGGDVYKGGVTGLAIWAVTLAGILAGGALLVYNTSALAQ

SEQ ID NO: 109758 - DNA, 993 bp, Zea mays subsp. mays
  misc_feature (1)..(993): Ceres Seq. ID no. 14308999
cttacccttcgcggagatcggagaaaatggctgccaatttctgggaatcgtctcaatacaaacagcttttggaccaagaagaagtggatgtagttcaacctctcgacaaagaacgtggaatttcagtcgaggatttcaagctcatcaagttccatatgtctaatcatataatgaagttggctcagcacattaaagtgaggcaaagggttgtggctaccgctataacgtacatgagacgggtttataccaagaagagcatggtagagtttgagccccgtcttgttgctattgcatgcttgtacctggctttctaagctgaagagagcatagtccaggccaggaatcttgttttctacagcaaaagattgtatccggatgagtacaagtatgaactaaaagatatattaggaatggagatgagggtcttagaagcactggactattatctggttgtgtttcacccttaccggtcattatctgattttttgcaagatgctgcattgaacgatgtcaatatgaaccagtttacatggggaattgtcaacgatacttataagatggacctgattcttgtacaccctccttatcgcatagcgctagcgtgcatatacatagcaagtgtccagagagagaaagacatcaccgcatggcttcaagatcttaacgaggacatgaacttggtgaaggacattgccatggagattctggacttctacgagaactacagaaccatcacggatgaaaaagtgagttctgcgttcagcaaactggctttgaagccgtgacagctggggaatagcctccatctcttcaatttatctgatgctctctttatacaagaaaaacaaaagattaaagacttcctcagttgcccatgttagttttgtggcggacatgtaacattgttgaatcctaccaaacataattctttaagtgacaacttcatctactgacactttttggtcaaaagttgaaatttttatacgtgggaag

SEQ ID NO: 109759 - protein, 124 aa, Zea mays subsp. mays
  misc_feature (1)..(124): Ceres Seq. ID no. 14309000
  misc_feature (16)..(124): Pfam Name: Cyclin, C-terminal domain Pfam Description: Cyclin, C-terminal domain
  misc_feature (1)..(124): Homolog of NCBI NO: 34783612 NR Description: Unknown (protein for IMAGE:6165083) [Homo sapiens]
  misc_feature (1)..(124): Homolog of NCBI NO: 11042056 NR Description: dJ199J3.4 (cyclin C) [Homo sapiens]
  misc_feature (1)..(124): Homolog of NCBI NO: 4885119 NR Description: cyclin C [Homo sapiens]
  misc_feature (1)..(124): Homolog of NCBI NO: 1705767 NR Description: Cyclin C
  misc_feature (1)..(124): Homolog of NCBI NO: 34867083 NR Description: cyclin C [Rattus norvegicus]
  misc_feature (1)..(124): Homolog of NCBI NO: 38382739 NR Description: Unknown (protein for IMAGE:6391891) [Mus musculus]
  misc_feature (1)..(103): Homolog of NCBI NO: 28828497 NR Description: similar to Mus musculus (Mouse). 16 days neonate cDNA, RIKEN full-length enriched library, clone:A130067E11
  misc_feature (1)..(123): Homolog of NCBI NO: 3334144 NR Description: G1/S-SPECIFIC CYCLIN C-TYPE
  misc_feature (1)..(124): Homolog of NCBI NO: 15239664 NR Description: cyclin family [Arabidopsis thaliana]
  misc_feature (1)..(123): Homolog of NCBI NO: 15239665 NR Description: cyclin family [Arabidopsis thaliana]
MEMRVLEALDYYLVVFHPYRSLSDFLQDAALNDVNMNQFTWGIVNDTYKMDLILVHPPYRIALACIYIASVQREKDITAWLQDLNEDMNLVKDIAMEILDFYENYRTITDEKVSSAFSKLALKP

SEQ ID NO: 109760 - protein, 122 aa, Zea mays subsp. mays
  misc_feature (1)..(122): Ceres Seq. ID no. 14309001
  misc_feature (14)..(122): Pfam Name: Cyclin, C-terminal domain Pfam Description: Cyclin, C-terminal domain
  misc_feature (1)..(122): Homolog of NCBI NO: 34783612 NR Description: Unknown (protein for IMAGE:6165083) [Homo sapiens]
  misc_feature (1)..(122): Homolog of NCBI NO: 11042056 NR Description: dJ199J3.4 (cyclin C) [Homo sapiens]
  misc_feature (1)..(122): Homolog of NCBI NO: 4885119 NR Description: cyclin C [Homo sapiens]
  misc_feature (1)..(122): Homolog of NCBI NO: 1705767 NR Description: Cyclin C
  misc_feature (1)..(122): Homolog of NCBI NO: 34867083 NR Description: cyclin C [Rattus norvegicus]
  misc_feature (1)..(122): Homolog of NCBI NO: 38382739 NR Description: Unknown (protein for IMAGE:6391891) [Mus musculus]
  misc_feature (1)..(101): Homolog of NCBI NO: 28828497 NR Description: similar to Mus musculus (Mouse). 16 days neonate cDNA, RIKEN full-length enriched library, clone:A130067E11
  misc_feature (1)..(121): Homolog of NCBI NO: 3334144 NR Description: G1/S-SPECIFIC CYCLIN C-TYPE
  misc_feature (1)..(122): Homolog of NCBI NO: 15239664 NR Description: cyclin family [Arabidopsis thaliana]
  misc_feature (1)..(121): Homolog of NCBI NO: 15239665 NR Description: cyclin family [Arabidopsis thaliana]
MRVLEALDYYLVVFHPYRSLSDFLQDAALNDVNMNQFTWGIVNDTYKMDLILVHPPYRIALACIYIASVQREKDITAWLQDLNEDMNLVKDIAMEILDFYENYRTITDEKVSSAFSKLALKP

SEQ ID NO: 109761 - protein, 103 aa, Zea mays subsp. mays
  misc_feature (1)..(103): Ceres Seq. ID no. 14309002
  misc_feature (17)..(103): Pfam Name: Cyclin, N-terminal domain Pfam Description: Cyclin, N-terminal domain
  misc_feature (9)..(103): Homolog of NCBI NO: 34783612 NR Description: Unknown (protein for IMAGE:6165083) [Homo sapiens]
  misc_feature (9)..(103): Homolog of NCBI NO: 11042056 NR Description: dJ199J3.4 (cyclin C) [Homo sapiens]
  misc_feature (9)..(103): Homolog of NCBI NO: 4885119 NR Description: cyclin C [Homo sapiens]
  misc_feature (9)..(103): Homolog of NCBI NO: 1705767 NR Description: Cyclin C
  misc_feature (9)..(103): Homolog of NCBI NO: 34867083 NR Description: cyclin C [Rattus norvegicus]
  misc_feature (1)..(103): Homolog of NCBI NO: 38382739 NR Description: Unknown (protein for IMAGE:6391891) [Mus musculus]
  misc_feature (9)..(103): Homolog of NCBI NO: 28828497 NR Description: similar to Mus musculus (Mouse). 16 days neonate cDNA, RIKEN full-length enriched library, clone:A130067E11
  misc_feature (9)..(103): Homolog of NCBI NO: 3334144 NR Description: G1/S-SPECIFIC CYCLIN C-TYPE
  misc_feature (9)..(103): Homolog of NCBI NO: 15239664 NR Description: cyclin family [Arabidopsis thaliana]
  misc_feature (9)..(103): Homolog of NCBI NO: 15239665 NR Description: cyclin family [Arabidopsis thaliana]
YPSRRSEKMAANFWESSQYKQLLDQEEVDVVQPLDKERGISVEDFKLIKFHMSNHIMKLAQHIKVRQRVVATAITYMRRVYTKKSMVEFEPRLVAIACLYLAF

SEQ ID NO: 109762 - DNA, 1062 bp, Zea mays subsp. mays
  misc_feature (1)..(1062): Ceres Seq. ID no. 14308987
atttcaaatttcatacacataaactaaagtctcatcctcagaatgacaggcagagaaattctccataagatgaagctgaaggctggattctgcggatctgaaacgggcagaggtaaaagcaggacgtggaagaacatctcccacggttttcactttgtcaagggcaaatcaaaccatccaatggaggactacgttgtgtctgagttcaaaaaagtggacaatcacgatttgggtttgtttgccatctttgacggtcacttgggacatgacgtggccaagtacttgcagaccaatctttttgacaacatactcaaagagaaggattttcggactgatatggacaaggctataaggaatgcatacatatcaacagatgcttttatattagagcagtcacttaaacttggcaaaggcggatcaactgctgtaactggaattctgattgatgggcaaaagctagtggttgctaacgttggagactcacgggcggtgatgtcaaagaatggtgttgcgtctcagctctcggttgatcacgaaccaagcaaggagcaaaaggaaatagagagccgtggcggctttgtgtccaatattccaggggacgttccaagagttgatggacaactagcggttgcgagggcgttcggagataagagcttaaagatacatctgagctcagaaccagacataacacaccagacaatcgatgatgagaccgagttcattgttttcgcgagtgatgggatttggaaggtgatgtcaaaccaagaagctgtggacgcgatcagaagcataaaagatccacatgaggcagccaaggagttgatagaagaagcaatctctaggaaaagcaaagatgacatctcctgtatcgttgtaagattctagtataaatttttcaccaatcaagtgtctaagagagataaaaagacatgtaaaagctcaagctatatgtgctatatatgtgaccaatataaagtctggtctcttgtaaaaccattgatgataaaatttcgccaaaatgtaaaagaaatttcgtgcaaatggttgttggtccattagtct

SEQ ID NO: 109763 - protein, 280 aa, Zea mays subsp. mays
  misc_feature (1)..(280): Ceres Seq. ID no. 14308988
  misc_feature (32)..(273): Pfam Name: Protein phosphatase 2C Pfam Description: Protein phosphatase 2C
  misc_feature (15)..(280): Homolog of NCBI NO: 18395099 NR Description: protein phosphatase 2C (PP2C), putative
  misc_feature (19)..(280): Homolog of NCBI NO: 32488822 NR Description: OSJNBa0085I10.2 [Oryza sativa (japonica
  misc_feature (1)..(280): Homolog of NCBI NO: 23307574 NR Description: putative protein phosphatase 2C homolog
  misc_feature (1)..(280): Homolog of NCBI NO: 21539551 NR Description: putative protein phosphatase type 2C [Arabidopsis
  misc_feature (1)..(280): Homolog of NCBI NO: 15232538 NR Description: protein phosphatase 2C (PP2C), putative
  misc_feature (1)..(279): Homolog of NCBI NO: 4336436 NR Description: protein phosphatase type 2C [Lotus japonicus]
  misc_feature (29)..(280): Homolog of NCBI NO: 7488280 NR Description: protein phosphatase 2C homolog F20O9.80 -
  misc_feature (1)..(280): Homolog of NCBI NO: 25411985 NR Description: probable protein phosphatase 2C [imported] -
  misc_feature (1)..(280): Homolog of NCBI NO: 18399423 NR Description: protein phosphatase 2C (PP2C), putative
  misc_feature (1)..(280): Homolog of NCBI NO: 18417190 NR Description: protein phosphatase 2C (PP2C), putative
MTGREILHKMKLKAGFCGSETGRGKSRTWKNISHGFHFVKGKSNHPMEDYVVSEFKKVDNHDLGLFAIFDGHLGHDVAKYLQTNLFDNILKEKDFRTDMDKAIRNAYISTDAFILEQSLKLGKGGSTAVTGILIDGQKLVVANVGDSRAVMSKNGVASQLSVDHEPSKEQKEIESRGGFVSNIPGDVPRVDGQLAVARAFGDKSLKIHLSSEPDITHQTIDDETEFIVFASDGIWKVMSNQEAVDAIRSIKDPHEAAKELIEEAISRKSKDDISCIVVRF

SEQ ID NO: 109764 - protein, 271 aa, Zea mays subsp. mays
  misc_feature (1)..(271): Ceres Seq. ID no. 14308989
  misc_feature (23)..(264): Pfam Name: Protein phosphatase 2C Pfam Description: Protein phosphatase 2C
  misc_feature (6)..(271): Homolog of NCBI NO: 18395099 NR Description: protein phosphatase 2C (PP2C), putative
  misc_feature (10)..(271): Homolog of NCBI NO: 32488822 NR Description: OSJNBa0085I10.2 [Oryza sativa (japonica
  misc_feature (1)..(271): Homolog of NCBI NO: 23307574 NR Description: putative protein phosphatase 2C homolog
  misc_feature (1)..(271): Homolog of NCBI NO: 21539551 NR Description: putative protein phosphatase type 2C [Arabidopsis
  misc_feature (1)..(271): Homolog of NCBI NO: 15232538 NR Description: protein phosphatase 2C (PP2C), putative
  misc_feature (1)..(270): Homolog of NCBI NO: 4336436 NR Description: protein phosphatase type 2C [Lotus japonicus]
  misc_feature (20)..(271): Homolog of NCBI NO: 7488280 NR Description: protein phosphatase 2C homolog F20O9.80 -
  misc_feature (1)..(271): Homolog of NCBI NO: 25411985 NR Description: probable protein phosphatase 2C [imported] -
  misc_feature (1)..(271): Homolog of NCBI NO: 18399423 NR Description: protein phosphatase 2C (PP2C), putative
  misc_feature (1)..(271): Homolog of NCBI NO: 18417190 NR Description: protein phosphatase 2C (PP2C), putative
MKLKAGFCGSETGRGKSRTWKNISHGFHFVKGKSNHPMEDYVVSEFKKVDNHDLGLFAIFDGHLGHDVAKYLQTNLFDNILKEKDFRTDMDKAIRNAYISTDAFILEQSLKLGKGGSTAVTGILIDGQKLVVANVGDSRAVMSKNGVASQLSVDHEPSKEQKEIESRGGFVSNIPGDVPRVDGQLAVARAFGDKSLKIHLSSEPDITHQTIDDETEFIVFASDGIWKVMSNQEAVDAIRSIKDPHEAAKELIEEAISRKSKDDISCIVVRF

SEQ ID NO: 109765 - protein, 234 aa, Zea mays subsp. mays
  misc_feature (1)..(234): Ceres Seq. ID no. 14308990
  misc_feature (1)..(227): Pfam Name: Protein phosphatase 2C Pfam Description: Protein phosphatase 2C
  misc_feature (1)..(234): Homolog of NCBI NO: 18395099 NR Description: protein phosphatase 2C (PP2C), putative
  misc_feature (1)..(234): Homolog of NCBI NO: 32488822 NR Description: OSJNBa0085I10.2 [Oryza sativa (japonica
  misc_feature (1)..(234): Homolog of NCBI NO: 23307574 NR Description: putative protein phosphatase 2C homolog
  misc_feature (1)..(234): Homolog of NCBI NO: 21539551 NR Description: putative protein phosphatase type 2C [Arabidopsis
  misc_feature (1)..(234): Homolog of NCBI NO: 15232538 NR Description: protein phosphatase 2C (PP2C), putative
  misc_feature (1)..(233): Homolog of NCBI NO: 4336436 NR Description: protein phosphatase type 2C [Lotus japonicus]
  misc_feature (1)..(234): Homolog of NCBI NO: 7488280 NR Description: protein phosphatase 2C homolog F20O9.80 -
  misc_feature (1)..(234): Homolog of NCBI NO: 25411985 NR Description: probable protein phosphatase 2C [imported] -
  misc_feature (1)..(234): Homolog of NCBI NO: 18399423 NR Description: protein phosphatase 2C (PP2C), putative
  misc_feature (1)..(234): Homolog of NCBI NO: 18417190 NR Description: protein phosphatase 2C (PP2C), putative
MEDYVVSEFKKVDNHDLGLFAIFDGHLGHDVAKYLQTNLFDNILKEKDFRTDMDKAIRNAYISTDAFILEQSLKLGKGGSTAVTGILIDGQKLVVANVGDSRAVMSKNGVASQLSVDHEPSKEQKEIESRGGFVSNIPGDVPRVDGQLAVARAFGDKSLKIHLSSEPDITHQTIDDETEFIVFASDGIWKVMSNQEAVDAIRSIKDPHEAAKELIEEAISRKSKDDISCIVVRF

SEQ ID NO: 109766 - DNA, 1093 bp, Zea mays subsp. mays
  misc_feature (1)..(1093): Ceres Seq. ID no. 14308980
atctgtcctctcgaggttagggttctttagagagagagtttatatcttaacgaacgatccttcggatcttgttgtggaagcttgaatactaacatgttttaaaaactcttcgtttttctttcttttctaaacaattggaaaattatcaacttatagagctttcgatcgtattatttggtagatcgtcgccattaaaacgaatataatctgttttccccttgttgatattgttcaatatcttcataaactactctcttttcttgaaactatattcttattaaagaatttttttcaaaatatttgaaataatggaaacaatatcagtgcaacgttcgtcatcgggtaagcaggtttctggtatgaggccattcaagaaccctagaagaaggagttctcgtggttctctttcgagatccggaggaagcttggcactccctaataatccggcgtcttcttggggatcttcgccggcgtatcctacgccgcctgctaactactcgcagcctcctcttctgcctcttccacgtgtcaacagctcaactcttcctctgcaacgcgtcaagagttctcacccacgtgtgaacagctctactctttattgcggtcagacaagagcaacgtctgaaacacagcagaagaaagtagactacgttcaatctgtacctaggttgactcgaaccggttcggttcctgtctggtctaacaatccgtgtgattaccctaaaggatttgatggttatcctggtccagcaatcttgctactctctcctccgcctagtagtttgcccatgcctaagttttcgatcaaaccgaagcttcgttgcaacgcagaagctgcaggcaaaactgagttagccaccgataacatccggcgagttttacagctccggtgaaaggtggtgctactgctacgtaacgatattgattttactaaataaaataagcccatgggcttttatgggcttgtgtctatcttatttttcaagtgatagagctctctccttttgtgtgatttgctaagccgtaactttttaaaaggctttgttgggcacanaagtgtagccttaccggaantatattttcttttatactg

SEQ ID NO: 109767 - protein, 194 aa, Zea mays subsp. mays
  misc_feature (1)..(194): Ceres Seq. ID no. 14308981
  misc_feature (1)..(194): Homolog of NCBI NO: 15223762 NR Description: expressed protein [Arabidopsis thaliana]
METISVQRSSSGKQVSGMRPFKNPRRRSSRGSLSRSGGSLALPNNPASSWGSSPAYPTPPANYSQPPLLPLPRVNSSTLPLQRVKSSHPRVNSSTLYCGQTRATSETQQKKVDYVQSVPRLTRTGSVPVWSNNPCDYPKGFDGYPGPAILLLSPPPSSLPMPKFSIKPKLRCNAEAAGKTELATDNIRRVLQLR

SEQ ID NO: 109768 - protein, 177 aa, Zea mays subsp. mays
  misc_feature (1)..(177): Ceres Seq. ID no. 14308982
  misc_feature (1)..(177): Homolog of NCBI NO: 15223762 NR Description: expressed protein [Arabidopsis thaliana]
MRPFKNPRRRSSRGSLSRSGGSLALPNNPASSWGSSPAYPTPPANYSQPPLLPLPRVNSSTLPLQRVKSSHPRVNSSTLYCGQTRATSETQQKKVDYVQSVPRLTRTGSVPVWSNNPCDYPKGFDGYPGPAILLLSPPPSSLPMPKFSIKPKLRCNAEAAGKTELATDNIRRVLQLR

SEQ ID NO: 109769 - DNA, 1028 bp, Zea mays subsp. mays
  misc_feature (1)..(1028): Ceres Seq. ID no. 14308976
aaggatacatttagaaacagacaaccgctgataaacatgaggacggaggagaaagaagaaggagaagaagaagaagaagaacaacaacaatggccatcatcaagatcagctcacgaggttttactaattgttcttccatatctccactcactcttcgagcttctctccatgaccggcgtttcacgctccttaagagacgcgatcagagacgaaacagctttatggacaaagatcgttgttgaaccacccctgcgttctcgtctaaccgatgatattctacgggagatcacttccaaatccgccggaaaattaaacactctgattctccgacagtgtcttaggatcaccgacaagggacttcgacgtgtggtggacgcaaatcctctgataagaaagataattgtgcccggatgcactgaactgactccagaaggaatcattggatgcgttgaaagcttagcaaccgtggagacacttcacatcaacggcgtacatcgcttcactaaagaccatctctcagcactctccacttaccttcctcacgagggcgccatagatgtcgaggtctgtcccaaatgtgacctagtcaagatgattccctcatgctcaagagcgtcatgtaaccgtgggagaaggcaagaacgaaagtgcaggggatgctggttctgcgtccctagatgcacggagtgtgcagtgtgcctcggatcagacactgagattcaagaagcagcctgcggtggcgacagtctgtgtctcgaatgttggctcgtgcttccgaagtgcaggttctgcaataaaccttattgctcaagtcacagcagtctccgacatgatattgcaaccaatgatccttcgtctccgcccatgtttgaatgccaagcttgtcactacagggcaggtacaaacccatatgacgctttcgactatcaaatctaaaaaaaacttgtttttaaagccatacttgttactacgtacaatctttgttcatgttttgtatgaaaacattggagtatgaaatattatgagac

SEQ ID NO: 109770 - protein, 311 aa, Zea mays subsp. mays
  misc_feature (1)..(311): Ceres Seq. ID no. 14308977
  misc_feature (87)..(260): Homolog of NCBI NO: 22655121 NR Description: expressed protein [Arabidopsis thaliana]
  misc_feature (87)..(260): Homolog of NCBI NO: 18404757 NR Description: F-box protein family [Arabidopsis thaliana]
  misc_feature (38)..(155): Homolog of NCBI NO: 38345348 NR Description: OSJNBa0081L15.21 [Oryza sativa (japonica
  misc_feature (53)..(266): Homolog of NCBI NO: 22655121 NR Description: expressed protein [Arabidopsis thaliana]
  misc_feature (53)..(266): Homolog of NCBI NO: 18404757 NR Description: F-box protein family [Arabidopsis thaliana]
  misc_feature (22)..(273): Homolog of NCBI NO: 18405307 NR Description: expressed protein [Arabidopsis thaliana]
  misc_feature (38)..(177): Homolog of NCBI NO: 38175497 NR Description: F-box protein family-like protein
  misc_feature (86)..(295): Homolog of NCBI NO: 38175497 NR Description: F-box protein family-like protein
  misc_feature (22)..(311): Homolog of NCBI NO: 18379265 NR Description: expressed protein [Arabidopsis thaliana]
  misc_feature (22)..(311): Homolog of NCBI NO: 21536590 NR Description: unknown [Arabidopsis thaliana]
KDTFRNRQPLINMRTEEKEEGEEEEEEQQQWPSSRSAHEVLLIVLPYLHSLFELLSMTGVSRSLRDAIRDETALWTKIVVEPPLRSRLTDDILREITSKSAGKLNTLILRQCLRITDKGLRRVVDANPLIRKIIVPGCTELTPEGIIGCVESLATVETLHINGVHRFTKDHLSALSTYLPHEGAIDVEVCPKCDLVKMIPSCSRASCNRGRRQERKCRGCWFCVPRCTECAVCLGSDTEIQEAACGGDSLCLECWLVLPKCRFCNKPYCSSHSSLRHDIATNDPSSPPMFECQACHYRAGTNPYDAFDYQI

SEQ ID NO: 109771 - protein, 299 aa, Zea mays subsp. mays
  misc_feature (1)..(299): Ceres Seq. ID no. 14308978
  misc_feature (10)..(299): Homolog of NCBI NO: 21536590 NR Description: unknown [Arabidopsis thaliana]
  misc_feature (75)..(248): Homolog of NCBI NO: 22655121 NR Description: expressed protein [Arabidopsis thaliana]
  misc_feature (75)..(248): Homolog of NCBI NO: 18404757 NR Description: F-box protein family [Arabidopsis thaliana]
  misc_feature (26)..(143): Homolog of NCBI NO: 38345348 NR Description: OSJNBa0081L15.21 [Oryza sativa (japonica
  misc_feature (41)..(254): Homolog of NCBI NO: 22655121 NR Description: expressed protein [Arabidopsis thaliana]
  misc_feature (41)..(254): Homolog of NCBI NO: 18404757 NR Description: F-box protein family [Arabidopsis thaliana]
  misc_feature (10)..(261): Homolog of NCBI NO: 18405307 NR Description: expressed protein [Arabidopsis thaliana]
  misc_feature (26)..(165): Homolog of NCBI NO: 38175497 NR Description: F-box protein family-like protein
  misc_feature (74)..(283): Homolog of NCBI NO: 38175497 NR Description: F-box protein family-like protein
  misc_feature (10)..(299): Homolog of NCBI NO: 18379265 NR Description: expressed protein [Arabidopsis thaliana]
MRTEEKEEGEEEEEEQQQWPSSRSAHEVLLIVLPYLHSLFELLSMTGVSRSLRDAIRDETALWTKIVVEPPLRSRLTDDILREITSKSAGKLNTLILRQCLRITDKGLRRVVDANPLIRKIIVPGCTELTPEGIIGCVESLATVETLHINGVHRFTKDHLSALSTYLPHEGAIDVEVCPKCDLVKMIPSCSRASCNRGRRQERKCRGCWFCVPRCTECAVCLGSDTEIQEAACGGDSLCLECWLVLPKCRFCNKPYCSSHSSLRHDIATNDPSSPPMFECQACHYRAGTNPYDAFDYQI

SEQ ID NO: 109772 - protein, 255 aa, Zea mays subsp. mays
  misc_feature (1)..(255): Ceres Seq. ID no. 14308979
  misc_feature (31)..(204): Homolog of NCBI NO: 22655121 NR Description: expressed protein [Arabidopsis thaliana]
  misc_feature (31)..(204): Homolog of NCBI NO: 18404757 NR Description: F-box protein family [Arabidopsis thaliana]
  misc_feature (1)..(99): Homolog of NCBI NO: 38345348 NR Description: OSJNBa0081L15.21 [Oryza sativa (japonica
  misc_feature (1)..(210): Homolog of NCBI NO: 22655121 NR Description: expressed protein [Arabidopsis thaliana]
  misc_feature (1)..(210): Homolog of NCBI NO: 18404757 NR Description: F-box protein family [Arabidopsis thaliana]
  misc_feature (1)..(217): Homolog of NCBI NO: 18405307 NR Description: expressed protein [Arabidopsis thaliana]
  misc_feature (1)..(121): Homolog of NCBI NO: 38175497 NR Description: F-box protein family-like protein
  misc_feature (30)..(239): Homolog of NCBI NO: 38175497 NR Description: F-box protein family-like protein
  misc_feature (1)..(255): Homolog of NCBI NO: 18379265 NR Description: expressed protein [Arabidopsis thaliana]
  misc_feature (1)..(255): Homolog of NCBI NO: 21536590 NR Description: unknown [Arabidopsis thaliana]
MTGVSRSLRDAIRDETALWTKIVVEPPLRSRLTDDILREITSKSAGKLNTLILRQCLRITDKGLRRVVDANPLIRKIIVPGCTELTPEGIIGCVESLATVETLHINGVHRFTKDHLSALSTYLPHEGAIDVEVCPKCDLVKMIPSCSRASCNRGRRQERKCRGCWFCVPRCTECAVCLGSDTEIQEAACGGDSLCLECWLVLPKCRFCNKPYCSSHSSLRHDIATNDPSSPPMFECQACHYRAGTNPYDAFDYQI

SEQ ID NO: 109773 - DNA, 821 bp, Zea mays subsp. mays
  misc_feature (1)..(821): Ceres Seq. ID no. 15179163
atctctgctcgggaactgaataagcttcgccaatggcttcttcgtctttgtcactctcgtggagctcctcgctttgttcgtctcacaccttcaatgtcgtcggaaatgaaaccctaaaagtatcccagcgaaggtctactttggaggttgttgcccagaagaaagccaagaaactccgcaaggtaatcttgaaagaggatgtgttggacttgggcaagcaagggcaattactggacgttaaagccggtttcttcagaaacttcctcttgcccactggaaaggctcagctcatgactccgcttctgctcaaggaaatgaagatggcaaacgaaaggatagaggcagaaaagcaaagggtgaaagaagaggcgctacaattggctacggtattcgaaaccgttggggctttcaaggttaaacgcaagggcggtaaaggcaaacaaatatttggatctgtcacagcacaagaccttgttgacatcatcaaggcgcagctccaaagggatatagacaagcgccttgtctctcttccggagatccgtgaaaccggagaatacatagccgaactcaaacttcaccctgatgtcactgctcgcgttaggctcaacgttttcgccaactaacaacctttccaatagtcaaagactgctactgctgcatccccaaggttgcaggaacatagagaaaggggggaagagattggccaggatcaaagtttgtgaagtttttcttgttaaatcttttgctgcatttgtcttttttgctatttaaaaaaaaatattttggaatcttgaaaatgttataaatattttcttgaagct

SEQ ID NO: 109774 - protein, 196 aa, Zea mays subsp. mays
  misc_feature (1)..(196): Ceres Seq. ID no. 15179164
  misc_feature (110)..(196): Pfam Name: Ribosomal protein L9, C-terminal domain Pfam Description: Ribosomal protein L9, C-terminal domain
  misc_feature (50)..(193): Homolog of NCBI NO: 6226012 NR Description: 50S ribosomal protein L9
  misc_feature (50)..(196): Homolog of NCBI NO: 16125913 NR Description: ribosomal protein L9 [Caulobacter crescentus
  misc_feature (50)..(196): Homolog of NCBI NO: 23014152 NR Description: hypothetical protein [Magnetospirillum
  misc_feature (44)..(193): Homolog of NCBI NO: 32307494 NR Description: ribosomal protein rpL9 [Bigelowiella natans]
  misc_feature (45)..(196): Homolog of NCBI NO: 33241283 NR Description: Ribosomal protein L9
  misc_feature (45)..(193): Homolog of NCBI NO: 33862229 NR Description: 50S ribosomal protein L9
  misc_feature (31)..(194): Homolog of NCBI NO: 22204126 NR Description: putative plastid ribosomal protein CL9 [Triticum
  misc_feature (1)..(196): Homolog of NCBI NO: 71256 NR Description: ribosomal protein L9 precursor, chloroplast -
  misc_feature (1)..(196): Homolog of NCBI NO: 1173069 NR Description: 50S RIBOSOMAL PROTEIN L9, CHLOROPLAST PRECURSOR
  misc_feature (1)..(196): Homolog of NCBI NO: 15230544 NR Description: 50S ribosomal protein L9, chloroplast precursor
MASSSLSLSWSSSLCSSHTFNVVGNETLKVSQRRSTLEVVAQKKAKKLRKVILKEDVLDLGKQGQLLDVKAGFFRNFLLPTGKAQLMTPLLLKEMKMANERIEAEKQRVKEEALQLATVFETVGAFKVKRKGGKGKQIFGSVTAQDLVDIIKAQLQRDIDKRLVSLPEIRETGEYIAELKLHPDVTARVRLNVFAN

SEQ ID NO: 109775 - protein, 110 aa, Zea mays subsp. mays
  misc_feature (1)..(110): Ceres Seq. ID no. 15179165
  misc_feature (24)..(110): Pfam Name: Ribosomal protein L9, C-terminal domain Pfam Description: Ribosomal protein L9, C-terminal domain
  misc_feature (1)..(107): Homolog of NCBI NO: 6226012 NR Description: 50S ribosomal protein L9
  misc_feature (1)..(110): Homolog of NCBI NO: 16125913 NR Description: ribosomal protein L9 [Caulobacter crescentus
  misc_feature (1)..(110): Homolog of NCBI NO: 23014152 NR Description: hypothetical protein [Magnetospirillum
  misc_feature (1)..(107): Homolog of NCBI NO: 32307494 NR Description: ribosomal protein rpL9 [Bigelowiella natans]
  misc_feature (1)..(110): Homolog of NCBI NO: 33241283 NR Description: Ribosomal protein L9
  misc_feature (1)..(107): Homolog of NCBI NO: 33862229 NR Description: 50S ribosomal protein L9
  misc_feature (1)..(108): Homolog of NCBI NO: 22204126 NR Description: putative plastid ribosomal protein CL9 [Triticum
  misc_feature (1)..(110): Homolog of NCBI NO: 71256 NR Description: ribosomal protein L9 precursor, chloroplast -
  misc_feature (1)..(110): Homolog of NCBI NO: 1173069 NR Description: 50S RIBOSOMAL PROTEIN L9, CHLOROPLAST PRECURSOR
  misc_feature (1)..(110): Homolog of NCBI NO: 15230544 NR Description: 50S ribosomal protein L9, chloroplast precursor
MTPLLLKEMKMANERIEAEKQRVKEEALQLATVFETVGAFKVKRKGGKGKQIFGSVTAQDLVDIIKAQLQRDIDKRLVSLPEIRETGEYIAELKLHPDVTARVRLNVFAN

SEQ ID NO: 109776 - protein, 102 aa, Zea mays subsp. mays
  misc_feature (1)..(102): Ceres Seq. ID no. 15179166
  misc_feature (16)..(102): Pfam Name: Ribosomal protein L9, C-terminal domain Pfam Description: Ribosomal protein L9, C-terminal domain
  misc_feature (1)..(99): Homolog of NCBI NO: 6226012 NR Description: 50S ribosomal protein L9
  misc_feature (1)..(102): Homolog of NCBI NO: 16125913 NR Description: ribosomal protein L9 [Caulobacter crescentus
  misc_feature (1)..(102): Homolog of NCBI NO: 23014152 NR Description: hypothetical protein [Magnetospirillum
  misc_feature (1)..(99): Homolog of NCBI NO: 32307494 NR Description: ribosomal protein rpL9 [Bigelowiella natans]
  misc_feature (1)..(102): Homolog of NCBI NO: 33241283 NR Description: Ribosomal protein L9
  misc_feature (1)..(99): Homolog of NCBI NO: 33862229 NR Description: 50S ribosomal protein L9
  misc_feature (1)..(100): Homolog of NCBI NO: 22204126 NR Description: putative plastid ribosomal protein CL9 [Triticum
  misc_feature (1)..(102): Homolog of NCBI NO: 71256 NR Description: ribosomal protein L9 precursor, chloroplast -
  misc_feature (1)..(102): Homolog of NCBI NO: 1173069 NR Description: 50S RIBOSOMAL PROTEIN L9, CHLOROPLAST PRECURSOR
  misc_feature (1)..(102): Homolog of NCBI NO: 15230544 NR Description: 50S ribosomal protein L9, chloroplast precursor
MKMANERIEAEKQRVKEEALQLATVFETVGAFKVKRKGGKGKQIFGSVTAQDLVDIIKAQLQRDIDKRLVSLPEIRETGEYIAELKLHPDVTARVRLNVFAN

SEQ ID NO: 109777 - DNA, 675 bp, Zea mays subsp. mays
  misc_feature (1)..(675): Ceres Seq. ID no. 15179051
atcaatacaagtgtgtactttaagtgttctctctctacgtacattttgtgaccaaacaagtaatcagtcaaaagatggaaggcaaaactgtgattttaggtgtgatcataatgagtcttgtcatggcgcagaatcaagtcgaagcaaagatttgttgccccagaaccattgacagaaacatatataatgcatgccgtcttactggagcctctatgacaaattgtgcaaacctcagtggatgcaaaatcgtttctgggacgacatgtcctccgggatatacacatgacattctccaaaactgtggtgatgctgtcaatgaatactgcaagttggggtgtgcatcctctgtgtgcggtgccttaaccactctcaagaactccgatgcaagtgaaattgtgaaaggagcggtttcacaatgcaccaacgcatgttctaatttctgcaccaagggctcagctaaagcagttgaaactgcctaacaagcatatccgctatctatgtattaattgtatgtgttgttgttttacatgttttcaataattgtcgtgtatgtgacaaattgctagactcttttgctatttccaagttatctatgtgacgtagaaggtcatcgatccctagattgtttatcccttgtacttgctataactaaataaagaagaaggtttcctgctc

SEQ ID NO: 109778 - protein, 134 aa, Zea mays subsp. mays
  misc_feature (1)..(134): Ceres Seq. ID no. 15179052
  misc_feature (25)..(70): Pfam Name: Plant thionin Pfam Description: Plant thionin
  misc_feature (1)..(134): Homolog of NCBI NO: 1181533 NR Description: thionin
  misc_feature (1)..(134): Homolog of NCBI NO: 1076462 NR Description: thionin variant Thi2Ca1 - Abyssinian crambe
  misc_feature (1)..(134): Homolog of NCBI NO: 1076467 NR Description: thionin variant Thi2Ca3 - Abyssinian crambe
  misc_feature (1)..(134): Homolog of NCBI NO: 1076472 NR Description: thionin variant Thi2Ca9 - Abyssinian crambe
  misc_feature (6)..(134): Homolog of NCBI NO: 802169 NR Description: crambin precursor=thionin variant Thi2Ca11
  misc_feature (1)..(134): Homolog of NCBI NO: 1076464 NR Description: thionin variant Thi2Ca11 - Abyssinian crambe
  misc_feature (1)..(134): Homolog of NCBI NO: 1076463 NR Description: thionin variant Thi2Ca10 - Abyssinian crambe
  misc_feature (1)..(134): Homolog of NCBI NO: 1076465 NR Description: thionin variant Thi2Ca12 - Abyssinian crambe
  misc_feature (1)..(134): Homolog of NCBI NO: 1076466 NR Description: thionin variant Thi2Ca2 - Abyssinian crambe
  misc_feature (1)..(134): Homolog of NCBI NO: 6650328 NR Description: thionin [Brassica rapa subsp. pekinensis]
MEGKTVILGVIIMSLVMAQNQVEAKICCPRTIDRNIYNACRLTGASMTNCANLSGCKIVSGTTCPPGYTHDILQNCGDAVNEYCKLGCASSVCGALTTLKNSDASEIVKGAVSQCTNACSNFCTKGSAKAVETA

SEQ ID NO: 109779 - protein, 122 aa, Zea mays subsp. mays
  misc_feature (1)..(122): Ceres Seq. ID no. 15179053
  misc_feature (13)..(58): Pfam Name: Plant thionin Pfam Description: Plant thionin
  misc_feature (1)..(122): Homolog of NCBI NO: 1181533 NR Description: thionin
  misc_feature (1)..(122): Homolog of NCBI NO: 1076462 NR Description: thionin variant Thi2Ca1 - Abyssinian crambe
  misc_feature (1)..(122): Homolog of NCBI NO: 1076467 NR Description: thionin variant Thi2Ca3 - Abyssinian crambe
  misc_feature (1)..(122): Homolog of NCBI NO: 1076472 NR Description: thionin variant Thi2Ca9 - Abyssinian crambe
  misc_feature (1)..(122): Homolog of NCBI NO: 802169 NR Description: crambin precursor=thionin variant Thi2Ca11
  misc_feature (1)..(122): Homolog of NCBI NO: 1076464 NR Description: thionin variant Thi2Ca11 - Abyssinian crambe
  misc_feature (1)..(122): Homolog of NCBI NO: 1076463 NR Description: thionin variant Thi2Ca10 - Abyssinian crambe
  misc_feature (1)..(122): Homolog of NCBI NO: 1076465 NR Description: thionin variant Thi2Ca12 - Abyssinian crambe
  misc_feature (1)..(122): Homolog of NCBI NO: 1076466 NR Description: thionin variant Thi2Ca2 - Abyssinian crambe
  misc_feature (1)..(122): Homolog of NCBI NO: 6650328 NR Description: thionin [Brassica rapa subsp. pekinensis]
MSLVMAQNQVEAKICCPRTIDRNIYNACRLTGASMTNCANLSGCKIVSGTTCPPGYTHDILQNCGDAVNEYCKLGCASSVCGALTTLKNSDASEIVKGAVSQCTNACSNFCTKGSAKAVETA

SEQ ID NO: 109780 - protein, 118 aa, Zea mays subsp. mays
  misc_feature (1)..(118): Ceres Seq. ID no. 15179054
  misc_feature (9)..(54): Pfam Name: Plant thionin Pfam Description: Plant thionin
  misc_feature (1)..(118): Homolog of NCBI NO: 1181533 NR Description: thionin
  misc_feature (1)..(118): Homolog of NCBI NO: 1076462 NR Description: thionin variant Thi2Ca1 - Abyssinian crambe
  misc_feature (1)..(118): Homolog of NCBI NO: 1076467 NR Description: thionin variant Thi2Ca3 - Abyssinian crambe
  misc_feature (1)..(118): Homolog of NCBI NO: 1076472 NR Description: thionin variant Thi2Ca9 - Abyssinian crambe
  misc_feature (1)..(118): Homolog of NCBI NO: 802169 NR Description: crambin precursor=thionin variant Thi2Ca11
  misc_feature (1)..(118): Homolog of NCBI NO: 1076464 NR Description: thionin variant Thi2Ca11 - Abyssinian crambe
  misc_feature (1)..(118): Homolog of NCBI NO: 1076463 NR Description: thionin variant Thi2Ca10 - Abyssinian crambe
  misc_feature (1)..(118): Homolog of NCBI NO: 1076465 NR Description: thionin variant Thi2Ca12 - Abyssinian crambe
  misc_feature (1)..(118): Homolog of NCBI NO: 1076466 NR Description: thionin variant Thi2Ca2 - Abyssinian crambe
  misc_feature (1)..(118): Homolog of NCBI NO: 6650328 NR Description: thionin [Brassica rapa subsp. pekinensis]
MAQNQVEAKICCPRTIDRNIYNACRLTGASMTNCANLSGCKIVSGTTCPPGYTHDILQNCGDAVNEYCKLGCASSVCGALTTLKNSDASEIVKGAVSQCTNACSNFCTKGSAKAVETA

SEQ ID NO: 109781 - DNA, 949 bp, Zea mays subsp. mays
  misc_feature (1)..(949): Ceres Seq. ID no. 15179001
acttttttggccttatccaaaatctcttttgtgggtagaatcatctctgtcttaagccaatctctctctcattgtctctgtgtcgagagagagagaaatggcagcttcaacactaacacttccctgcttcaaactctacgatcaaccaagcctccttcttccccgcaacaaatcatctaaccaaacactccttaaattcaacttgtcgcctccaaaacctctcttgatctcctcacgtgccaacagttctccgcgattcagagccctcccggagaccatctccgtcaaacaggacgacacaactgctgatgacgacagtcctcctgcgaccatcaacactaagctctactttgggaaccttccttacaatgtcgacagtgcaactctcgctcagatcatccaagacttcgccaaccctgagctcgtcgaggttctctacaacagagacacaggacagagccgcgggttcgcctttgtgacgatgagcaacgtcgaagactgcaacgtcatcatcgagaacctcgatggaactgagtatcttggtaggacgttgaaggtgaactttgcagacaaaccgaagcctaacaaagaacctctgtatccagaaacagagtataagctgtttgttggtaacttgtcgtggaccgtcacttcggagtcgttagctggcgcgtttagagagtgtggagaagtggttggtgctagagttgtgtttgacggagacactgggaagtcaagaggttatggctttgtgtgttactcttccaaagctgaaatggaaaccgctcttgagtcgctggatgggcttgagctagagggtcgggcgattcgagtaaacttggctcaggggaagaagtactgatgtcatacaataacattttgagatttcatcgttagagattatgtttcaattaaactaaaataactctaaagatcgttgcatcttgcc

SEQ ID NO: 109782 - protein, 254 aa, Zea mays subsp. mays
  misc_feature (1)..(254): Ceres Seq. ID no. 15179002
  misc_feature (83)..(154): Pfam Name: RNA recognition motif. (a.k.a. RRM, RBD, or RNP domain) Pfam Description: RNA recognition motif. (a.k.a. RRM, RBD, or RNP
  misc_feature (66)..(253): Homolog of NCBI NO: 7446361 NR Description: RNA-binding protein - fava bean (fragment)
  misc_feature (66)..(253): Homolog of NCBI NO: 1076509 NR Description: RNA-binding protein RNP1 precursor - kidney bean
  misc_feature (42)..(165): Homolog of NCBI NO: 30693824 NR Description: 29 kDa ribonucleoprotein, chloroplast
  misc_feature (174)..(252): Homolog of NCBI NO: 21617920 NR Description: putative RNA-binding protein [Arabidopsis
  misc_feature (2)..(165): Homolog of NCBI NO: 21617920 NR Description: putative RNA-binding protein [Arabidopsis
  misc_feature (2)..(165): Homolog of NCBI NO: 15228102 NR Description: 29 kDa ribonucleoprotein, chloroplast
  misc_feature (174)..(252): Homolog of NCBI NO: 15228102 NR Description: 29 kDa ribonucleoprotein, chloroplast
  misc_feature (42)..(165): Homolog of NCBI NO: 681904 NR Description: cp29 [Arabidopsis thaliana]
  misc_feature (174)..(252): Homolog of NCBI NO: 681904 NR Description: cp29 [Arabidopsis thaliana]
  misc_feature (1)..(254): Homolog of NCBI NO: 15218972 NR Description: 29 kDa ribonucleoprotein, chloroplast
MAASTLTLPCFKLYDQPSLLLPRNKSSNQTLLKFNLSPPKPLLISSRANSSPRFRALPETISVKQDDTTADDDSPPATINTKLYFGNLPYNVDSATLAQIIQDFANPELVEVLYNRDTGQSRGFAFVTMSNVEDCNVIIENLDGTEYLGRTLKVNFADKPKPNKEPLYPETEYKLFVGNLSWTVTSESLAGAFRECGEVVGARVVFDGDTGKSRGYGFVCYSSKAEMETALESLDGLELEGRAIRVNLAQGKKY

SEQ ID NO: 109783 - DNA, 823 bp, Zea mays subsp. mays
  misc_feature (1)..(823): Ceres Seq. ID no. 15174034
attttcgtctctgtaaacatctcttgctccatctcttctctgtgtctctctctgcgatgggttttccgacgggtataaaggagcttgagattccggattacatatttaagatactttacgtcatcggtttcttcagagacctggtcaacgctctctgtccttacatcggtttaccccattttttagacgatggcatttctcgacccggcccgatcgtacccgacaacacggccgcgactctcgcttacgaggtttccccggttgttcgtttctcggatcttcagaccgatctcgaagactgctgtacggtttgtctcttggactttgcatacgatgataaagttagacagcttccgaactgccgacacgtgttccacaatcgttgcatggaccgttggatcgtcgactgccgcaagatcacatgtccgatttgtcgggaccggttcttaccggccgaatattacgcgcggataaattccggttttggttcggtttggtacattgaagaatcggaaagtaatattctactataagaccctttgcatctgttctttagatattggtatcggatcagtattctgtgtttttcttttcggtaattctgtgttaagttttagttttgtagcaaaaagtgaaaagacatcattattaaagcccaatgcaacaaatccacaatcccatatgttttagggtttcattacaagtagctagcttgagtataaatagagtcttatgagaacttgtcttgtaacgaagagagttgcctctcaaacagctctttcacctttacattttatgatataaatcaaagtctatttgttct

SEQ ID NO: 109784 - protein, 176 aa, Zea mays subsp. mays
  misc_feature (1)..(176): Ceres Seq. ID no. 15174035
  misc_feature (101)..(144): Pfam Name: Zinc finger, C3HC4 type (RING finger) Pfam Description: Zinc finger, C3HC4 type (RING finger)
  misc_feature (83)..(157): Homolog of NCBI NO: 18411282 NR Description: zinc finger (C3HC4-type RING finger) protein
  misc_feature (78)..(152): Homolog of NCBI NO: 32488512 NR Description: OSJNBa0011J08.19 [Oryza sativa (japonica
  misc_feature (3)..(173): Homolog of NCBI NO: 21554155 NR Description: RING zinc finger protein-like [Arabidopsis
  misc_feature (3)..(173): Homolog of NCBI NO: 15238072 NR Description: RING-H2 zinc finger protein, putative
  misc_feature (19)..(158): Homolog of NCBI NO: 15233117 NR Description: BRH1 RING finger protein [Arabidopsis thaliana]
  misc_feature (19)..(176): Homolog of NCBI NO: 15222553 NR Description: RING-H2 finger protein, putative [Arabidopsis
  misc_feature (19)..(172): Homolog of NCBI NO: 15233352 NR Description: RING-H2 finger protein, putative [Arabidopsis
  misc_feature (19)..(172): Homolog of NCBI NO: 11358776 NR Description: RING-H2 finger protein RHA1a [imported] -
  misc_feature (19)..(172): Homolog of NCBI NO: 15233350 NR Description: RING-H2 finger protein RHA1b [Arabidopsis
  misc_feature (19)..(172): Homolog of NCBI NO: 11358777 NR Description: RING-H2 finger protein RHA1b [imported] -
FRLCKHLLLHLFSVSLSAMGFPTGIKELEIPDYIFKILYVIGFFRDLVNALCPYIGLPHFLDDGISRPGPIVPDNTAATLAYEVSPVVRFSDLQTDLEDCCTVCLLDFAYDDKVRQLPNCRHVFHNRCMDRWIVDCRKITCPICRDRFLPAEYYARINSGFGSVWYIEESESNILL

SEQ ID NO: 109785 - protein, 158 aa, Zea mays subsp. mays
  misc_feature (1)..(158): Ceres Seq. ID no. 15174036
  misc_feature (83)..(126): Pfam Name: Zinc finger, C3HC4 type (RING finger) Pfam Description: Zinc finger, C3HC4 type (RING finger)
  misc_feature (65)..(139): Homolog of NCBI NO: 18411282 NR Description: zinc finger (C3HC4-type RING finger) protein
  misc_feature (60)..(134): Homolog of NCBI NO: 32488512 NR Description: OSJNBa0011J08.19 [Oryza sativa (japonica
  misc_feature (1)..(155): Homolog of NCBI NO: 21554155 NR Description: RING zinc finger protein-like [Arabidopsis
  misc_feature (1)..(155): Homolog of NCBI NO: 15238072 NR Description: RING-H2 zinc finger protein, putative
  misc_feature (1)..(140): Homolog of NCBI NO: 15233117 NR Description: BRH1 RING finger protein [Arabidopsis thaliana]
  misc_feature (1)..(158): Homolog of NCBI NO: 15222553 NR Description: RING-H2 finger protein, putative [Arabidopsis
  misc_feature (1)..(154): Homolog of NCBI NO: 15233352 NR Description: RING-H2 finger protein, putative [Arabidopsis
  misc_feature (1)..(154): Homolog of NCBI NO: 11358776 NR Description: RING-H2 finger protein RHA1a [imported] -
  misc_feature (1)..(154): Homolog of NCBI NO: 15233350 NR Description: RING-H2 finger protein RHA1b [Arabidopsis
  misc_feature (1)..(154): Homolog of NCBI NO: 11358777 NR Description: RING-H2 finger protein RHA1b [imported] -
MGFPTGIKELEIPDYIFKILYVIGFFRDLVNALCPYIGLPHFLDDGISRPGPIVPDNTAATLAYEVSPVVRFSDLQTDLEDCCTVCLLDFAYDDKVRQLPNCRHVFHNRCMDRWIVDCRKITCPICRDRFLPAEYYARINSGFGSVWYIEESESNILL

SEQ ID NO: 109786 - protein, 94 aa, Zea mays subsp. mays
  misc_feature (1)..(94): Ceres Seq. ID no. 15174037
MAFLDPARSYPTTRPRLSLTRFPRLFVSRIFRPISKTAVRFVSWTLHTMIKLDSFRTADTCSTIVAWTVGSSTAARSHVRFVGTGSYRPNITRG

SEQ ID NO: 109787 - DNA, 680 bp, Zea mays subsp. mays
  misc_feature (1)..(680): Ceres Seq. ID no. 15179982
aacaagtctctttctctctctctaacctttacttttctccgtctgttagaaaaaaaaatgtctgaagttgagtaccggtgtttcgtcggcggcctagcatgggccaccggggatgctgagctagagaggacgttctcacagttcggcgaagttatcgattcaaagatcattaacgatcgtgagactgggagatcgaggggattcggattcgtgaccttcaaggatgagaagtccatgaaggatgccatcgatgagatgaacgggaaggagctcgacggtcgtaccatcaccgtcaacgaggctcagtccagaggaggcggcggtggaggaggccgtggtggaggtggatacggtggccgtggaggtggtggatacggtggaggcggcggtggatacggtgacagacgtggaggcggcggttacggatctggaggtggaggatacggtggtggtggtggcagacgtgatggaggtggttacggaggtggtgacggtggctacggaggaggaagtggaggcggtggatggtaatcgaagatgaagtgctgctctgttttcggtttagacttgcttccgtatgaatgtttctccggtttggtttggttctggatttcttgtttacttttttgttgtaacggatcgttaaagtcttgcttgcctgaaacgaaatgttaaatcgc

SEQ ID NO: 109788 - protein, 176 aa, Zea mays subsp. mays
  misc_feature (1)..(176): Ceres Seq. ID no. 15179983
  misc_feature (27)..(98): Pfam Name: RNA recognition motif. (a.k.a. RRM, RBD, or RNP domain) Pfam Description: RNA recognition motif. (a.k.a. RRM, RBD, or RNP
  misc_feature (20)..(176): Homolog of NCBI NO: 7439981 NR Description: glycine-rich RNA-binding protein GRP1 - wheat
  misc_feature (22)..(175): Homolog of NCBI NO: 15226605 NR Description: glycine-rich RNA-binding protein (AtGRP7)
  misc_feature (21)..(176): Homolog of NCBI NO: 10799202 NR Description: glycine-rich RNA-binding protein [Sorghum bicolor]
  misc_feature (22)..(176): Homolog of NCBI NO: 21553354 NR Description: glycine-rich RNA binding protein 7 [Arabidopsis
  misc_feature (20)..(176): Homolog of NCBI NO: 544426 NR Description: Glycine-rich RNA-binding protein
  misc_feature (22)..(176): Homolog of NCBI NO: 1346180 NR Description: Glycine-rich RNA-binding protein GRP1A
  misc_feature (21)..(176): Homolog of NCBI NO: 544423 NR Description: Glycine-rich RNA-binding protein 2
  misc_feature (22)..(176): Homolog of NCBI NO: 1346181 NR Description: Glycine-rich RNA-binding protein GRP2A
  misc_feature (20)..(176): Homolog of NCBI NO: 15235002 NR Description: glycine-rich RNA-binding protein 8 (GRP8) (CCR1)
  misc_feature (20)..(176): Homolog of NCBI NO: 544416 NR Description: Glycine-rich RNA-binding protein 10
NKSLSLSLTFTFLRLLEKKMSEVEYRCFVGGLAWATGDAELERTFSQFGEVIDSKIINDRETGRSRGFGFVTFKDEKSMKDAIDEMNGKELDGRTITVNEAQSRGGGGGGGRGGGGYGGRGGGGYGGGGGGYGDRRGGGGYGSGGGGYGGGGGRRDGGGYGGGDGGYGGGSGGGGW

SEQ ID NO: 109789 - protein, 157 aa, Zea mays subsp. mays
  misc_feature (1)..(157): Ceres Seq. ID no. 15179984
  misc_feature (8)..(79): Pfam Name: RNA recognition motif. (a.k.a. RRM, RBD, or RNP domain) Pfam Description: RNA recognition motif. (a.k.a. RRM, RBD, or RNP
  misc_feature (1)..(157): Homolog of NCBI NO: 7439981 NR Description: glycine-rich RNA-binding protein GRP1 - wheat
  misc_feature (3)..(156): Homolog of NCBI NO: 15226605 NR Description: glycine-rich RNA-binding protein (AtGRP7)
  misc_feature (2)..(157): Homolog of NCBI NO: 10799202 NR Description: glycine-rich RNA-binding protein [Sorghum bicolor]
  misc_feature (3)..(157): Homolog of NCBI NO: 21553354 NR Description: glycine-rich RNA binding protein 7 [Arabidopsis
  misc_feature (1)..(157): Homolog of NCBI NO: 544426 NR Description: Glycine-rich RNA-binding protein
  misc_feature (3)..(157): Homolog of NCBI NO: 1346180 NR Description: Glycine-rich RNA-binding protein GRP1A
  misc_feature (2)..(157): Homolog of NCBI NO: 544423 NR Description: Glycine-rich RNA-binding protein 2
  misc_feature (3)..(157): Homolog of NCBI NO: 1346181 NR Description: Glycine-rich RNA-binding protein GRP2A
  misc_feature (1)..(157): Homolog of NCBI NO: 15235002 NR Description: glycine-rich RNA-binding protein 8 (GRP8) (CCR1)
  misc_feature (1)..(157): Homolog of NCBI NO: 544416 NR Description: Glycine-rich RNA-binding protein 10
MSEVEYRCFVGGLAWATGDAELERTFSQFGEVIDSKIINDRETGRSRGFGFVTFKDEKSMKDAIDEMNGKELDGRTITVNEAQSRGGGGGGGRGGGGYGGRGGGGYGGGGGGYGDRRGGGGYGSGGGGYGGGGGRRDGGGYGGGDGGYGGGSGGGGW

SEQ ID NO: 109790 - protein, 98 aa, Zea mays subsp. mays
  misc_feature (1)..(98): Ceres Seq. ID no. 15179985
  misc_feature (23)..(97): Pfam Name: Herpesvirus latent membrane protein 1 (LMP1) Pfam Description: Herpesvirus latent membrane protein 1 (LMP1)
  misc_feature (1)..(98): Homolog of NCBI NO: 7439981 NR Description: glycine-rich RNA-binding protein GRP1 - wheat
  misc_feature (1)..(97): Homolog of NCBI NO: 15226605 NR Description: glycine-rich RNA-binding protein (AtGRP7)
  misc_feature (1)..(98): Homolog of NCBI NO: 10799202 NR Description: glycine-rich RNA-binding protein [Sorghum bicolor]
  misc_feature (1)..(98): Homolog of NCBI NO: 21553354 NR Description: glycine-rich RNA binding protein 7 [Arabidopsis
  misc_feature (1)..(98): Homolog of NCBI NO: 544426 NR Description: Glycine-rich RNA-binding protein
  misc_feature (1)..(98): Homolog of NCBI NO: 1346180 NR Description: Glycine-rich RNA-binding protein GRP1A
  misc_feature (1)..(98): Homolog of NCBI NO: 544423 NR Description: Glycine-rich RNA-binding protein 2
  misc_feature (1)..(98): Homolog of NCBI NO: 1346181 NR Description: Glycine-rich RNA-binding protein GRP2A
  misc_feature (1)..(98): Homolog of NCBI NO: 15235002 NR Description: glycine-rich RNA-binding protein 8 (GRP8) (CCR1)
  misc_feature (1)..(98): Homolog of NCBI NO: 544416 NR Description: Glycine-rich RNA-binding protein 10
MKDAIDEMNGKELDGRTITVNEAQSRGGGGGGGRGGGGYGGRGGGGYGGGGGGYGDRRGGGGYGSGGGGYGGGGGRRDGGGYGGGDGGYGGGSGGGGW

SEQ ID NO: 109791 - DNA, 940 bp, Zea mays subsp. mays
  misc_feature (1)..(940): Ceres Seq. ID no. 15179365
aaaactcttctgtggaagagaagaatcgaatctgtattgatcatctagcccttttcaaagtcgctgactttatcgataaatttactcttgaaaatgagaaccccaagaaccctggaggtatggaagctaggcactgtcaactatttgaagtcccttaaacttcaagacaagttggtttctgagagaaaagctaatcgaatccccgatacactcctctcccttcagcatccaccaacttacacgttgggtaaacgtagaaccgatcacaacctactcatccctgaagctgaactcaagagcattggcgctgagcttcattatactcaaagaggaggagatatcactttccatggccctcaccaacccatcttataccctatcctttccttacgcagcataggttttggtgctaggagctatgtagaggcattggagcggtcgatgatcgaattttcttcgctttacggcgtgaaagctcgtgcgggaaacaaatgtgagactggggtttgggtcggggatagaaagattggtgctattggggttcgtatatcctctggaatcacttgccatggtctggccttcaacatagatcctgatatgaagtactttgagcacattgttccgtgtgggattgctgataaagaagttacatctctgagaagggagacagatgctcagcttccttccgaagaagtgattcatgagcagttggttacatgtttggccaaagtgttttcgtatgatgacgttgtggtgaaggaagatccttcagccattttaaacaccctggaggatgacgactaatagcgcattcatcaagttatctttcaatgtatttgatttgagatttgtaacactttatgtcatttgatcatctataagcattcatcaactaacagtatcttagtccgaagcagcgaggcttaccaaatgggacacc

SEQ ID NO: 109792 - protein, 236 aa, Zea mays subsp. mays
  misc_feature (1)..(236): Ceres Seq. ID no. 15179366
  misc_feature (4)..(189): Homolog of NCBI NO: 25405224 NR Description: F16N3.14 [imported] - Arabidopsis thaliana
  misc_feature (12)..(200): Homolog of NCBI NO: 39586445 NR Description: Hypothetical protein CBG21764 [Caenorhabditis
  misc_feature (1)..(192): Homolog of NCBI NO: 32565879 NR Description: LiPoate Ligase (27.4 kD) (lpl-1) [Caenorhabditis
  misc_feature (6)..(219): Homolog of NCBI NO: 6685619 NR Description: Lipoate-protein ligase B (Lipoate biosynthesis
  misc_feature (7)..(214): Homolog of NCBI NO: 31203215 NR Description: ENSANGP00000017330 [Anopheles gambiae]
  misc_feature (9)..(214): Homolog of NCBI NO: 21355483 NR Description: CG9804-PA [Drosophila melanogaster]
  misc_feature (8)..(209): Homolog of NCBI NO: 29346499 NR Description: lipoate-protein ligase B [Bacteroides
  misc_feature (3)..(217): Homolog of NCBI NO: 22971103 NR Description: hypothetical protein [Chloroflexus aurantiacus]
  misc_feature (1)..(235): Homolog of NCBI NO: 15219770 NR Description: lipoyltransferase [Arabidopsis thaliana]
  misc_feature (1)..(235): Homolog of NCBI NO: 3122357 NR Description: Probable lipoate-protein ligase (Lipoate
MRTPRTLEVWKLGTVNYLKSLKLQDKLVSERKANRIPDTLLSLQHPPTYTLGKRRTDHNLLIPEAELKSIGAELHYTQRGGDITFHGPHQPILYPILSLRSIGFGARSYVEALERSMIEFSSLYGVKARAGNKCETGVWVGDRKIGAIGVRISSGITCHGLAFNIDPDMKYFEHIVPCGIADKEVTSLRRETDAQLPSEEVIHEQLVTCLAKVFSYDDVVVKEDPSAILNTLEDDD

SEQ ID NO: 109793 - protein, 120 aa, Zea mays subsp. mays
  misc_feature (1)..(120): Ceres Seq. ID no. 15179367
  misc_feature (1)..(93): Homolog of NCBI NO: 29346499 NR Description: lipoate-protein ligase B [Bacteroides
  misc_feature (1)..(101): Homolog of NCBI NO: 22971103 NR Description: hypothetical protein [Chloroflexus aurantiacus]
  misc_feature (1)..(119): Homolog of NCBI NO: 15219770 NR Description: lipoyltransferase [Arabidopsis thaliana]
  misc_feature (1)..(119): Homolog of NCBI NO: 3122357 NR Description: Probable lipoate-protein ligase (Lipoate
  misc_feature (1)..(73): Homolog of NCBI NO: 25405224 NR Description: F16N3.14 [imported] - Arabidopsis thaliana
  misc_feature (1)..(84): Homolog of NCBI NO: 39586445 NR Description: Hypothetical protein CBG21764 [Caenorhabditis
  misc_feature (1)..(76): Homolog of NCBI NO: 32565879 NR Description: LiPoate Ligase (27.4 kD) (lpl-1) [Caenorhabditis
  misc_feature (1)..(103): Homolog of NCBI NO: 6685619 NR Description: Lipoate-protein ligase B (Lipoate biosynthesis
  misc_feature (1)..(98): Homolog of NCBI NO: 31203215 NR Description: ENSANGP00000017330 [Anopheles gambiae]
  misc_feature (1)..(98): Homolog of NCBI NO: 21355483 NR Description: CG9804-PA [Drosophila melanogaster]
MIEFSSLYGVKARAGNKCETGVWVGDRKIGAIGVRISSGITCHGLAFNIDPDMKYFEHIVPCGIADKEVTSLRRETDAQLPSEEVIHEQLVTCLAKVFSYDDVVVKEDPSAILNTLEDDD

SEQ ID NO: 109794 - DNA, 1080 bp, Zea mays subsp. mays
  misc_feature (1)..(1080): Ceres Seq. ID no. 15179361
attttcttctccgtttctcactgaataatcagaaaacaaagttttagggtttttgcctgcggaggttttgaaggctacaatggcggaagagcacaagcacgaggaatcgatcatggagaagatcgcggagaagatccatggccacgataactcttcttcttcagattcagatgacgagaagaaagcgtcgtctatcaagacgaagatctaccgcctcttcggaagagaaaagcctgtccacaaggtcttcggtggcggaaaacctgccgacatattcctatggaggaacaagaaggtatcaggaggagtgttgggtgctgcaactctctcctggatcttattcgagttactccaatacaacctcctcactctcttcggtcacgtctcgatccttgctctcgctgtgttgttcttgtggtctagtgctactaccttcattcacaagacgcctcctcatattcctgaagtgcacatccccgaggatgttgttctccagcttgcctctgggctcaggattgaaatcaatcgtggttttactcttcttaggaacatcgcattaggaagagatctcaagaagttccttatggttgttgctgggttgtgggttttgtccaaagttggtagctcatgcaacttcttgaccttgatctatatcgcaactgttcttctcttcactgtccccgtgctttacgaaaagtatgaggataaagtagatgactttggtgaaaaggcaatgaaggagatcaagaagcaatacgcggtgctcgatgagaaggttttgagcaaggtgatgagcaaaatccccagaggagccttcaacaagaagaaggattagaagagtgtgtaagtttctctcacagcatcatatcatcatctgagtcttccagattgatagattaatctcgaagcattgtttctttacttgttattggaagccgtcttggtttaataaaccctttagtctctctctgtggattttattcggggttttaaccaaaatttacacaacatatgaatttgaatgaaccctattattgttgattctgttatggaataccatcgtcttctttatgatagtct

SEQ ID NO: 109795 - protein, 251 aa, Zea mays subsp. mays
  misc_feature (1)..(251): Ceres Seq. ID no. 15179362
  misc_feature (64)..(248): Homolog of NCBI NO: 281046 NR Description: tropomyosin-related protein, neuronal - rat
  misc_feature (1)..(248): Homolog of NCBI NO: 1143723 NR Description: chS-Rex-b
  misc_feature (64)..(251): Homolog of NCBI NO: 38303997 NR Description: Reticulon 3 [Rattus norvegicus]
  misc_feature (67)..(207): Homolog of NCBI NO: 38344513 NR Description: OSJNBa0016N04.6 [Oryza sativa (japonica
  misc_feature (1)..(237): Homolog of NCBI NO: 15233147 NR Description: hypothetical protein [Arabidopsis thaliana]
  misc_feature (36)..(250): Homolog of NCBI NO: 34904202 NR Description: P0492F05.25 [Oryza sativa (japonica
  misc_feature (2)..(251): Homolog of NCBI NO: 15237093 NR Description: expressed protein [Arabidopsis thaliana]
  misc_feature (1)..(251): Homolog of NCBI NO: 15236556 NR Description: expressed protein [Arabidopsis thaliana]
  misc_feature (1)..(251): Homolog of NCBI NO: 15238125 NR Description: expressed protein [Arabidopsis thaliana]
  misc_feature (1)..(251): Homolog of NCBI NO: 15222616 NR Description: expressed protein [Arabidopsis thaliana]
MAEEHKHEESIMEKIAEKIHGHDNSSSSDSDDEKKASSIKTKIYRLFGREKPVHKVFGGGKPADIFLWRNKKVSGGVLGAATLSWILFELLQYNLLTLFGHVSILALAVLFLWSSATTFIHKTPPHIPEVHIPEDVVLQLASGLRIEINRGFTLLRNIALGRDLKKFLMVVAGLWVLSKVGSSCNFLTLIYIATVLLFTVPVLYEKYEDKVDDFGEKAMKEIKKQYAVLDEKVLSKVMSKIPRGAFNKKKD

SEQ ID NO: 109796 - protein, 240 aa, Zea mays subsp. mays
  misc_feature (1)..(240): Ceres Seq. ID no. 15179363
  misc_feature (53)..(237): Homolog of NCBI NO: 281046 NR Description: tropomyosin-related protein, neuronal - rat
  misc_feature (1)..(237): Homolog of NCBI NO: 1143723 NR Description: chS-Rex-b
  misc_feature (53)..(240): Homolog of NCBI NO: 38303997 NR Description: Reticulon 3 [Rattus norvegicus]
  misc_feature (56)..(196): Homolog of NCBI NO: 38344513 NR Description: OSJNBa0016N04.6 [Oryza sativa (japonica
  misc_feature (1)..(226): Homolog of NCBI NO: 15233147 NR Description: hypothetical protein [Arabidopsis thaliana]
  misc_feature (25)..(239): Homolog of NCBI NO: 34904202 NR Description: P0492F05.25 [Oryza sativa (japonica
  misc_feature (1)..(240): Homolog of NCBI NO: 15237093 NR Description: expressed protein [Arabidopsis thaliana]
  misc_feature (1)..(240): Homolog of NCBI NO: 15236556 NR Description: expressed protein [Arabidopsis thaliana]
  misc_feature (1)..(240): Homolog of NCBI NO: 15238125 NR Description: expressed protein [Arabidopsis thaliana]
  misc_feature (1)..(240): Homolog of NCBI NO: 15222616 NR Description: expressed protein [Arabidopsis thaliana]
MEKIAEKIHGHDNSSSSDSDDEKKASSIKTKIYRLFGREKPVHKVFGGGKPADIFLWRNKKVSGGVLGAATLSWILFELLQYNLLTLFGHVSILALAVLFLWSSATTFIHKTPPHIPEVHIPEDVVLQLASGLRIEINRGFTLLRNIALGRDLKKFLMVVAGLWVLSKVGSSCNFLTLIYIATVLLFTVPVLYEKYEDKVDDFGEKAMKEIKKQYAVLDEKVLSKVMSKIPRGAFNKKKD

SEQ ID NO: 109797 - protein, 140 aa, Zea mays subsp. mays
  misc_feature (1)..(140): Ceres Seq. ID no. 15179364
MATITLLLQIQMTRRKRRLSRRRSTASSEEKSLSTRSSVAENLPTYSYGGTRRYQEECWVLQLSPGSYSSYSNTTSSLSSVTSRSLLSLCCSCGLVLLPSFTRRLLIFLKCTSPRMLFSSLPLGSGLKSIVVLLFLGTSH

SEQ ID NO: 109798 - DNA, 1192 bp, Zea mays subsp. mays
  misc_feature (1)..(1192): Ceres Seq. ID no. 15179992
actcttttcttcttctcctccgaaaccataaattccttaatcgtcttcttcttttccctatctttcttcttctggatctcccaaacaccaatcctgagagacccatcttctccgccatccccttcctccgtcgctccccctcgcggggatgcggaatcctcctccaatcctccgcctgatgctatgatttcttccagagatcccgacgctcttttcagcggcggcggaatcagctttttagcggggaatcgggctgtgaagttcagttatgggtattcaagtctcaagggtaaacgagcgaccatggaggatttcttcgagactagaatatctgatgttgatggacaaatggttgccttcttcgccgtcttcgatggtcacggtggtgcaagaactgcagaatatcttaaaaacaatattttcaacaacttagttaatcatgatgagtttatctcagacaccaagaaagccattgggcaagtgtttaagcagacggatgaggagtatctcactgaagagagaggacagcctaagaacgctggctcaaccgcatcaactgctttgcttgttggagataagttaattgttgctaatgttggtgattctagagttgtagcgtctagaaatggctcagctgttccactttctaatgatcacaaacctgatagatcagatgagcgacagaggattgaagatgctggtggcttcatcatctgggctggaacatggcgagttggtggaattcttgcggtgtcccgggcgtttggagacaagcaacttaagccatatgtaattgcggagccagagattcaggaggaggatataagcacgttggagtttattgttatcgccagcgatggattgtggaatgtgttgtcaaacaaggatgccgtggcaatagcacgagacatttcagatgcggaagtagcttcacgaaagcttgttcaagaagcatacgcacggggtagctgcgacaatatcacttgcattgttgttcgatttgaggtttcttgagatagaaccaaacgcatacattgttctgctttgaatgcatcgtcttcagctatggccttctctttccatgtattcgttatataaacgaagaaaaaaacaaaacaccatgttttagtagaagactcatgtgataacctactcttctgtttctagtacaattcctcttcttggaaagctc

SEQ ID NO: 109799 - protein, 337 aa, Zea mays subsp. mays
  misc_feature (1)..(337): Ceres Seq. ID no. 15179993
  misc_feature (88)..(327): Pfam Name: Protein phosphatase 2C Pfam Description: Protein phosphatase 2C
  misc_feature (87)..(271): Homolog of NCBI NO: 7486331 NR Description: hypothetical protein F28M20.60 - Arabidopsis
  misc_feature (69)..(334): Homolog of NCBI NO: 15238651 NR Description: protein phosphatase 2C (PP2C), putative
  misc_feature (69)..(337): Homolog of NCBI NO: 18416366 NR Description: protein phosphatase 2C (PP2C) -related
  misc_feature (69)..(334): Homolog of NCBI NO: 30689144 NR Description: protein phosphatase 2C (PP2C), putative
  misc_feature (73)..(334): Homolog of NCBI NO: 20146110 NR Description: protein phosphatase 2C [Mesembryanthemum
  misc_feature (160)..(240): Homolog of NCBI NO: 7523669 NR Description: Unknown protein [Arabidopsis thaliana]
  misc_feature (3)..(159): Homolog of NCBI NO: 7523669 NR Description: Unknown protein [Arabidopsis thaliana]
  misc_feature (3)..(159): Homolog of NCBI NO: 8778653 NR Description: F9C16.6 [Arabidopsis thaliana]
  misc_feature (160)..(337): Homolog of NCBI NO: 8778653 NR Description: F9C16.6 [Arabidopsis thaliana]
  misc_feature (3)..(337): Homolog of NCBI NO: 30693757 NR Description: protein phosphatase 2C (PP2C), putative
TLFFFSSETINSLIVFFFSLSFFFWISQTPILRDPSSPPSPSSVAPPRGDAESSSNPPPDAMISSRDPDALFSGGGISFLAGNRAVKFSYGYSSLKGKRATMEDFFETRISDVDGQMVAFFAVFDGHGGARTAEYLKNNIFNNLVNHDEFISDTKKAIGQVFKQTDEEYLTEERGQPKNAGSTASTALLVGDKLIVANVGDSRVVASRNGSAVPLSNDHKPDRSDERQRIEDAGGFIIWAGTWRVGGILAVSRAFGDKQLKPYVIAEPEIQEEDISTLEFIVIASDGLWNVLSNKDAVAIARDISDAEVASRKLVQEAYARGSCDNITCIVVRFEVS

SEQ ID NO: 109800 - protein, 276 aa, Zea mays subsp. mays
  misc_feature (1)..(276): Ceres Seq. ID no. 15179994
  misc_feature (27)..(266): Pfam Name: Protein phosphatase 2C Pfam Description: Protein phosphatase 2C
  misc_feature (26)..(210): Homolog of NCBI NO: 7486331 NR Description: hypothetical protein F28M20.60 - Arabidopsis
  misc_feature (8)..(273): Homolog of NCBI NO: 15238651 NR Description: protein phosphatase 2C (PP2C), putative
  misc_feature (8)..(276): Homolog of NCBI NO: 18416366 NR Description: protein phosphatase 2C (PP2C) -related
  misc_feature (8)..(273): Homolog of NCBI NO: 30689144 NR Description: protein phosphatase 2C (PP2C), putative
  misc_feature (12)..(273): Homolog of NCBI NO: 20146110 NR Description: protein phosphatase 2C [Mesembryanthemum
  misc_feature (99)..(179): Homolog of NCBI NO: 7523669 NR Description: Unknown protein [Arabidopsis thaliana]
  misc_feature (1)..(98): Homolog of NCBI NO: 7523669 NR Description: Unknown protein [Arabidopsis thaliana]
  misc_feature (1)..(98): Homolog of NCBI NO: 8778653 NR Description: F9C16.6 [Arabidopsis thaliana]
  misc_feature (99)..(276): Homolog of NCBI NO: 8778653 NR Description: F9C16.6 [Arabidopsis thaliana]
  misc_feature (1)..(276): Homolog of NCBI NO: 30693757 NR Description: protein phosphatase 2C (PP2C), putative
MISSRDPDALFSGGGISFLAGNRAVKFSYGYSSLKGKRATMEDFFETRISDVDGQMVAFFAVFDGHGGARTAEYLKNNIFNNLVNHDEFISDTKKAIGQVFKQTDEEYLTEERGQPKNAGSTASTALLVGDKLIVANVGDSRVVASRNGSAVPLSNDHKPDRSDERQRIEDAGGFIIWAGTWRVGGILAVSRAFGDKQLKPYVIAEPEIQEEDISTLEFIVIASDGLWNVLSNKDAVAIARDISDAEVASRKLVQEAYARGSCDNITCIVVRFEVS

SEQ ID NO: 109801 - protein, 236 aa, Zea mays subsp. mays
  misc_feature (1)..(236): Ceres Seq. ID no. 15179995
  misc_feature (1)..(226): Pfam Name: Protein phosphatase 2C Pfam Description: Protein phosphatase 2C
  misc_feature (1)..(170): Homolog of NCBI NO: 7486331 NR Description: hypothetical protein F28M20.60 - Arabidopsis
  misc_feature (1)..(233): Homolog of NCBI NO: 15238651 NR Description: protein phosphatase 2C (PP2C), putative
  misc_feature (1)..(236): Homolog of NCBI NO: 18416366 NR Description: protein phosphatase 2C (PP2C) -related
  misc_feature (1)..(233): Homolog of NCBI NO: 30689144 NR Description: protein phosphatase 2C (PP2C), putative
  misc_feature (1)..(233): Homolog of NCBI NO: 20146110 NR Description: protein phosphatase 2C [Mesembryanthemum
  misc_feature (59)..(139): Homolog of NCBI NO: 7523669 NR Description: Unknown protein [Arabidopsis thaliana]
  misc_feature (1)..(58): Homolog of NCBI NO: 7523669 NR Description: Unknown protein [Arabidopsis thaliana]
  misc_feature (1)..(58): Homolog of NCBI NO: 8778653 NR Description: F9C16.6 [Arabidopsis thaliana]
  misc_feature (59)..(236): Homolog of NCBI NO: 8778653 NR Description: F9C16.6 [Arabidopsis thaliana]
  misc_feature (1)..(236): Homolog of NCBI NO: 30693757 NR Description: protein phosphatase 2C (PP2C), putative
MEDFFETRISDVDGQMVAFFAVFDGHGGARTAEYLKNNIFNNLVNHDEFISDTKKAIGQVFKQTDEEYLTEERGQPKNAGSTASTALLVGDKLIVANVGDSRVVASRNGSAVPLSNDHKPDRSDERQRIEDAGGFIIWAGTWRVGGILAVSRAFGDKQLKPYVIAEPEIQEEDISTLEFIVIASDGLWNVLSNKDAVAIARDISDAEVASRKLVQEAYARGSCDNITCIVVRFEVS

SEQ ID NO: 109802 - DNA, 880 bp, Zea mays subsp. mays
  misc_feature (1)..(880): Ceres Seq. ID no. 15179036
gacacgttctcatttttcagacagcgatggcgatgtctattctgaagctaagaaactcaccggctttgagatccgccgcaagtatcgcccggatcggagtttcatcaagggctttctcaaagctatcagagggcacggacataacctcggcggctccaggcgtttccctccagaaagctcgcagctgggacgaaggcgtttcctccaaattctccaccacaccattgtcagatatcttcaaggggaagaaagtcgtcatctttggacttcctggagcttacacaggagtctgctcacagcagcatgtgccaagctacaagagccacatggataagttcaaagccaaaggcattgactccgtcatctgtgtttctgtcaatgatccgtatactttaaacggttgggcagagaagattggtgccaaagatgctattgagttttatggagattttgatgggaaattccataaaagcttggggctagacaaggatctctctgctgcattgctcggccctcggtctgagagatggtcggcttatgtagaagacggtaaggtgaaggctgtgaacgtggaagaagcaccatctgacttcaaggtgacgggagccgaagtcattttaggacagatctaacaagtgtctcgacaagttgttatggcatttgttgtttcctctgtataagttgcgagagtgaaaataagtctgatccgaacatcaccaaaggatcacaccaagttatgaactctacttttccttggttcttgttttcttttcaataaaaatgtttgttacttgccaattctcagcaaatgtacatcataacatgatagagtactccatttgttttcaaagacaaattttatagatttcttacatatagt

SEQ ID NO: 109803 - protein, 209 aa, Zea mays subsp. mays
  misc_feature (1)..(209): Ceres Seq. ID no. 15179037
  misc_feature (47)..(205): Pfam Name: AhpC/TSA family Pfam Description: AhpC/TSA family
  misc_feature (75)..(209): Homolog of NCBI NO: 22957464 NR Description: hypothetical protein [Rhodobacter sphaeroides]
  misc_feature (74)..(209): Homolog of NCBI NO: 16127624 NR Description: AhpC/TSA family protein [Caulobacter crescentus
  misc_feature (76)..(209): Homolog of NCBI NO: 13476239 NR Description: peroxiredoxin-like protein [Mesorhizobium loti]
  misc_feature (53)..(209): Homolog of NCBI NO: 15888122 NR Description: AGR_C_1423p [Agrobacterium tumefaciens]
  misc_feature (77)..(209): Homolog of NCBI NO: 23501379 NR Description: ahpC/TSA family protein [Brucella suis 1330]
  misc_feature (77)..(209): Homolog of NCBI NO: 17987739 NR Description: THIOL PEROXIDASE [Brucella melitensis]
  misc_feature (9)..(209): Homolog of NCBI NO: 34903114 NR Description: unnamed protein product [Oryza sativa (japonica
  misc_feature (11)..(209): Homolog of NCBI NO: 7658343 NR Description: unknown protein; 13384-11892 [Arabidopsis
  misc_feature (9)..(209): Homolog of NCBI NO: 21553531 NR Description: unknown [Arabidopsis thaliana]
  misc_feature (9)..(209): Homolog of NCBI NO: 18397457 NR Description: expressed protein [Arabidopsis thaliana]
HVLIFQTAMAMSILKLRNSPALRSAASIARIGVSSRAFSKLSEGTDITSAAPGVSLQKARSWDEGVSSKFSTTPLSDIFKGKKVVIFGLPGAYTGVCSQQHVPSYKSHMDKFKAKGIDSVICVSVNDPYTLNGWAEKIGAKDAIEFYGDFDGKFHKSLGLDKDLSAALLGPRSERWSAYVEDGKVKAVNVEEAPSDFKVTGAEVILGQI

SEQ ID NO: 109804 - protein, 201 aa, Zea mays subsp. mays
  misc_feature (1)..(201): Ceres Seq. ID no. 15179038
  misc_feature (39)..(197): Pfam Name: AhpC/TSA family Pfam Description: AhpC/TSA family
  misc_feature (67)..(201): Homolog of NCBI NO: 22957464 NR Description: hypothetical protein [Rhodobacter sphaeroides]
  misc_feature (66)..(201): Homolog of NCBI NO: 16127624 NR Description: AhpC/TSA family protein [Caulobacter crescentus
  misc_feature (68)..(201): Homolog of NCBI NO: 13476239 NR Description: peroxiredoxin-like protein [Mesorhizobium loti]
  misc_feature (45)..(201): Homolog of NCBI NO: 15888122 NR Description: AGR_C_1423p [Agrobacterium tumefaciens]
  misc_feature (69)..(201): Homolog of NCBI NO: 23501379 NR Description: ahpC/TSA family protein [Brucella suis 1330]
  misc_feature (69)..(201): Homolog of NCBI NO: 17987739 NR Description: THIOL PEROXIDASE [Brucella melitensis]
  misc_feature (1)..(201): Homolog of NCBI NO: 34903114 NR Description: unnamed protein product [Oryza sativa (japonica
  misc_feature (3)..(201): Homolog of NCBI NO: 7658343 NR Description: unknown protein; 13384-11892 [Arabidopsis
  misc_feature (1)..(201): Homolog of NCBI NO: 21553531 NR Description: unknown [Arabidopsis thaliana]
  misc_feature (1)..(201): Homolog of NCBI NO: 18397457 NR Description: expressed protein [Arabidopsis thaliana]
MAMSILKLRNSPALRSAASIARIGVSSRAFSKLSEGTDITSAAPGVSLQKARSWDEGVSSKFSTTPLSDIFKGKKVVIFGLPGAYTGVCSQQHVPSYKSHMDKFKAKGIDSVICVSVNDPYTLNGWAEKIGAKDAIEFYGDFDGKFHKSLGLDKDLSAALLGPRSERWSAYVEDGKVKAVNVEEAPSDFKVTGAEVILGQI

SEQ ID NO: 109805 - protein, 199 aa, Zea mays subsp. mays
  misc_feature (1)..(199): Ceres Seq. ID no. 15179039
  misc_feature (37)..(195): Pfam Name: AhpC/TSA family Pfam Description: AhpC/TSA family
  misc_feature (67)..(199): Homolog of NCBI NO: 23501379 NR Description: ahpC/TSA family protein [Brucella suis 1330]
  misc_feature (67)..(199): Homolog of NCBI NO: 17987739 NR Description: THIOL PEROXIDASE [Brucella melitensis]
  misc_feature (1)..(199): Homolog of NCBI NO: 34903114 NR Description: unnamed protein product [Oryza sativa (japonica
  misc_feature (65)..(199): Homolog of NCBI NO: 22957464 NR Description: hypothetical protein [Rhodobacter sphaeroides]
  misc_feature (66)..(199): Homolog of NCBI NO: 13476239 NR Description: peroxiredoxin-like protein [Mesorhizobium loti]
  misc_feature (43)..(199): Homolog of NCBI NO: 15888122 NR Description: AGR_C_1423p [Agrobacterium tumefaciens]
  misc_feature (64)..(199): Homolog of NCBI NO: 16127624 NR Description: AhpC/TSA family protein [Caulobacter crescentus
  misc_feature (1)..(199): Homolog of NCBI NO: 7658343 NR Description: unknown protein; 13384-11892 [Arabidopsis
  misc_feature (1)..(199): Homolog of NCBI NO: 21553531 NR Description: unknown [Arabidopsis thaliana]
  misc_feature (1)..(199): Homolog of NCBI NO: 18397457 NR Description: expressed protein [Arabidopsis thaliana]
MSILKLRNSPALRSAASIARIGVSSRAFSKLSEGTDITSAAPGVSLQKARSWDEGVSSKFSTTPLSDIFKGKKVVIFGLPGAYTGVCSQQHVPSYKSHMDKFKAKGIDSVICVSVNDPYTLNGWAEKIGAKDAIEFYGDFDGKFHKSLGLDKDLSAALLGPRSERWSAYVEDGKVKAVNVEEAPSDFKVTGAEVILGQI

SEQ ID NO: 109806 - DNA, 648 bp, Zea mays subsp. mays
  misc_feature (1)..(648): Ceres Seq. ID no. 15179323
ctcaacttttattaatttgtttcttgctattcataagaatctttttttttttgtaaactattcataagaatcttcacgcaaaagaacactagagtggtgaagaagtagctactttgcctcttcttttttaatttaaggttttcatttcttttgtggaaggaaacaatgttgcaaaggttggtcttccttctcatcgttctcctgattcagtcctctttcctttttgagatttcctctgctctccaggaaggaaaaacatgtatactaaacgacaactgtgacgctggattacactgtgaaacatgtctagccaacaataatttgagacccagatgctctcgaacccagcccatcaaccccatctcaaaggtaaagggattgcctttcaacaagtatgcatggttaacaacacacaactcgtttgcaagattggggcaagtgtcaaaaaccggttctgtaattttggctcctactaatcaacaagattcggtcacaagccaactcgcgaagccggataaccggactgaaataaacgatataataaaagcgatatgttaaggaaataaacgattgtaaagagcgaatacaagaacgataagaaatcgtattcgctaatgaacatggagtcgagatataatctctttcctt

SEQ ID NO: 109807 - protein, 130 aa, Zea mays subsp. mays
  misc_feature (1)..(130): Ceres Seq. ID no. 15179324
  misc_feature (2)..(113): Homolog of NCBI NO: 18425155 NR Description: expressed protein [Arabidopsis thaliana]
  misc_feature (29)..(113): Homolog of NCBI NO: 38345515 NR Description: OSJNBa0039K24.18 [Oryza sativa (japonica
  misc_feature (29)..(113): Homolog of NCBI NO: 5777622 NR Description: CAA303710.1 protein [Oryza sativa]
  misc_feature (1)..(113): Homolog of NCBI NO: 38637049 NR Description: MAP3K-like protein kinase [Oryza sativa (japonica
  misc_feature (22)..(113): Homolog of NCBI NO: 25407778 NR Description: MAP3K-like protein kinase [imported] -
  misc_feature (1)..(113): Homolog of NCBI NO: 38345461 NR Description: OSJNBa0042L16.16 [Oryza sativa (japonica
  misc_feature (1)..(113): Homolog of NCBI NO: 34897530 NR Description: OSJNBa0042L16.2 [Oryza sativa (japonica
  misc_feature (23)..(113): Homolog of NCBI NO: 27754722 NR Description: unknown protein [Arabidopsis thaliana]
  misc_feature (1)..(113): Homolog of NCBI NO: 15230348 NR Description: expressed protein [Arabidopsis thaliana]
  misc_feature (1)..(113): Homolog of NCBI NO: 18402763 NR Description: expressed protein [Arabidopsis thaliana]
MLQRLVFLLIVLLIQSSFLFEISSALQEGKTCILNDNCDAGLHCETCLANNNLRPRCSRTQPINPISKVKGLPFNKYAWLTTHNSFARLGQVSKTGSVILAPTNQQDSVTSQLAKPDNRTEINDIIKAIC

SEQ ID NO: 109808 - DNA, 759 bp, Zea mays subsp. mays
  misc_feature (1)..(759): Ceres Seq. ID no. 15178140
ccctcgtcgctgcgtctctctcccgcaaccttatagattcgtttttattcccatcgatcggagagagagagaataattcaataagcgaccatgttggtgtacactgatcttctcaccggtgatgagcttctctctgactctttcccttacaaggagattgagaatggtattctttgggaagttgaaggaaagtggactacccagggatgtgtagaggttaacattggtgccaacccctctgctgaagaaggtggtgaggacgagggtgttgacgactctgttcaaaaggttgttgacattgtcgacaccttcaggctccaggagcaaccgacctacgacaagaaggggttcatcgcctatatcaaaaagtacatcaagcttttgacccccaagctcaacgccgaagatcaagaagctttcaagaagggtattgagggagctaccaagtacttgctccctaagctcaaggacttccaattctttgttggggagagcatgcacgatgacagcactgtggtctttgcttactacaaggagggtgctactaacccaacatttttgtacttcggacatggtttgaaggaggtcaagtgctgattgagagaagctctcgtgtggtcggtcgcagcgactctattaagtctatgtctctttatattgttatgtgtttcttccccaccattttacttttctttctacttctcatctctgttgcaagattctcaagttattaatccgaaaacaatggtttgttagtcg

SEQ ID NO: 109809 - protein, 168 aa, Zea mays subsp. mays; identical to SEQ ID NO: 59810
  misc_feature (1)..(168): Ceres Seq. ID no. 15178141
  misc_feature (1)..(165): Pfam Name: Translationally controlled tumour protein Pfam Description: Translationally controlled tumour protein
  misc_feature (1)..(168): Homolog of NCBI NO: 1174626 NR Description: TRANSLATIONALLY CONTROLLED TUMOR PROTEIN HOMOLOG
  misc_feature (1)..(168): Homolog of NCBI NO: 9979196 NR Description: Translationally controlled tumor protein homolog
  misc_feature (1)..(168): Homolog of NCBI NO: 20140865 NR Description: Translationally controlled tumor protein homolog
  misc_feature (1)..(168): Homolog of NCBI NO: 2507442 NR Description: TRANSLATIONALLY CONTROLLED TUMOR PROTEIN HOMOLOG
  misc_feature (1)..(168): Homolog of NCBI NO: 2507443 NR Description: Translationally controlled tumor protein homolog
  misc_feature (1)..(168): Homolog of NCBI NO: 549063 NR Description: Translationally controlled tumor protein homolog
  misc_feature (1)..(168): Homolog of NCBI NO: 21595816 NR Description: translationally controlled tumor protein-like
  misc_feature (1)..(168): Homolog of NCBI NO: 15228276 NR Description: translationally controlled tumor protein -related
  misc_feature (1)..(168): Homolog of NCBI NO: 20140684 NR Description: Translationally controlled tumor protein homolog

SEQ ID NO: 109810 - DNA, 1055 bp, Zea mays subsp. mays
  misc_feature (1)..(1055): Ceres Seq. ID no. 15177907
aaaagaaacagagcaaacctccgtcttccttttttttgacgagcggtgatgttttctctcaacttccatggctgacatctcaccttcctaattctccccaacctgccacacaaagtctatttctttcgcctaaaacttcaccatcaaacaccccctagggtttttttcaatccatttttttttgtatttttgaaattttttctaatggatgcgatcttctcccccgccgtggaacctgaaggagccaccgactcaaccatcgacacagtttctcgcttggtctccggcgctttctccagagctcttactggttttttcgctatggctggagctttcacaggagcagtaactggtgcggtggcaggaagagcggcacagtacggagtcctccgtggggctgcactcggcgctgtagctggagctattctctctgttgaagtcttggaggcttctcgtgcctactggtatttagagctatcaggatccaggggaccttcatctatggcagattttgtagagcaactgtttcgtgggagactagtagaagaacaacttatgtcaacaatgatacagtcacaccactggcagttaaggatatcagatgtaagctatgaagagagggatgatgtgtatagtgaattggaacccagaggcttgtctggtgactcgttaaggaaactcccatgctatatcatgtcaagtgagatgaccaagaagcagatcattcactgcactatttgtcttcaggacgtcgcagttggcgaaatcacacggagcttaccgagatgtgaccatacgtttcacctggtttgtgttgataaatggctcatcagacatggatcatgccccatttgcagacaggccgttaaagattaaaaagcaccattggtatccgaggagtgtacgtagcaaaaacccattgtcattatatgttgttgtaagtctctgaatccttgtttcaatctctctttgttacttttacttatagcatcatccataggtttctgcttttgaatgtatactattactgtagacatgaataaaaacacatacac

SEQ ID NO: 109811 - protein, 223 aa, Zea mays subsp. mays
  misc_feature (1)..(223): Ceres Seq. ID no. 15177908
  misc_feature (176)..(217): Pfam Name: Zinc finger, C3HC4 type (RING finger) Pfam Description: Zinc finger, C3HC4 type (RING finger)
  misc_feature (42)..(221): Homolog of NCBI NO: 34901682 NR Description: P0434A03.5 [Oryza sativa (japonica
  misc_feature (35)..(221): Homolog of NCBI NO: 37536572 NR Description: hypothetical protein [Oryza sativa (japonica
  misc_feature (22)..(216): Homolog of NCBI NO: 25411815 NR Description: hypothetical protein At2g17730 [imported] -
  misc_feature (7)..(219): Homolog of NCBI NO: 26451101 NR Description: unknown protein [Arabidopsis thaliana]
  misc_feature (22)..(221): Homolog of NCBI NO: 30680091 NR Description: expressed protein [Arabidopsis thaliana]
  misc_feature (22)..(221): Homolog of NCBI NO: 26452210 NR Description: unknown protein [Arabidopsis thaliana]
  misc_feature (1)..(219): Homolog of NCBI NO: 15239242 NR Description: zinc finger (C3HC4-type RING finger) protein
  misc_feature (118)..(223): Homolog of NCBI NO: 25406345 NR Description: probable RING zinc finger protein F1M20.9
  misc_feature (1)..(223): Homolog of NCBI NO: 21592935 NR Description: putative RING zinc finger protein [Arabidopsis
  misc_feature (1)..(223): Homolog of NCBI NO: 18410608 NR Description: zinc finger (C3HC4-type RING finger) protein
MDAIFSPAVEPEGATDSTIDTVSRLVSGAFSRALTGFFAMAGAFTGAVTGAVAGRAAQYGVLRGAALGAVAGAILSVEVLEASRAYWYLELSGSRGPSSMADFVEQLFRGRLVEEQLMSTMIQSHHWQLRISDVSYEERDDVYSELEPRGLSGDSLRKLPCYIMSSEMTKKQIIHCTICLQDVAVGEITRSLPRCDHTFHLVCVDKWLIRHGSCPICRQAVKD

SEQ ID NO: 109812 - protein, 184 aa, Zea mays subsp. mays
  misc_feature (1)..(184): Ceres Seq. ID no. 15177909
  misc_feature (137)..(178): Pfam Name: Zinc finger, C3HC4 type (RING finger) Pfam Description: Zinc finger, C3HC4 type (RING finger)
  misc_feature (3)..(182): Homolog of NCBI NO: 34901682 NR Description: P0434A03.5 [Oryza sativa (japonica
  misc_feature (1)..(182): Homolog of NCBI NO: 37536572 NR Description: hypothetical protein [Oryza sativa (japonica
  misc_feature (1)..(177): Homolog of NCBI NO: 25411815 NR Description: hypothetical protein At2g17730 [imported] -
  misc_feature (1)..(180): Homolog of NCBI NO: 26451101 NR Description: unknown protein [Arabidopsis thaliana]
  misc_feature (1)..(182): Homolog of NCBI NO: 30680091 NR Description: expressed protein [Arabidopsis thaliana]
  misc_feature (1)..(182): Homolog of NCBI NO: 26452210 NR Description: unknown protein [Arabidopsis thaliana]
  misc_feature (1)..(180): Homolog of NCBI NO: 15239242 NR Description: zinc finger (C3HC4-type RING finger) protein
  misc_feature (79)..(184): Homolog of NCBI NO: 25406345 NR Description: probable RING zinc finger protein F1M20.9
  misc_feature (1)..(184): Homolog of NCBI NO: 21592935 NR Description: putative RING zinc finger protein [Arabidopsis
  misc_feature (1)..(184): Homolog of NCBI NO: 18410608 NR Description: zinc finger (C3HC4-type RING finger) protein
MAGAFTGAVTGAVAGRAAQYGVLRGAALGAVAGAILSVEVLEASRAYWYLELSGSRGPSSMADFVEQLFRGRLVEEQLMSTMIQSHHWQLRISDVSYEERDDVYSELEPRGLSGDSLRKLPCYIMSSEMTKKQIIHCTICLQDVAVGEITRSLPRCDHTFHLVCVDKWLIRHGSCPICRQAVKD

SEQ ID NO: 109813 - protein, 124 aa, Zea mays subsp. mays
  misc_feature (1)..(124): Ceres Seq. ID no. 15177910
  misc_feature (77)..(118): Pfam Name: Zinc finger, C3HC4 type (RING finger) Pfam Description: Zinc finger, C3HC4 type (RING finger)
  misc_feature (1)..(122): Homolog of NCBI NO: 34901682 NR Description: P0434A03.5 [Oryza sativa (japonica
  misc_feature (1)..(122): Homolog of NCBI NO: 37536572 NR Description: hypothetical protein [Oryza sativa (japonica
  misc_feature (1)..(117): Homolog of NCBI NO: 25411815 NR Description: hypothetical protein At2g17730 [imported] -
  misc_feature (1)..(120): Homolog of NCBI NO: 26451101 NR Description: unknown protein [Arabidopsis thaliana]
  misc_feature (1)..(122): Homolog of NCBI NO: 30680091 NR Description: expressed protein [Arabidopsis thaliana]
  misc_feature (1)..(122): Homolog of NCBI NO: 26452210 NR Description: unknown protein [Arabidopsis thaliana]
  misc_feature (1)..(120): Homolog of NCBI NO: 15239242 NR Description: zinc finger (C3HC4-type RING finger) protein
  misc_feature (19)..(124): Homolog of NCBI NO: 25406345 NR Description: probable RING zinc finger protein F1M20.9
  misc_feature (1)..(124): Homolog of NCBI NO: 21592935 NR Description: putative RING zinc finger protein [Arabidopsis
  misc_feature (1)..(124): Homolog of NCBI NO: 18410608 NR Description: zinc finger (C3HC4-type RING finger) protein
MADFVEQLFRGRLVEEQLMSTMIQSHHWQLRISDVSYEERDDVYSELEPRGLSGDSLRKLPCYIMSSEMTKKQIIHCTICLQDVAVGEITRSLPRCDHTFHLVCVDKWLIRHGSCPICRQAVKD

SEQ ID NO: 109814 - DNA, 603 bp, Zea mays subsp. mays
  misc_feature (1)..(603): Ceres Seq. ID no. 15179080
aaactcgaaagggaccaaatcggaaagaggaaaatgggagaggggaaggagagtgtgccacaggagcacgatgtgaatgcgaagtgggacgcatgtatcgatctcacgacccgccgtttcgtctactcctcactcggcggcgccttcgccggtcttctcttcttcaggagtcctgtaacaagatgggcatcgattgcttttggtgctggacttggtattggttctgcatacactgactgctctcgtgcttttgatgctccgccttcattcacagagacttcttctgtatctcagactgtatctcagtctgcagacgaatagacaaacgatgaaagtaagtgaatccatgcggaaacagagccatcacaccaatgatttgttgaattgtttcctaaaacctgtaaggacaagtcttttgagattaacgctgaatgtaaaatcttgtttttcttctgttaaatccttttgaacagctgacttcagtcacgcattctagttccaaaaataaacaacctcagaagaaggtatacttgaagattgttcctctttctttagtcaaaataccaaacgatgtcatgcttatgacggatgtgcttgcctctg

SEQ ID NO: 109815 - protein, 106 aa, Zea mays subsp. mays
  misc_feature (1)..(106): Ceres Seq. ID no. 15179081
  misc_feature (12)..(85): Pfam Name: Domain of unknown function (DUF543) Pfam Description: Domain of unknown function (DUF543)
  misc_feature (12)..(98): Homolog of NCBI NO: 25406151 NR Description: unknown protein T9N14.2 [imported] - Arabidopsis
  misc_feature (14)..(106): Homolog of NCBI NO: 18395129 NR Description: expressed protein [Arabidopsis thaliana]
  misc_feature (12)..(106): Homolog of NCBI NO: 21553491 NR Description: unknown [Arabidopsis thaliana]
  misc_feature (12)..(106): Homolog of NCBI NO: 18410008 NR Description: expressed protein [Arabidopsis thaliana]
KLERDQIGKRKMGEGKESVPQEHDVNAKWDACIDLTTRRFVYSSLGGAFAGLLFFRSPVTRWASIAFGAGLGIGSAYTDCSRAFDAPPSFTETSSVSQTVSQSADE

SEQ ID NO: 109816 - protein, 95 aa, Zea mays subsp. mays
  misc_feature (1)..(95): Ceres Seq. ID no. 15179082
  misc_feature (1)..(74): Pfam Name: Domain of unknown function (DUF543) Pfam Description: Domain of unknown function (DUF543)
  misc_feature (1)..(87): Homolog of NCBI NO: 25406151 NR Description: unknown protein T9N14.2 [imported] - Arabidopsis
  misc_feature (3)..(95): Homolog of NCBI NO: 18395129 NR Description: expressed protein [Arabidopsis thaliana]
  misc_feature (1)..(95): Homolog of NCBI NO: 21553491 NR Description: unknown [Arabidopsis thaliana]
  misc_feature (1)..(95): Homolog of NCBI NO: 18410008 NR Description: expressed protein [Arabidopsis thaliana]
MGEGKESVPQEHDVNAKWDACIDLTTRRFVYSSLGGAFAGLLFFRSPVTRWASIAFGAGLGIGSAYTDCSRAFDAPPSFTETSSVSQTVSQSADE

SEQ ID NO: 109817 - protein, 77 aa, Zea mays subsp. mays
  misc_feature (1)..(77): Ceres Seq. ID no. 15179083
TRKGPNRKEENGRGEGECATGARCECEVGRMYRSHDPPFRLLLTRRRLRRSSLLQESCNKMGIDCFWCWTWYWFCIH

SEQ ID NO: 109818 - DNA, 688 bp, Zea mays subsp. mays
  misc_feature (1)..(688): Ceres Seq. ID no. 15179062
acaaattggattgttatccagaacgaaattgttctagtttttaagttcactcgacacttttgcaatggcgatttctctccccaccgctcatgtctctccccctaagtcgtgtttctccttttcatcctcgtcgaagctatcttctcattcatccctgcgcttcggaatccgccacgaaagagttaactcgcggtcgtcgtctcgctgcgcctgcgccccactcactgttagagcaaagaagcaaaccttcaactcttttgatgatttattgctcaactctgacaaacctttactagtagacttctatgccacatggtgtggtccatgccagcttatggtacctatacttaatgaagtaagtgaaactctgagagataagattgcagtggtgaaaattgatactgaaaagtacccaagtcttgctaacaaataccaggttgaggctttacctacattcatcttattcaaagacgggaaactctgggaccgttttgagggagccttgcaagctaaccaactcgttgaacggatcgagacttctttacaagcgaagcaatagatgaacaaacagtccgttgtgacaacacgttcattattgattgacaaatttcttttcaatatatggcatcagccatttttcttttctgagtgacaaatttctcatgatatttggctacttttccgtcgc

SEQ ID NO: 109819 - protein, 164 aa, Zea mays subsp. mays
  misc_feature (1)..(164): Ceres Seq. ID no. 15179063
  misc_feature (57)..(161): Pfam Name: Thioredoxin Pfam Description: Thioredoxin
  misc_feature (53)..(156): Homolog of NCBI NO: 22299829 NR Description: thioredoxin M [Thermosynechococcus elongatus
  misc_feature (57)..(157): Homolog of NCBI NO: 16331440 NR Description: thioredoxin M [Synechocystis sp. PCC 6803]
  misc_feature (58)..(158): Homolog of NCBI NO: 17229385 NR Description: thioredoxin [Nostoc sp. PCC 7120]
  misc_feature (25)..(156): Homolog of NCBI NO: 27763679 NR Description: thioredoxin y [Chlamydomonas reinhardtii]
  misc_feature (57)..(160): Homolog of NCBI NO: 23123943 NR Description: hypothetical protein [Nostoc punctiforme]
  misc_feature (57)..(156): Homolog of NCBI NO: 23039598 NR Description: hypothetical protein [Trichodesmium erythraeum
  misc_feature (18)..(163): Homolog of NCBI NO: 15223728 NR Description: thioredoxin family [Arabidopsis thaliana]
  misc_feature (4)..(163): Homolog of NCBI NO: 38454080 NR Description: At1g76760 [Arabidopsis thaliana]
  misc_feature (57)..(164): Homolog of NCBI NO: 25405118 NR Description: hypothetical protein T10P12.4 [imported] -
  misc_feature (1)..(164): Homolog of NCBI NO: 30693659 NR Description: thioredoxin family [Arabidopsis thaliana]
MAISLPTAHVSPPKSCFSFSSSSKLSSHSSLRFGIRHERVNSRSSSRCACAPLTVRAKKQTFNSFDDLLLNSDKPLLVDFYATWCGPCQLMVPILNEVSETLRDKIAVVKIDTEKYPSLANKYQVEALPTFILFKDGKLWDRFEGALQANQLVERIETSLQAKQ

SEQ ID NO: 109820 - DNA, 1267 bp, Zea mays subsp. mays
  misc_feature (1)..(1267): Ceres Seq. ID no. 15176717
atctatttatgacttctctcaaccagcaataacgaaaacgtctctcctctctatctctctttaaaaaaatggacggcgtagcattcttcttcaccggagctctcgtagccggcggaatctactggttcctgtgcgtcctgggaccagcggagcgaaaaggaaaacgagcgttggatctatcgggggggtccatctcggccgagaaagttcaagacaagtacaaacagtactggtcgttcttccgccgtccgaaagagatcgaaaccgccgagaaagtcccggacttcgtcgacacgttctacaacctcgtcaccgacatctacgagtggggatggggacagtccttccacttctctccttccatccgaggcaaatcccaccgcgacgccacgcgcctccacgaagagatggccgtagatctgatccaagtgaaaccgggtcaaaagatcctcgatgtcggatgcggcgtcggaggtccgatgcgcgcgattgcatcccactcgcgagccaacgtggtggggatcacgatcaacgagtaccaggtgaagagagcgcgtgaccacaacagaaaagcaggactcgacgcgctctgcgaggtcgtgtgtggtaacttcctccagatacccttcgatgataacaccttcgacggcgcgtactctatcgaagcgacgtgtcacgcgccgaagctggaagaagtctacgccgagatctacagggtgttgaaacccggatctttgtacgtatcgtacgagtgggtcaccactgataagttcaacgccgaggatgaggaacacgtggaggtcatccaaggcatcgagaggggtgacgcgcttcctgggcttagggcttactcggatatagccgaggccgccaagaaagttggcttccaagttgtcaaggagaaggatctagcggctccaccggctgagccgtggtggactaggcttaagatgggtcggctcgcttattggaggaaccacattgtggttcagattctgtctgctgttggagttgcgcctaagggaaccgtcgatgttcacgagatgttgtttaagactgctgatttcttgtccagaggaggcgaaactgaaattttctctccgatgcatatgattctctgccggaaacctatgtcttaaacgataatcatttcccgatctcagtttgtttttaattttttttcttatggatttttgattttgcctggtcagtcaatgtactcctttagattttaattttaatttggtattactgttttttcttgcct

SEQ ID NO: 109821 - protein, 356 aa, Zea mays subsp. mays
  misc_feature (1)..(356): Ceres Seq. ID no. 15176718
  misc_feature (82)..(281): Pfam Name: ubiE/COQ5 methyltransferase family Pfam Description: ubiE/COQ5 methyltransferase family
  misc_feature (1)..(355): Homolog of NCBI NO: 3560533 NR Description: 24-methylene lophenol C24(1)methyltransferase
  misc_feature (9)..(354): Homolog of NCBI NO: 7443717 NR Description: probable sterol 24-C-methyltransferase (EC
  misc_feature (1)..(354): Homolog of NCBI NO: 7443718 NR Description: probable sterol 24-C-methyltransferase (EC
  misc_feature (1)..(354): Homolog of NCBI NO: 2246456 NR Description: S-adenosyl-methionine-sterol-C-methyltransferase
  misc_feature (1)..(354): Homolog of NCBI NO: 15222955 NR Description: S-adenosyl-methionine-sterol-C-methyltransferase
  misc_feature (1)..(356): Homolog of NCBI NO: 21555010 NR Description: sterol-C-methyltransferase [Arabidopsis thaliana]
  misc_feature (1)..(356): Homolog of NCBI NO: 23397216 NR Description: putative sterol-C-methyltransferase [Arabidopsis
  misc_feature (1)..(356): Homolog of NCBI NO: 1061040 NR Description: sterol-C-methyltransferase [Arabidopsis thaliana]
  misc_feature (1)..(356): Homolog of NCBI NO: 22136020 NR Description: 24-sterol C-methyltransferase [Arabidopsis
  misc_feature (1)..(356): Homolog of NCBI NO: 15217917 NR Description: sterol-C-methyltransferase [Arabidopsis thaliana]
MDGVAFFFTGALVAGGIYWFLCVLGPAERKGKRALDLSGGSISAEKVQDKYKQYWSFFRRPKEIETAEKVPDFVDTFYNLVTDIYEWGWGQSFHFSPSIRGKSHRDATRLHEEMAVDLIQVKPGQKILDVGCGVGGPMRAIASHSRANVVGITINEYQVKRARDHNRKAGLDALCEVVCGNFLQIPFDDNTFDGAYSIEATCHAPKLEEVYAEIYRVLKPGSLYVSYEWVTTDKFNAEDEEHVEVIQGIERGDALPGLRAYSDIAEAAKKVGFQVVKEKDLAAPPAEPWWTRLKMGRLAYWRNHIVVQILSAVGVAPKGTVDVHEMLFKTADFLSRGGETEIFSPMHMILCRKPMS

SEQ ID NO: 109822 - protein, 243 aa, Zea mays subsp. mays
  misc_feature (1)..(243): Ceres Seq. ID no. 15176719
  misc_feature (1)..(168): Pfam Name: ubiE/COQ5 methyltransferase family Pfam Description: ubiE/COQ5 methyltransferase family
  misc_feature (1)..(242): Homolog of NCBI NO: 3560533 NR Description: 24-methylene lophenol C24(1)methyltransferase
  misc_feature (1)..(241): Homolog of NCBI NO: 7443717 NR Description: probable sterol 24-C-methyltransferase (EC
  misc_feature (1)..(241): Homolog of NCBI NO: 7443718 NR Description: probable sterol 24-C-methyltransferase (EC
  misc_feature (1)..(241): Homolog of NCBI NO: 2246456 NR Description: S-adenosyl-methionine-sterol-C-methyltransferase
  misc_feature (1)..(241): Homolog of NCBI NO: 15222955 NR Description: S-adenosyl-methionine-sterol-C-methyltransferase
  misc_feature (1)..(243): Homolog of NCBI NO: 21555010 NR Description: sterol-C-methyltransferase [Arabidopsis thaliana]
  misc_feature (1)..(243): Homolog of NCBI NO: 23397216 NR Description: putative sterol-C-methyltransferase [Arabidopsis
  misc_feature (1)..(243): Homolog of NCBI NO: 1061040 NR Description: sterol-C-methyltransferase [Arabidopsis thaliana]
  misc_feature (1)..(243): Homolog of NCBI NO: 22136020 NR Description: 24-sterol C-methyltransferase [Arabidopsis
  misc_feature (1)..(243): Homolog of NCBI NO: 15217917 NR Description: sterol-C-methyltransferase [Arabidopsis thaliana]
MAVDLIQVKPGQKILDVGCGVGGPMRAIASHSRANVVGITINEYQVKRARDHNRKAGLDALCEVVCGNFLQIPFDDNTFDGAYSIEATCHAPKLEEVYAEIYRVLKPGSLYVSYEWVTTDKFNAEDEEHVEVIQGIERGDALPGLRAYSDIAEAAKKVGFQVVKEKDLAAPPAEPWWTRLKMGRLAYWRNHIVVQILSAVGVAPKGTVDVHEMLFKTADFLSRGGETEIFSPMHMILCRKPMS

SEQ ID NO: 109823 - protein, 219 aa, Zea mays subsp. mays
  misc_feature (1)..(219): Ceres Seq. ID no. 15176720
  misc_feature (1)..(144): Pfam Name: ubiE/COQ5 methyltransferase family Pfam Description: ubiE/COQ5 methyltransferase family
  misc_feature (1)..(218): Homolog of NCBI NO: 3560533 NR Description: 24-methylene lophenol C24(1)methyltransferase
  misc_feature (1)..(217): Homolog of NCBI NO: 7443717 NR Description: probable sterol 24-C-methyltransferase (EC
  misc_feature (1)..(217): Homolog of NCBI NO: 7443718 NR Description: probable sterol 24-C-methyltransferase (EC
  misc_feature (1)..(217): Homolog of NCBI NO: 2246456 NR Description: S-adenosyl-methionine-sterol-C-methyltransferase
  misc_feature (1)..(217): Homolog of NCBI NO: 15222955 NR Description: S-adenosyl-methionine-sterol-C-methyltransferase
  misc_feature (1)..(219): Homolog of NCBI NO: 21555010 NR Description: sterol-C-methyltransferase [Arabidopsis thaliana]
  misc_feature (1)..(219): Homolog of NCBI NO: 23397216 NR Description: putative sterol-C-methyltransferase [Arabidopsis
  misc_feature (1)..(219): Homolog of NCBI NO: 1061040 NR Description: sterol-C-methyltransferase [Arabidopsis thaliana]
  misc_feature (1)..(219): Homolog of NCBI NO: 22136020 NR Description: 24-sterol C-methyltransferase [Arabidopsis
  misc_feature (1)..(219): Homolog of NCBI NO: 15217917 NR Description: sterol-C-methyltransferase [Arabidopsis thaliana]
MRAIASHSRANVVGITINEYQVKRARDHNRKAGLDALCEVVCGNFLQIPFDDNTFDGAYSIEATCHAPKLEEVYAEIYRVLKPGSLYVSYEWVTTDKFNAEDEEHVEVIQGIERGDALPGLRAYSDIAEAAKKVGFQVVKEKDLAAPPAEPWWTRLKMGRLAYWRNHIVVQILSAVGVAPKGTVDVHEMLFKTADFLSRGGETEIFSPMHMILCRKPMS

SEQ ID NO: 109824 - DNA, 726 bp, Zea mays subsp. mays
  misc_feature (1)..(726): Ceres Seq. ID no. 15179506
acttttctctcccattcttttacaactcacgttgcacagcctttttctctatatattacttgacataaactactattcacaacacaaacacacacataaccatggcctcttcttcacaagctttccttttgctcacattgtctatggttttagttcatttctctttagctcaatctcccatgatggctccttctggctccatgtccatgccgccaatgcctagcggcggctctccaatgccaatgatgactccaccacctatgccaatgatgactccaccacctatggctatggctccaccacctatgcctatgactccaccaccaatgcccatggctccgatgccaatgactccatcttcaagtccaatgagcccaccaactactatggccccaagtccagaaacagtccctgatatggcttcgccaccgatgatgccaggaatggattcttctccttctccgggacccatgccaccggcaatggcctctccagattccggagcattcaatgtaagaaacgacgtcgtagcaatttcgttccttgttgcagctcatttgctcctagtttgagattattattaaattggccagcgtcgtgtttgtgtaatttactttcatttttttctcgagccattaattttcatgttttatcatatatttgggtttgtgtttgatatggtacgattcagacatttgtttgcttaataagtttatcgttgactct

SEQ ID NO: 109825 - protein, 156 aa, Zea mays subsp. mays
  misc_feature (1)..(156): Ceres Seq. ID no. 15179507
  misc_feature (20)..(126): Pfam Name: Formin Homology 2 Domain Pfam Description: Formin Homology 2 Domain
  misc_feature (26)..(131): Homolog of NCBI NO: 6523547 NR Description: hydroxyproline-rich glycoprotein DZ-HRGP
  misc_feature (1)..(131): Homolog of NCBI NO: 7441828 NR Description: extensin-like cell wall protein - sea-island
  misc_feature (25)..(148): Homolog of NCBI NO: 23577891 NR Description: unknown [Rachiplusia ou multiple
  misc_feature (5)..(133): Homolog of NCBI NO: 13265426 NR Description: At2g14890 [Arabidopsis thaliana]
  misc_feature (5)..(133): Homolog of NCBI NO: 15226024 NR Description: arabinogalactan-protein (AGP9) [Arabidopsis
  misc_feature (1)..(131): Homolog of NCBI NO: 15866589 NR Description: hypothetical protein [Capsella rubella]
  misc_feature (26)..(156): Homolog of NCBI NO: 15866589 NR Description: hypothetical protein [Capsella rubella]
  misc_feature (1)..(137): Homolog of NCBI NO: 7488174 NR Description: probable resistance protein - Arabidopsis thaliana
  misc_feature (1)..(156): Homolog of NCBI NO: 21592593 NR Description: unknown [Arabidopsis thaliana]
  misc_feature (1)..(156): Homolog of NCBI NO: 30683885 NR Description: arabinogalactan-protein family [Arabidopsis
MASSSQAFLLLTLSMVLVHFSLAQSPMMAPSGSMSMPPMPSGGSPMPMMTPPPMPMMTPPPMAMAPPPMPMTPPPMPMAPMPMTPSSSPMSPPTTMAPSPETVPDMASPPMMPGMDSSPSPGPMPPAMASPDSGAFNVRNDVVAISFLVAAHLLLV

SEQ ID NO: 109826 - protein, 142 aa, Zea mays subsp. mays
  misc_feature (1)..(142): Ceres Seq. ID no. 15179508
  misc_feature (6)..(112): Pfam Name: Formin Homology 2 Domain Pfam Description: Formin Homology 2 Domain
  misc_feature (12)..(117): Homolog of NCBI NO: 6523547 NR Description: hydroxyproline-rich glycoprotein DZ-HRGP
  misc_feature (1)..(117): Homolog of NCBI NO: 7441828 NR Description: extensin-like cell wall protein - sea-island
  misc_feature (11)..(134): Homolog of NCBI NO: 23577891 NR Description: unknown [Rachiplusia ou multiple
  misc_feature (1)..(119): Homolog of NCBI NO: 13265426 NR Description: At2g14890 [Arabidopsis thaliana]
  misc_feature (1)..(119): Homolog of NCBI NO: 15226024 NR Description: arabinogalactan-protein (AGP9) [Arabidopsis
  misc_feature (1)..(117): Homolog of NCBI NO: 15866589 NR Description: hypothetical protein [Capsella rubella]
  misc_feature (12)..(142): Homolog of NCBI NO: 15866589 NR Description: hypothetical protein [Capsella rubella]
  misc_feature (1)..(123): Homolog of NCBI NO: 7488174 NR Description: probable resistance protein - Arabidopsis thaliana
  misc_feature (1)..(142): Homolog of NCBI NO: 21592593 NR Description: unknown [Arabidopsis thaliana]
  misc_feature (1)..(142): Homolog of NCBI NO: 30683885 NR Description: arabinogalactan-protein family [Arabidopsis
MVLVHFSLAQSPMMAPSGSMSMPPMPSGGSPMPMMTPPPMPMMTPPPMAMAPPPMPMTPPPMPMAPMPMTPSSSPMSPPTTMAPSPETVPDMASPPMMPGMDSSPSPGPMPPAMASPDSGAFNVRNDVVAISFLVAAHLLLV

SEQ ID NO: 109827 - protein, 130 aa, Zea mays subsp. mays
  misc_feature (1)..(130): Ceres Seq. ID no. 15179509
  misc_feature (1)..(100): Pfam Name: Formin Homology 2 Domain Pfam Description: Formin Homology 2 Domain
  misc_feature (1)..(105): Homolog of NCBI NO: 6523547 NR Description: hydroxyproline-rich glycoprotein DZ-HRGP
  misc_feature (1)..(105): Homolog of NCBI NO: 7441828 NR Description: extensin-like cell wall protein - sea-island
  misc_feature (1)..(122): Homolog of NCBI NO: 23577891 NR Description: unknown [Rachiplusia ou multiple
  misc_feature (1)..(107): Homolog of NCBI NO: 13265426 NR Description: At2g14890 [Arabidopsis thaliana]
  misc_feature (1)..(107): Homolog of NCBI NO: 15226024 NR Description: arabinogalactan-protein (AGP9) [Arabidopsis
  misc_feature (1)..(105): Homolog of NCBI NO: 15866589 NR Description: hypothetical protein [Capsella rubella]
  misc_feature (1)..(130): Homolog of NCBI NO: 15866589 NR Description: hypothetical protein [Capsella rubella]
  misc_feature (1)..(111): Homolog of NCBI NO: 7488174 NR Description: probable resistance protein - Arabidopsis thaliana
  misc_feature (1)..(130): Homolog of NCBI NO: 21592593 NR Description: unknown [Arabidopsis thaliana]
  misc_feature (1)..(130): Homolog of NCBI NO: 30683885 NR Description: arabinogalactan-protein family [Arabidopsis
MMAPSGSMSMPPMPSGGSPMPMMTPPPMPMMTPPPMAMAPPPMPMTPPPMPMAPMPMTPSSSPMSPPTTMAPSPETVPDMASPPMMPGMDSSPSPGPMPPAMASPDSGAFNVRNDVVAISFLVAAHLLLV

SEQ ID NO: 109828 - DNA, 1023 bp, Zea mays subsp. mays
  misc_feature (1)..(1023): Ceres Seq. ID no. 15178104
ctctcggaaccctttggctcgatttgattacctctcttcactaaggtttaaaggatgaagcttgatactagtgggttcgagacatccatgcctacgattggattcgggtcgagcaacgatatgcttgatgggttttctactgtgccctcctttgaccttccccgcactactgatttcgatgggtttcagaaagaagcagtacagatggtgaagccagcgaaaggaacaacaacacttgctttcatcttcaaagaaggtgtcatggtcgctgctgattctcgtgctagcatgggtggatatatctcgtcacaatctgtgaagaagattattgaaatcaatccttatatgcttggtacaatggctggaggagcggctgattgtcaattctggcacagaaaccttggaatcaagtgccgtctacatgagctggcaaacaagaggagaatatctgtttccggagcttcaaaacttctagcaaacatgctctactcataccgtggaatgggactttccgtcggcacaatgattgctggatgggacgaaactggtcctggactatactatgtggacaacgaaggaggaaggctcaagggagacaggttttcagtcggttctggttcaccatacgcttatggtgtacttgacagcgggtacaaattcgatatgtcagttgaagaagcatctgagttagcaaggagatcaatctaccatgcgacattccgtgatggagctagtggtggagttgctagcgtgtaccacgtgggtcctaatggatggaagaaactgtcgggagatgatgttggggagctacactatcactactaccctgtgccaccatccactgccgaacaagtcatggaggaagcggctgccgagtaataacattcactctctagcttaaactttgtttctcactataagattctccttttattctgcaactgcacactctttattttgttcaagcagctctgtttcaaccatgaaattaggaccgatcaaatagaaccgatctatttcaaa

SEQ ID NO: 109829 - protein, 274 aa, Zea mays subsp. mays
  misc_feature (1)..(274): Ceres Seq. ID no. 15178105
  misc_feature (54)..(236): Pfam Name: Proteasome A-type and B-type Pfam Description: Proteasome A-type and B-type
  misc_feature (21)..(256): Homolog of NCBI NO: 20302762 NR Description: unknown [Branchiostoma floridae]
  misc_feature (77)..(250): Homolog of NCBI NO: 14594931 NR Description: putative beta5 proteasome subunit [Nicotiana
  misc_feature (74)..(273): Homolog of NCBI NO: 16588840 NR Description: putative 20S proteasome beta subunit 5 [Prunus
  misc_feature (1)..(74): Homolog of NCBI NO: 3980264 NR Description: 20S proteasome beta subunit [Cicer arietinum]
  misc_feature (106)..(271): Homolog of NCBI NO: 3980264 NR Description: 20S proteasome beta subunit [Cicer arietinum]
  misc_feature (1)..(273): Homolog of NCBI NO: 8671510 NR Description: beta 5 subunit of 20S proteasome
  misc_feature (1)..(270): Homolog of NCBI NO: 3914430 NR Description: Proteasome subunit beta type 5 precursor (20S
  misc_feature (1)..(274): Homolog of NCBI NO: 15292875 NR Description: putative proteasome epsilon chain precursor
  misc_feature (1)..(274): Homolog of NCBI NO: 15222152 NR Description: 20S proteasome beta subunit E1 (PBE1)
  misc_feature (1)..(272): Homolog of NCBI NO: 15231544 NR Description: 20S proteasome beta subunit E, putative
MKLDTSGFETSMPTIGFGSSNDMLDGFSTVPSFDLPRTTDFDGFQKEAVQMVKPAKGTTTLAFIFKEGVMVAADSRASMGGYISSQSVKKIIEINPYMLGTMAGGAADCQFWHRNLGIKCRLHELANKRRISVSGASKLLANMLYSYRGMGLSVGTMIAGWDETGPGLYYVDNEGGRLKGDRFSVGSGSPYAYGVLDSGYKFDMSVEEASELARRSIYHATFRDGASGGVASVYHVGPNGWKKLSGDDVGELHYHYYPVPPSTAEQVMEEAAAE

SEQ ID NO: 109830 - protein, 263 aa, Zea mays subsp. mays
  misc_feature (1)..(263): Ceres Seq. ID no. 15178106
  misc_feature (43)..(225): Pfam Name: Proteasome A-type and B-type Pfam Description: Proteasome A-type and B-type
  misc_feature (10)..(245): Homolog of NCBI NO: 20302762 NR Description: unknown [Branchiostoma floridae]
  misc_feature (66)..(239): Homolog of NCBI NO: 14594931 NR Description: putative beta5 proteasome subunit [Nicotiana
  misc_feature (63)..(262): Homolog of NCBI NO: 16588840 NR Description: putative 20S proteasome beta subunit 5 [Prunus
  misc_feature (1)..(63): Homolog of NCBI NO: 3980264 NR Description: 20S proteasome beta subunit [Cicer arietinum]
  misc_feature (95)..(260): Homolog of NCBI NO: 3980264 NR Description: 20S proteasome beta subunit [Cicer arietinum]
  misc_feature (1)..(262): Homolog of NCBI NO: 8671510 NR Description: beta 5 subunit of 20S proteasome
  misc_feature (1)..(259): Homolog of NCBI NO: 3914430 NR Description: Proteasome subunit beta type 5 precursor (20S
  misc_feature (1)..(263): Homolog of NCBI NO: 15292875 NR Description: putative proteasome epsilon chain precursor
  misc_feature (1)..(263): Homolog of NCBI NO: 15222152 NR Description: 20S proteasome beta subunit E1 (PBE1)
  misc_feature (1)..(261): Homolog of NCBI NO: 15231544 NR Description: 20S proteasome beta subunit E, putative
MPTIGFGSSNDMLDGFSTVPSFDLPRTTDFDGFQKEAVQMVKPAKGTTTLAFIFKEGVMVAADSRASMGGYISSQSVKKIIEINPYMLGTMAGGAADCQFWHRNLGIKCRLHELANKRRISVSGASKLLANMLYSYRGMGLSVGTMIAGWDETGPGLYYVDNEGGRLKGDRFSVGSGSPYAYGVLDSGYKFDMSVEEASELARRSIYHATFRDGASGGVASVYHVGPNGWKKLSGDDVGELHYHYYPVPPSTAEQVMEEAAAE

SEQ ID NO: 109831 - protein, 252 aa, Zea mays subsp. mays
  misc_feature (1)..(252): Ceres Seq. ID no. 15178107
  misc_feature (32)..(214): Pfam Name: Proteasome A-type and B-type Pfam Description: Proteasome A-type and B-type
  misc_feature (1)..(234): Homolog of NCBI NO: 20302762 NR Description: unknown [Branchiostoma floridae]
  misc_feature (55)..(228): Homolog of NCBI NO: 14594931 NR Description: putative beta5 proteasome subunit [Nicotiana
  misc_feature (52)..(251): Homolog of NCBI NO: 16588840 NR Description: putative 20S proteasome beta subunit 5 [Prunus
  misc_feature (1)..(52): Homolog of NCBI NO: 3980264 NR Description: 20S proteasome beta subunit [Cicer arietinum]
  misc_feature (84)..(249): Homolog of NCBI NO: 3980264 NR Description: 20S proteasome beta subunit [Cicer arietinum]
  misc_feature (1)..(251): Homolog of NCBI NO: 8671510 NR Description: beta 5 subunit of 20S proteasome
  misc_feature (1)..(248): Homolog of NCBI NO: 3914430 NR Description: Proteasome subunit beta type 5 precursor (20S
  misc_feature (1)..(252): Homolog of NCBI NO: 15292875 NR Description: putative proteasome epsilon chain precursor
  misc_feature (1)..(252): Homolog of NCBI NO: 15222152 NR Description: 20S proteasome beta subunit E1 (PBE1)
  misc_feature (1)..(250): Homolog of NCBI NO: 15231544 NR Description: 20S proteasome beta subunit E, putative
MLDGFSTVPSFDLPRTTDFDGFQKEAVQMVKPAKGTTTLAFIFKEGVMVAADSRASMGGYISSQSVKKIIEINPYMLGTMAGGAADCQFWHRNLGIKCRLHELANKRRISVSGASKLLANMLYSYRGMGLSVGTMIAGWDETGPGLYYVDNEGGRLKGDRFSVGSGSPYAYGVLDSGYKFDMSVEEASELARRSIYHATFRDGASGGVASVYHVGPNGWKKLSGDDVGELHYHYYPVPPSTAEQVMEEAAAE

SEQ ID NO: 109832 - DNA, 727 bp, Zea mays subsp. mays
  misc_feature (1)..(727): Ceres Seq. ID no. 15178857
accattctataataatataaaaattagtaagagagttgtttccagagatttctctccattttgcgtgacacgatggcgcttcgtgctactcaatcgactggccgtatcgcggcggcggcgctacggcgtgtcgctagacctttctcaacggacgcggtggtggaatcggattacaagcgtggggagatcggtaaggtctcgggaatcccagaggagcatctttcccgcaaggtgataatatactcaccagctagaactgcgactcagcaaggatctggcaaacttggcaaatggaagatcaacttcctctccaccttaaagtgggagaatccattgatgggatggacttctacaggtgacccttatgccaacgttggtgactctgctctttcttttgattctgaggatgctgccaagtcctttgctgagcgtcatggctgggattatactgtcaagaagcccaaaacgccattattgaagcctaagtcttactcggacaacttcaagtggaaaggcaatcctcagcctgagaagtgatcttccatcctgatcttcttcttccttcatttctggagagaaacctcatttgatgaataaataaaaagctctcgtggtttacttcttattttagcatctgtgagctttttctctgaactttattatccatggttggattctttttgtatgtttttcttaccataacaataaatatgatgatggtgataac

SEQ ID NO: 109833 - protein, 154 aa, Zea mays subsp. mays
  misc_feature (1)..(154): Ceres Seq. ID no. 15178858
  misc_feature (52)..(153): Pfam Name: ETC complex I subunit conserved region Pfam Description: ETC complex I subunit conserved region
  misc_feature (26)..(146): Homolog of NCBI NO: 17511145 NR Description: NADH dehydrogenase (ubiquinone) Fe-S protein 4
  misc_feature (38)..(146): Homolog of NCBI NO: 31199457 NR Description: ENSANGP00000021474 [Anopheles gambiae]
  misc_feature (2)..(146): Homolog of NCBI NO: 28461229 NR Description: NADH dehydrogenase (ubiquinone) Fe-S protein 4,
  misc_feature (1)..(146): Homolog of NCBI NO: 14919381 NR Description: NADH dehydrogenase (ubiquinone) Fe-S protein 4
  misc_feature (1)..(146): Homolog of NCBI NO: 6754814 NR Description: NADH dehydrogenase (ubiquinone) Fe-S protein 4
  misc_feature (1)..(146): Homolog of NCBI NO: 13528960 NR Description: NADH dehydrogenase (ubiquinone) Fe-S protein 4
  misc_feature (1)..(146): Homolog of NCBI NO: 4505369 NR Description: NADH dehydrogenase (ubiquinone) Fe-S protein 4,
  misc_feature (4)..(136): Homolog of NCBI NO: 34901114 NR Description: NADH-ubiquinone oxidoreductase 18 kDa subunit, precursor-like protein~contains ESTs
  misc_feature (1)..(153): Homolog of NCBI NO: 15240784 NR Description: expressed protein [Arabidopsis thaliana]
  misc_feature (1)..(153): Homolog of NCBI NO: 21555571 NR Description: unknown [Arabidopsis thaliana]
MALRATQSTGRIAAAALRRVARPFSTDAVVESDYKRGEIGKVSGIPEEHLSRKVIIYSPARTATQQGSGKLGKWKINFLSTLKWENPLMGWTSTGDPYANVGDSALSFDSEDAAKSFAERHGWDYTVKKPKTPLLKPKSYSDNFKWKGNPQPEK

SEQ ID NO: 109834 - protein, 77 aa, Zea mays subsp. mays
  misc_feature (1)..(77): Ceres Seq. ID no. 15178859
PFYNNIKISKRVVSRDFSPFCVTRWRFVLLNRLAVSRRRRYGVSLDLSQRTRWWNRITSVGRSVRSRESQRSIFPAR

SEQ ID NO: 109835 - DNA, 1246 bp, Zea mays subsp. mays
  misc_feature (1)..(1246): Ceres Seq. ID no. 15180040
atatctcttatcccctccttctctcccaatagtctcacagtcccctctagaaatatgtcttcagcttattgttcctccgccgtggcggtttccaccgcagccaccgtttcctccgccactacctttaacccactattctccttccattcgaatttcaaactcttctatcgcatcacaccaaaacccttcaaactcgtcgccaaatgccctactcctcctctcttcctccatctaaatacccatcgccaccgcctcttctgcgccgccgaagacgaaatcccgccgtcatccgaagaagacgaggaagaaaacgaagaagacgaagacgcagatgagacacagacgacgcaagctagcgttgaggaagggaggctgtacgttgggaacttgccttacacaatcactgcctctgagctctcccagcttttcggagaagctggaaacgtcatcgatgttcagattgtgtacgataaagtcactgacagaagcagagggtttggattcgtaaccatgggaaccatcgaagaagctaaagaagcgattcagatgttcaacagctctcaaatcggtggaaggacggtgaaagtgaacttcccggaggtgcctagaggcggagagagggaagtgatgaggactaagattcgtgatagtaacaagagttatgttgacagtcctcataagatctatgcggggaaccttggttggaatctaacgtcgcaaggtcttaaagatgcgtttgggaatcagcctggggtgcttggtgctaaagttatctacgaaagaaacagtgggaggtctagggggtttggtttcgtctcttttgagtcggaaggagagcttcagtctgctctgagtgctatgaatggtgtggtaagggtcttggtttggtgatttgggttgggtttgagactgactagttgttggtttcggtttatttcttaggaagtggaaggacgagcgctgcgtctaaacttggcttcggagagagctactaccgagtctcgttcttctgtagcaggaggagagactgaagagggcagtctagagagcagtgaggtggtttcgaacattagtacatgaagcagcagaagcacagtagattctactgagggctagcaaaatgaacactgttatgagttatgactatgttgttgtactctactacggctaaagaaaaaatatataaatatatgagataaacgacaggagatttagctgtaatcttattaaaaaatgcttgttccat

SEQ ID NO: 109836 - protein, 296 aa, Zea mays subsp. mays
  misc_feature (1)..(296): Ceres Seq. ID no. 15180041
  misc_feature (125)..(196): Pfam Name: RNA recognition motif. (a.k.a. RRM, RBD, or RNP domain) Pfam Description: RNA recognition motif. (a.k.a. RRM, RBD, or RNP
  misc_feature (107)..(221): Homolog of NCBI NO: 12230585 NR Description: 29 kDa ribonucleoprotein B, chloroplast precursor
  misc_feature (89)..(289): Homolog of NCBI NO: 7446356 NR Description: Ps16 protein - wheat
  misc_feature (90)..(290): Homolog of NCBI NO: 34394882 NR Description: putative RNA-binding protein
  misc_feature (89)..(290): Homolog of NCBI NO: 7446339 NR Description: probable RNA-binding protein cp33 precursor -
  misc_feature (25)..(290): Homolog of NCBI NO: 7446342 NR Description: RNA-binding protein precursor, 33K - wood tobacco
  misc_feature (19)..(290): Homolog of NCBI NO: 133249 NR Description: 33 kDa ribonucleoprotein, chloroplast precursor
  misc_feature (90)..(296): Homolog of NCBI NO: 100376 NR Description: ribonucleoprotein precursor - common tobacco
  misc_feature (27)..(290): Homolog of NCBI NO: 681912 NR Description: cp33 [Arabidopsis thaliana]
  misc_feature (19)..(290): Homolog of NCBI NO: 17064758 NR Description: ubiquitin / ribosomal protein CEP52 [Arabidopsis
  misc_feature (19)..(290): Homolog of NCBI NO: 15231200 NR Description: 33 kDa ribonucleoprotein, chloroplast
ISLIPSFSPNSLTVPSRNMSSAYCSSAVAVSTAATVSSATTFNPLFSFHSNFKLFYRITPKPFKLVAKCPTPPLFLHLNTHRHRLFCAAEDEIPPSSEEDEEENEEDEDADETQTTQASVEEGRLYVGNLPYTITASELSQLFGEAGNVIDVQIVYDKVTDRSRGFGFVTMGTIEEAKEAIQMFNSSQIGGRTVKVNFPEVPRGGEREVMRTKIRDSNKSYVDSPHKIYAGNLGWNLTSQGLKDAFGNQPGVLGAKVIYERNSGRSRGFGFVSFESEGELQSALSAMNGVVRVLVW

SEQ ID NO: 109837 - protein, 278 aa, Zea mays subsp. mays
  misc_feature (1)..(278): Ceres Seq. ID no. 15180042
  misc_feature (107)..(178): Pfam Name: RNA recognition motif. (a.k.a. RRM, RBD, or RNP domain) Pfam Description: RNA recognition motif. (a.k.a. RRM, RBD, or RNP
  misc_feature (89)..(203): Homolog of NCBI NO: 12230585 NR Description: 29 kDa ribonucleoprotein B, chloroplast precursor
  misc_feature (71)..(271): Homolog of NCBI NO: 7446356 NR Description: Ps16 protein - wheat
  misc_feature (72)..(272): Homolog of NCBI NO: 34394882 NR Description: putative RNA-binding protein
  misc_feature (71)..(272): Homolog of NCBI NO: 7446339 NR Description: probable RNA-binding protein cp33 precursor -
  misc_feature (7)..(272): Homolog of NCBI NO: 7446342 NR Description: RNA-binding protein precursor, 33K - wood tobacco
  misc_feature (1)..(272): Homolog of NCBI NO: 133249 NR Description: 33 kDa ribonucleoprotein, chloroplast precursor
  misc_feature (72)..(278): Homolog of NCBI NO: 100376 NR Description: ribonucleoprotein precursor - common tobacco
  misc_feature (9)..(272): Homolog of NCBI NO: 681912 NR Description: cp33 [Arabidopsis thaliana]
  misc_feature (1)..(272): Homolog of NCBI NO: 17064758 NR Description: ubiquitin / ribosomal protein CEP52 [Arabidopsis
  misc_feature (1)..(272): Homolog of NCBI NO: 15231200 NR Description: 33 kDa ribonucleoprotein, chloroplast
MSSAYCSSAVAVSTAATVSSATTFNPLFSFHSNFKLFYRITPKPFKLVAKCPTPPLFLHLNTHRHRLFCAAEDEIPPSSEEDEEENEEDEDADETQTTQASVEEGRLYVGNLPYTITASELSQLFGEAGNVIDVQIVYDKVTDRSRGFGFVTMGTIEEAKEAIQMFNSSQIGGRTVKVNFPEVPRGGEREVMRTKIRDSNKSYVDSPHKIYAGNLGWNLTSQGLKDAFGNQPGVLGAKVIYERNSGRSRGFGFVSFESEGELQSALSAMNGVVRVLVW

SEQ ID NO: 109838 - DNA, 1308 bp, Zea mays subsp. mays
  misc_feature (1)..(1308): Ceres Seq. ID no. 15180036
ataaggtctttttaccactccttcccttcaccttctctgatttggattttgtcaatctcatcgattcgattcttctcccaatcaaatctctctccaattctctcatcaggaaagttcaaatttttctccatcattctctctctttggtgctttcccctcgttaaaaaaaaaacgaaaatttgagataaagagaaaccttccatggcagcagctatgagcgagaaggaagctatggttgatcctttcctggtcgaagctcttcagaaccctcgtcatcgtctcacaattctgcgtatggagctggacatacaaaagttctttcaaagcccagagcagcagcaatacgagttccctccttacccaacctcctacctccgcctcgctgctcaccgcgtggcccaccactacggcctcttcaccactgccttagacggtgctgctctagacggctccgggaacaggatcctcgtcaccaagaccggtgagagcagctacccttacgtctgtttgtctgagattcccgtgaagcagcctgaggctaacgggaggaggcctcagggcttcaagctcgccatcaaggcgaggcctaacggagggtctggtggggcgggtggtgggtcgggtgtggagaggaatctgttgaggagcgttgaggagaggaaagaggagtatgagaaggccagggcgcggatctttaacagtcctaatagttcagactctgaagactcttcaactcgagctcctcctcctcctgttcagcagacaaaacataacaacagtagactcccagctagacacgaggccgagagtgttgttgatgaggagaggaacggtgttggaaggacttcacgggtcgccattattagagatagagagaaagatcgttatgatcctgattatgaccggaacaggtacgtgagggttactccaccggtacaaaacttcagcccgatgccgccgattcatcttcctttccatgacggagttttcccacagatgccaagaactcaacccagtataagctatggacatcccttgaaccctgctatgacttctactaacgctcctgcttatacagagtggcctagtgtcacagtgagttatgcacagacattgcatgcttcagacccaaatcatttcaggcaccagaatccctgacctttggtcctgatcaaaccatgtctgtatgcttttatattaggatgtagtcttagtattttttcttctgctcttgttgaaaacattggccgcacaagacatttttactctgttgttacaaattatattaacaatatcaagcttttgcat

SEQ ID NO: 109839 - protein, 318 aa, Zea mays subsp. mays
  misc_feature (1)..(318): Ceres Seq. ID no. 15180037
  misc_feature (1)..(301): Homolog of NCBI NO: 29367411 NR Description: unknown [Oryza sativa (japonica cultivar-group)]
  misc_feature (1)..(238): Homolog of NCBI NO: 7487238 NR Description: hypothetical protein At2g40960 [imported] -
  misc_feature (1)..(315): Homolog of NCBI NO: 18405560 NR Description: expressed protein [Arabidopsis thaliana]
  misc_feature (12)..(302): Homolog of NCBI NO: 15228989 NR Description: expressed protein [Arabidopsis thaliana]
  misc_feature (1)..(315): Homolog of NCBI NO: 21592404 NR Description: unknown [Arabidopsis thaliana]
  misc_feature (3)..(315): Homolog of NCBI NO: 21592735 NR Description: unknown [Arabidopsis thaliana]
  misc_feature (3)..(315): Homolog of NCBI NO: 18398995 NR Description: expressed protein [Arabidopsis thaliana]
  misc_feature (3)..(315): Homolog of NCBI NO: 30681485 NR Description: expressed protein [Arabidopsis thaliana]
  misc_feature (3)..(314): Homolog of NCBI NO: 10178049 NR Description: gb|AAF19572.1~gene_id:MUG13.4~strong similarity
  misc_feature (3)..(318): Homolog of NCBI NO: 18414788 NR Description: expressed protein [Arabidopsis thaliana]
MAAAMSEKEAMVDPFLVEALQNPRHRLTILRMELDIQKFFQSPEQQQYEFPPYPTSYLRLAAHRVAHHYGLFTTALDGAALDGSGNRILVTKTGESSYPYVCLSEIPVKQPEANGRRPQGFKLAIKARPNGGSGGAGGGSGVERNLLRSVEERKEEYEKARARIFNSPNSSDSEDSSTRAPPPPVQQTKHNNSRLPARHEAESVVDEERNGVGRTSRVAIIRDREKDRYDPDYDRNRYVRVTPPVQNFSPMPPIHLPFHDGVFPQMPRTQPSISYGHPLNPAMTSTNAPAYTEWPSVTVSYAQTLHASDPNHFRHQNP

SEQ ID NO: 109840 - protein, 314 aa, Zea mays subsp. mays
  misc_feature (1)..(314): Ceres Seq. ID no. 15180038
  misc_feature (1)..(297): Homolog of NCBI NO: 29367411 NR Description: unknown [Oryza sativa (japonica cultivar-group)]
  misc_feature (1)..(234): Homolog of NCBI NO: 7487238 NR Description: hypothetical protein At2g40960 [imported] -
  misc_feature (1)..(311): Homolog of NCBI NO: 18405560 NR Description: expressed protein [Arabidopsis thaliana]
  misc_feature (8)..(298): Homolog of NCBI NO: 15228989 NR Description: expressed protein [Arabidopsis thaliana]
  misc_feature (1)..(311): Homolog of NCBI NO: 21592404 NR Description: unknown [Arabidopsis thaliana]
  misc_feature (1)..(311): Homolog of NCBI NO: 21592735 NR Description: unknown [Arabidopsis thaliana]
  misc_feature (1)..(311): Homolog of NCBI NO: 18398995 NR Description: expressed protein [Arabidopsis thaliana]
  misc_feature (1)..(311): Homolog of NCBI NO: 30681485 NR Description: expressed protein [Arabidopsis thaliana]
  misc_feature (1)..(310): Homolog of NCBI NO: 10178049 NR Description: gb|AAF19572.1~gene_id:MUG13.4~strong similarity
  misc_feature (1)..(314): Homolog of NCBI NO: 18414788 NR Description: expressed protein [Arabidopsis thaliana]
MSEKEAMVDPFLVEALQNPRHRLTILRMELDIQKFFQSPEQQQYEFPPYPTSYLRLAAHRVAHHYGLFTTALDGAALDGSGNRILVTKTGESSYPYVCLSEIPVKQPEANGRRPQGFKLAIKARPNGGSGGAGGGSGVERNLLRSVEERKEEYEKARARIFNSPNSSDSEDSSTRAPPPPVQQTKHNNSRLPARHEAESVVDEERNGVGRTSRVAIIRDREKDRYDPDYDRNRYVRVTPPVQNFSPMPPIHLPFHDGVFPQMPRTQPSISYGHPLNPAMTSTNAPAYTEWPSVTVSYAQTLHASDPNHFRHQNP

SEQ ID NO: 109841 - protein, 308 aa, Zea mays subsp. mays
  misc_feature (1)..(308): Ceres Seq. ID no. 15180039
  misc_feature (1)..(291): Homolog of NCBI NO: 29367411 NR Description: unknown [Oryza sativa (japonica cultivar-group)]
  misc_feature (1)..(228): Homolog of NCBI NO: 7487238 NR Description: hypothetical protein At2g40960 [imported] -
  misc_feature (1)..(305): Homolog of NCBI NO: 18405560 NR Description: expressed protein [Arabidopsis thaliana]
  misc_feature (2)..(292): Homolog of NCBI NO: 15228989 NR Description: expressed protein [Arabidopsis thaliana]
  misc_feature (1)..(305): Homolog of NCBI NO: 21592404 NR Description: unknown [Arabidopsis thaliana]
  misc_feature (1)..(305): Homolog of NCBI NO: 21592735 NR Description: unknown [Arabidopsis thaliana]
  misc_feature (1)..(305): Homolog of NCBI NO: 18398995 NR Description: expressed protein [Arabidopsis thaliana]
  misc_feature (1)..(305): Homolog of NCBI NO: 30681485 NR Description: expressed protein [Arabidopsis thaliana]
  misc_feature (1)..(304): Homolog of NCBI NO: 10178049 NR Description: gb|AAF19572.1~gene_id:MUG13.4~strong similarity
  misc_feature (1)..(308): Homolog of NCBI NO: 18414788 NR Description: expressed protein [Arabidopsis thaliana]
MVDPFLVEALQNPRHRLTILRMELDIQKFFQSPEQQQYEFPPYPTSYLRLAAHRVAHHYGLFTTALDGAALDGSGNRILVTKTGESSYPYVCLSEIPVKQPEANGRRPQGFKLAIKARPNGGSGGAGGGSGVERNLLRSVEERKEEYEKARARIFNSPNSSDSEDSSTRAPPPPVQQTKHNNSRLPARHEAESVVDEERNGVGRTSRVAIIRDREKDRYDPDYDRNRYVRVTPPVQNFSPMPPIHLPFHDGVFPQMPRTQPSISYGHPLNPAMTSTNAPAYTEWPSVTVSYAQTLHASDPNHFRHQNP

SEQ ID NO: 109842 - DNA, 750 bp, Zea mays subsp. mays
  misc_feature (1)..(750): Ceres Seq. ID no. 15176721
caatacacaagacaacaaacaaggaataatggcgctcgcgctgttagcatctcctccacctccgctcgggggggtccgtcgcagttttggaacaaagtgttcgctcttcgccgcacagcgagccaagcggaacctgatggatctcatctccgaccaggaccgaggtctgagaacccagaaagacgctgtgaagcgagacgcgatcgtgaatgccatcgaggccatggcggtgatcgggggaagctccgtcaccacaggagattcgctgtctgccacgtggagactactgtggacgacggagaaagaacagctgttcatcatagagaaggcggggttgttcggcacgcgcgctggagaggtactgcaggtgatcgatgtgaggaaagggacgctcaacaacgtcatcactttcccgcccgacggcgttttctttgtacgctccgatatcgacatctcttccccgcagagagtcaatttcaaattcactagtgcggtgttgagaggaagcaattgggagatcccactcccaccatttggccagggctggtttgaaaatgtgtatatggatggtgacatcagagtggccaaggacatcagaggggactacttagttgttgatcgtgctccttttaactggaaagaatgatctgttactcaacaatgcatctcctcctttttaatgatctttgttttgtacatcaacactacactactctattctacgactttacatcatctacttttaatgcc

SEQ ID NO: 109843 - protein, 214 aa, Zea mays subsp. mays
  misc_feature (1)..(214): Ceres Seq. ID no. 15176722
  misc_feature (39)..(206): Pfam Name: PAP_fibrillin Pfam Description: PAP_fibrillin
  misc_feature (15)..(212): Homolog of NCBI NO: 38345467 NR Description: OSJNBa0010H02.5 [Oryza sativa (japonica
  misc_feature (10)..(214): Homolog of NCBI NO: 15236688 NR Description: plastid-lipid associated protein PAP/fibrillin
NTQDNKQGIMALALLASPPPPLGGVRRSFGTKCSLFAAQRAKRNLMDLISDQDRGLRTQKDAVKRDAIVNAIEAMAVIGGSSVTTGDSLSATWRLLWTTEKEQLFIIEKAGLFGTRAGEVLQVIDVRKGTLNNVITFPPDGVFFVRSDIDISSPQRVNFKFTSAVLRGSNWEIPLPPFGQGWFENVYMDGDIRVAKDIRGDYLVVDRAPFNWKE

SEQ ID NO: 109844 - protein, 205 aa, Zea mays subsp. mays
  misc_feature (1)..(205): Ceres Seq. ID no. 15176723
  misc_feature (30)..(197): Pfam Name: PAP_fibrillin Pfam Description: PAP_fibrillin
  misc_feature (6)..(203): Homolog of NCBI NO: 38345467 NR Description: OSJNBa0010H02.5 [Oryza sativa (japonica
  misc_feature (1)..(205): Homolog of NCBI NO: 15236688 NR Description: plastid-lipid associated protein PAP/fibrillin
MALALLASPPPPLGGVRRSFGTKCSLFAAQRAKRNLMDLISDQDRGLRTQKDAVKRDAIVNAIEAMAVIGGSSVTTGDSLSATWRLLWTTEKEQLFIIEKAGLFGTRAGEVLQVIDVRKGTLNNVITFPPDGVFFVRSDIDISSPQRVNFKFTSAVLRGSNWEIPLPPFGQGWFENVYMDGDIRVAKDIRGDYLVVDRAPFNWKE

SEQ ID NO: 109845 - protein, 169 aa, Zea mays subsp. mays
  misc_feature (1)..(169): Ceres Seq. ID no. 15176724
  misc_feature (1)..(161): Pfam Name: PAP_fibrillin Pfam Description: PAP_fibrillin
  misc_feature (1)..(167): Homolog of NCBI NO: 38345467 NR Description: OSJNBa0010H02.5 [Oryza sativa (japonica
  misc_feature (1)..(169): Homolog of NCBI NO: 15236688 NR Description: plastid-lipid associated protein PAP/fibrillin
MDLISDQDRGLRTQKDAVKRDAIVNAIEAMAVIGGSSVTTGDSLSATWRLLWTTEKEQLFIIEKAGLFGTRAGEVLQVIDVRKGTLNNVITFPPDGVFFVRSDIDISSPQRVNFKFTSAVLRGSNWEIPLPPFGQGWFENVYMDGDIRVAKDIRGDYLVVDRAPFNWKE

SEQ ID NO: 109846 - DNA, 1053 bp, Zea mays subsp. mays
  misc_feature (1)..(1053): Ceres Seq. ID no. 15179517
acagaaaaaagcttagagctctgctagcagtaatggcgggtttggcaatttcacctcctctgagtcttaccttctcttctcgaactagaaacgctaaacccacttcgtatctatctcgcaatcaaagaaatcttacaaggcgtatagtttctgctcttccaagcccgtatggtgattcactgaaagctggactttcgagtaatgtctctggcaacaaggatcctcgtaacattgctccaagatctggagttatagtggcgaagaaaggaaacccgcctgtaatgccatcagtgatgacccctggaggacctttggacctctcttcagtgttattccgtaaccgcataatcttcatcggacaaccaatcaacgcacaggttgctcagcgtgtcatatctcagcttgtaaccctcgcttctattgatgataaatccgacatcttgatttacttgaattgtcctggaggcagtacttactcggtcttagcaatctatgactgtatgtcttggataaagcctaaagttggaacagtagcgtttggagtagcagcgagtcaaggagcacttcttcttgctggaggtgagaaaggaatgcgctacgcaatgccgaacactcgtgtcatgatccatcaacctcaaactggatgtggaggacatgtggaggacgtgaggagacaggtgaatgaagccatcgaagccagacaaaaaattgacaggatgtatgcagctttcactggacaaactcttgagacagtgcagcaatacactgaaagagatcgtttcctatccgcttctgaggcgcttgaatttgggcttatcgatggtctattggaaacagaatactgaaagcaacatgcaagacattgcatagatgcagcttatagcgatgttcagactttcccatttcatttgaatatgaaaagttgtaaccaatctgaaaacttatgttctatttcggttcagctttttactattcagttatgtaatcaaattctatgcaatgaactctgtagcattactggttgtcagaacaaaatgtgaacaaatttgcaat

SEQ ID NO: 109847 - protein, 280 aa, Zea mays subsp. mays
  misc_feature (1)..(280): Ceres Seq. ID no. 15179518
  misc_feature (100)..(279): Pfam Name: Clp protease Pfam Description: Clp protease
  misc_feature (105)..(277): Homolog of NCBI NO: 1705929 NR Description: ATP-dependent Clp protease proteolytic subunit 1
  misc_feature (91)..(278): Homolog of NCBI NO: 33241265 NR Description: Protease subunit of ATP-dependent Clp protease
  misc_feature (105)..(279): Homolog of NCBI NO: 16080507 NR Description: ATP-dependent Clp protease proteolytic subunit
  misc_feature (93)..(276): Homolog of NCBI NO: 16332068 NR Description: ATP-dependent Clp protease proteolytic subunit
  misc_feature (11)..(280): Homolog of NCBI NO: 28209486 NR Description: putative clp-like energy-dependent protease
  misc_feature (17)..(257): Homolog of NCBI NO: 9968665 NR Description: putative ATP-dependent clp serine protease
  misc_feature (9)..(280): Homolog of NCBI NO: 7435703 NR Description: endopeptidase Clp (EC 3.4.21.92) chain P
  misc_feature (11)..(280): Homolog of NCBI NO: 2921510 NR Description: clp-like energy-dependent protease [Fritillaria
  misc_feature (11)..(280): Homolog of NCBI NO: 2827888 NR Description: ATP-dependent Clp protease proteolytic subunit
  misc_feature (11)..(280): Homolog of NCBI NO: 18391311 NR Description: ATP-dependent Clp protease proteolytic subunit
RKKLRALLAVMAGLAISPPLSLTFSSRTRNAKPTSYLSRNQRNLTRRIVSALPSPYGDSLKAGLSSNVSGNKDPRNIAPRSGVIVAKKGNPPVMPSVMTPGGPLDLSSVLFRNRIIFIGQPINAQVAQRVISQLVTLASIDDKSDILIYLNCPGGSTYSVLAIYDCMSWIKPKVGTVAFGVAASQGALLLAGGEKGMRYAMPNTRVMIHQPQTGCGGHVEDVRRQVNEAIEARQKIDRMYAAFTGQTLETVQQYTERDRFLSASEALEFGLIDGLLETEY

SEQ ID NO: 109848 - protein, 270 aa, Zea mays subsp. mays
  misc_feature (1)..(270): Ceres Seq. ID no. 15179519
  misc_feature (90)..(269): Pfam Name: Clp protease Pfam Description: Clp protease
  misc_feature (95)..(267): Homolog of NCBI NO: 1705929 NR Description: ATP-dependent Clp protease proteolytic subunit 1
  misc_feature (81)..(268): Homolog of NCBI NO: 33241265 NR Description: Protease subunit of ATP-dependent Clp protease
  misc_feature (95)..(269): Homolog of NCBI NO: 16080507 NR Description: ATP-dependent Clp protease proteolytic subunit
  misc_feature (83)..(266): Homolog of NCBI NO: 16332068 NR Description: ATP-dependent Clp protease proteolytic subunit
  misc_feature (1)..(270): Homolog of NCBI NO: 28209486 NR Description: putative clp-like energy-dependent protease
  misc_feature (7)..(247): Homolog of NCBI NO: 9968665 NR Description: putative ATP-dependent clp serine protease
  misc_feature (1)..(270): Homolog of NCBI NO: 7435703 NR Description: endopeptidase Clp (EC 3.4.21.92) chain P
  misc_feature (1)..(270): Homolog of NCBI NO: 2921510 NR Description: clp-like energy-dependent protease [Fritillaria
  misc_feature (1)..(270): Homolog of NCBI NO: 2827888 NR Description: ATP-dependent Clp protease proteolytic subunit
  misc_feature (1)..(270): Homolog of NCBI NO: 18391311 NR Description: ATP-dependent Clp protease proteolytic subunit
MAGLAISPPLSLTFSSRTRNAKPTSYLSRNQRNLTRRIVSALPSPYGDSLKAGLSSNVSGNKDPRNIAPRSGVIVAKKGNPPVMPSVMTPGGPLDLSSVLFRNRIIFIGQPINAQVAQRVISQLVTLASIDDKSDILIYLNCPGGSTYSVLAIYDCMSWIKPKVGTVAFGVAASQGALLLAGGEKGMRYAMPNTRVMIHQPQTGCGGHVEDVRRQVNEAIEARQKIDRMYAAFTGQTLETVQQYTERDRFLSASEALEFGLIDGLLETEY

SEQ ID NO: 109849 - protein, 187 aa, Zea mays subsp. mays
  misc_feature (1)..(187): Ceres Seq. ID no. 15179520
  misc_feature (7)..(186): Pfam Name: Clp protease Pfam Description: Clp protease
  misc_feature (12)..(184): Homolog of NCBI NO: 1705929 NR Description: ATP-dependent Clp protease proteolytic subunit 1
  misc_feature (1)..(185): Homolog of NCBI NO: 33241265 NR Description: Protease subunit of ATP-dependent Clp protease
  misc_feature (12)..(186): Homolog of NCBI NO: 16080507 NR Description: ATP-dependent Clp protease proteolytic subunit
  misc_feature (1)..(183): Homolog of NCBI NO: 16332068 NR Description: ATP-dependent Clp protease proteolytic subunit
  misc_feature (1)..(187): Homolog of NCBI NO: 28209486 NR Description: putative clp-like energy-dependent protease
  misc_feature (1)..(164): Homolog of NCBI NO: 9968665 NR Description: putative ATP-dependent clp serine protease
  misc_feature (1)..(187): Homolog of NCBI NO: 7435703 NR Description: endopeptidase Clp (EC 3.4.21.92) chain P
  misc_feature (1)..(187): Homolog of NCBI NO: 2921510 NR Description: clp-like energy-dependent protease [Fritillaria
  misc_feature (1)..(187): Homolog of NCBI NO: 2827888 NR Description: ATP-dependent Clp protease proteolytic subunit
  misc_feature (1)..(187): Homolog of NCBI NO: 18391311 NR Description: ATP-dependent Clp protease proteolytic subunit
MPSVMTPGGPLDLSSVLFRNRIIFIGQPINAQVAQRVISQLVTLASIDDKSDILIYLNCPGGSTYSVLAIYDCMSWIKPKVGTVAFGVAASQGALLLAGGEKGMRYAMPNTRVMIHQPQTGCGGHVEDVRRQVNEAIEARQKIDRMYAAFTGQTLETVQQYTERDRFLSASEALEFGLIDGLLETEY

SEQ ID NO: 109850 - DNA, 800 bp, Zea mays subsp. mays
  misc_feature (1)..(800): Ceres Seq. ID no. 15174423
aacaacaaagaacacatctttgatcttcccttgagctccctcccctgaatcgctaatctcgtcattcgtctctcgaatccttaaaaagaacggtagtaaggagccatggatccagctgagatgaggtacttggaagaagaggacggccccatgatgaagaccatcaaaggcagcgtgactggcttcgccgcagggaccatctacggaaccattttggccacgtggaaagacgttccgagagtggagagaaacgtggctcttccggggctgatcaggacgctgaagatgatgggaacacacgggctcactttcgccgccattggaggagtttacatcggtgttgagcaggtggttcagagctatagaggaaagagagattttttcaatggtgctattggtgggtttgttgctggagcttctgtccttggctacagagcaaggagcatcccaacagcgatagctgcaggtgcaacactagcggttacatctgctttgattgactctggaggacagaccacaagagtagacaacggcagagagtattatccttactcccctgttgagaaaacagctcaagctgctgatgcctgatctctcttttggcgtctgaacttaataaagctctgcatctgcttatcatgggctcttgagatcatctctcttccctgtcctctcttttttttttttgcctacttgtatctggagatataaaattgctcttgtttcctcctgtgtttatggagagtgacttgcatcttttgtctgaacttttccttcaataaaatatcaactctatcttc

SEQ ID NO: 109851 - protein, 161 aa, Zea mays subsp. mays
  misc_feature (1)..(161): Ceres Seq. ID no. 15174424
  misc_feature (9)..(138): Pfam Name: Tim17/Tim22/Tim23 family Pfam Description: Tim17/Tim22/Tim23 family
  misc_feature (1)..(158): Homolog of NCBI NO: 18405910 NR Description: expressed protein [Arabidopsis thaliana]
MDPAEMRYLEEEDGPMMKTIKGSVTGFAAGTIYGTILATWKDVPRVERNVALPGLIRTLKMMGTHGLTFAAIGGVYIGVEQVVQSYRGKRDFFNGAIGGFVAGASVLGYRARSIPTAIAAGATLAVTSALIDSGGQTTRVDNGREYYPYSPVEKTAQAADA

SEQ ID NO: 109852 - protein, 156 aa, Zea mays subsp. mays
  misc_feature (1)..(156): Ceres Seq. ID no. 15174425
  misc_feature (4)..(133): Pfam Name: Tim17/Tim22/Tim23 family Pfam Description: Tim17/Tim22/Tim23 family
  misc_feature (1)..(153): Homolog of NCBI NO: 18405910 NR Description: expressed protein [Arabidopsis thaliana]
MRYLEEEDGPMMKTIKGSVTGFAAGTIYGTILATWKDVPRVERNVALPGLIRTLKMMGTHGLTFAAIGGVYIGVEQVVQSYRGKRDFFNGAIGGFVAGASVLGYRARSIPTAIAAGATLAVTSALIDSGGQTTRVDNGREYYPYSPVEKTAQAADA

SEQ ID NO: 109853 - protein, 146 aa, Zea mays subsp. mays
  misc_feature (1)..(146): Ceres Seq. ID no. 15174426
  misc_feature (1)..(123): Pfam Name: Tim17/Tim22/Tim23 family Pfam Description: Tim17/Tim22/Tim23 family
  misc_feature (1)..(143): Homolog of NCBI NO: 18405910 NR Description: expressed protein [Arabidopsis thaliana]
MMKTIKGSVTGFAAGTIYGTILATWKDVPRVERNVALPGLIRTLKMMGTHGLTFAAIGGVYIGVEQVVQSYRGKRDFFNGAIGGFVAGASVLGYRARSIPTAIAAGATLAVTSALIDSGGQTTRVDNGREYYPYSPVEKTAQAADA

SEQ ID NO: 109854 - DNA, 720 bp, Zea mays subsp. mays
  misc_feature (1)..(720): Ceres Seq. ID no. 15174384
acagaacagaagagagaaaaacgaaacagttgtttattttctcctacagatcgattcccactttcccaaatctttcttccaacacacagattctcctctcggcactcagatatgagtagcctcatcgcttcatccgccaccgttctccctccgtgcggccccacggcgctcaaatcttgcatctccccacctctcgcctcccaatcccgaaccaaacgcgcgagctcgagaagagcttcaaccatgacggttcgatgcgacgtagctgtgaagtcagctgattcggtgaacgcagaggaggccgagctttcggcagaagagatcgaagcgaaggcgaaggtgggatcttcgatcagagtgactgcgccgctgaaggtttaccatgtgaaccgagtcccggaggttgatttggaagggatggaaggtaagctgaaagactacgtggccgtgtggaaagggaaacggatatcagctaatcttccttacaaggttgagttctttaaagaggttgaaggtcgtggtcctgttaagtttgttgctcatctcaaggacgacgagttcgagttcatcgatgcttgatgatgtgacaacaaaggcagattctttttctcttcttgtgtttggtgaagcctgggaatggagagaatgatttgtatgtactgagaatactgatgtatgtgtgtgtatacctttagcaatcatatacataagcatctctcc

SEQ ID NO: 109855 - protein, 192 aa, Zea mays subsp. mays
  misc_feature (1)..(192): Ceres Seq. ID no. 15174385
  misc_feature (76)..(190): Homolog of NCBI NO: 505186 NR Description: ferredoxin-thioredoxin reductase SU A [Spinacia
  misc_feature (76)..(190): Homolog of NCBI NO: 729538 NR Description: Ferredoxin-thioredoxin reductase, variable chain, precursor (FTR-V) (Ferredoxin-thioredoxin reductase subunit A)
  misc_feature (102)..(191): Homolog of NCBI NO: 1362192 NR Description: ferredoxin-thioredoxin reductase (EC 1.18.-.-)
  misc_feature (79)..(191): Homolog of NCBI NO: 14275856 NR Description: subunit A of ferredoxin-thioredoxin-reductase
  misc_feature (102)..(191): Homolog of NCBI NO: 2498397 NR Description: FERREDOXIN-THIOREDOXIN REDUCTASE, VARIABLE CHAIN
  misc_feature (43)..(191): Homolog of NCBI NO: 38346617 NR Description: OSJNBa0074L08.8 [Oryza sativa (japonica
  misc_feature (18)..(191): Homolog of NCBI NO: 18415805 NR Description: lipoic acid synthase -related [Arabidopsis
  misc_feature (18)..(191): Homolog of NCBI NO: 10178283 NR Description: lipoic acid synthase-like protein [Arabidopsis
  misc_feature (22)..(191): Homolog of NCBI NO: 15237763 NR Description: expressed protein [Arabidopsis thaliana]
TEQKREKRNSCLFSPTDRFPLSQIFLPTHRFSSRHSDMSSLIASSATVLPPCGPTALKSCISPPLASQSRTKRASSRRASTMTVRCDVAVKSADSVNAEEAELSAEEIEAKAKVGSSIRVTAPLKVYHVNRVPEVDLEGMEGKLKDYVAVWKGKRISANLPYKVEFFKEVEGRGPVKFVAHLKDDEFEFIDA

SEQ ID NO: 109856 - protein, 155 aa, Zea mays subsp. mays
  misc_feature (1)..(155): Ceres Seq. ID no. 15174386
  misc_feature (39)..(153): Homolog of NCBI NO: 505186 NR Description: ferredoxin-thioredoxin reductase SU A [Spinacia
  misc_feature (39)..(153): Homolog of NCBI NO: 729538 NR Description: Ferredoxin-thioredoxin reductase, variable chain, precursor (FTR-V) (Ferredoxin-thioredoxin reductase subunit A)
  misc_feature (65)..(154): Homolog of NCBI NO: 1362192 NR Description: ferredoxin-thioredoxin reductase (EC 1.18.-.-)
  misc_feature (42)..(154): Homolog of NCBI NO: 14275856 NR Description: subunit A of ferredoxin-thioredoxin-reductase
  misc_feature (65)..(154): Homolog of NCBI NO: 2498397 NR Description: FERREDOXIN-THIOREDOXIN REDUCTASE, VARIABLE CHAIN
  misc_feature (6)..(154): Homolog of NCBI NO: 38346617 NR Description: OSJNBa0074L08.8 [Oryza sativa (japonica
  misc_feature (1)..(154): Homolog of NCBI NO: 18415805 NR Description: lipoic acid synthase -related [Arabidopsis
  misc_feature (1)..(154): Homolog of NCBI NO: 10178283 NR Description: lipoic acid synthase-like protein [Arabidopsis
  misc_feature (1)..(154): Homolog of NCBI NO: 15237763 NR Description: expressed protein [Arabidopsis thaliana]
MSSLIASSATVLPPCGPTALKSCISPPLASQSRTKRASSRRASTMTVRCDVAVKSADSVNAEEAELSAEEIEAKAKVGSSIRVTAPLKVYHVNRVPEVDLEGMEGKLKDYVAVWKGKRISANLPYKVEFFKEVEGRGPVKFVAHLKDDEFEFIDA

SEQ ID NO: 109857 - protein, 111 aa, Zea mays subsp. mays
  misc_feature (1)..(111): Ceres Seq. ID no. 15174387
  misc_feature (1)..(109): Homolog of NCBI NO: 505186 NR Description: ferredoxin-thioredoxin reductase SU A [Spinacia
  misc_feature (1)..(109): Homolog of NCBI NO: 729538 NR Description: Ferredoxin-thioredoxin reductase, variable chain, precursor (FTR-V) (Ferredoxin-thioredoxin reductase subunit A)
  misc_feature (21)..(110): Homolog of NCBI NO: 1362192 NR Description: ferredoxin-thioredoxin reductase (EC 1.18.-.-)
  misc_feature (1)..(110): Homolog of NCBI NO: 14275856 NR Description: subunit A of ferredoxin-thioredoxin-reductase
  misc_feature (21)..(110): Homolog of NCBI NO: 2498397 NR Description: FERREDOXIN-THIOREDOXIN REDUCTASE, VARIABLE CHAIN
  misc_feature (1)..(110): Homolog of NCBI NO: 38346617 NR Description: OSJNBa0074L08.8 [Oryza sativa (japonica
  misc_feature (1)..(110): Homolog of NCBI NO: 18415805 NR Description: lipoic acid synthase -related [Arabidopsis
  misc_feature (1)..(110): Homolog of NCBI NO: 10178283 NR Description: lipoic acid synthase-like protein [Arabidopsis
  misc_feature (1)..(110): Homolog of NCBI NO: 15237763 NR Description: expressed protein [Arabidopsis thaliana]
MTVRCDVAVKSADSVNAEEAELSAEEIEAKAKVGSSIRVTAPLKVYHVNRVPEVDLEGMEGKLKDYVAVWKGKRISANLPYKVEFFKEVEGRGPVKFVAHLKDDEFEFIDA

SEQ ID NO: 109858 - DNA, 844 bp, Zea mays subsp. mays
  misc_feature (1)..(844): Ceres Seq. ID no. 15178852
aaagtggagagtcacaccagcgtcttcgtcttccatcaaactcctctctctaatcgaattgcgccaaagtagggttttgcaatctcaattgaaatagtttttgatcggaaaaaaagaatggtatctgggttaataaacgagaacccaactgtgtacgagagaaaagagcgtcgtgttcgtaccgattccaccaactccgatgagttctccgtagaacctatcgatcagctcgagatttttgatcatataagagatataagagatccagagcatccttattctcttgaacaactcaaagttctaactgaagactctgttgaagttgatgatctcaagagttatgtcagggttacattcactccaacggtggaacattgtagcatggcaaccattattggtctttctatccgggttaaacttatgcgcaaccttcctcctcgttacaagattgatataagggtagcacccggttctcatgcaacagaggctgcactcaataagcaactaaacgacaaggagcgtgtggcggctgcactagagaatccaaacctcgtggagatggttgatgaatgtctatctccatcatttgaatgatgcttgatgctctcaacgtacactatatcataatatgtctctgctcttgtccgcgaagattttgattcactaggactttgtgttcagtttcgatcctgttaaagactgaggatttattcacagaacaatatattgattttgtctcgttgtttccatcttaaatcacattcctttcactactgaacttgtcacacacttgttctcttacacatgtgctccttttgttgccattaaactaacagtttgtagc

SEQ ID NO: 109859 - protein, 158 aa, Zea mays subsp. mays
  misc_feature (1)..(158): Ceres Seq. ID no. 15178853
  misc_feature (36)..(115): Pfam Name: Domain of unknown function DUF59 Pfam Description: Domain of unknown function DUF59
  misc_feature (40)..(153): Homolog of NCBI NO: 31199041 NR Description: ENSANGP00000018494 [Anopheles gambiae]
  misc_feature (37)..(153): Homolog of NCBI NO: 20130185 NR Description: CG30152-PA [Drosophila melanogaster]
  misc_feature (1)..(153): Homolog of NCBI NO: 15232658 NR Description: hypothetical protein [Arabidopsis thaliana]
  misc_feature (1)..(153): Homolog of NCBI NO: 31212973 NR Description: ENSANGP00000014212 [Anopheles gambiae]
  misc_feature (1)..(154): Homolog of NCBI NO: 24662341 NR Description: CG7949-PA [Drosophila melanogaster]
  misc_feature (40)..(157): Homolog of NCBI NO: 38567963 NR Description: OSJNBa0093F12.4 [Oryza sativa (japonica
  misc_feature (1)..(153): Homolog of NCBI NO: 34896898 NR Description: hypothetical protein [Oryza sativa (japonica
  misc_feature (1)..(157): Homolog of NCBI NO: 38347077 NR Description: OSJNBa0006A01.18 [Oryza sativa (japonica
  misc_feature (1)..(158): Homolog of NCBI NO: 15221347 NR Description: expressed protein [Arabidopsis thaliana]
  misc_feature (1)..(158): Homolog of NCBI NO: 28973748 NR Description: unknown protein [Arabidopsis thaliana]
MVSGLINENPTVYERKERRVRTDSTNSDEFSVEPIDQLEIFDHIRDIRDPEHPYSLEQLKVLTEDSVEVDDLKSYVRVTFTPTVEHCSMATIIGLSIRVKLMRNLPPRYKIDIRVAPGSHATEAALNKQLNDKERVAAALENPNLVEMVDECLSPSFE

SEQ ID NO: 109860 - DNA, 968 bp, Zea mays subsp. mays
  misc_feature (1)..(968): Ceres Seq. ID no. 15174024
attggagacacaacacaacacaacaatgagtttctcggtggtcttgttccagaaaccctaccctgcaacaccaaccttacccatcactaccaccttcacaatctcatcatcctcatcatctttcagaccaagaagaagactaccttcttcaaccaatcgcatcttccctgtaaaccaaccaaaacccataaccaaaaatcgccaaaccgaaaccctagccgccagagacacaatcatagacttcggcaagcacaagggcaaaatgctcggctctctgccctcctcttacctcaaatgggtctccaagaatctacgcgcaggagacaccgagtactgggcgaagctcgcagaccaagtgctcgaggacgatgtttataaagacagaattgagtgggagtttgcagagaaaatcctccacggaagtgacgagagtttaaagaagagcagagaagaagaggtaagctctgtttcgatgttgttggagattagcgagaggtttggttgggacaatgaggataagattggttggagcagagtcaacttcgagcttctggggacgagcaagggtggtcggattcctaggttgggagaggatagaggagatatggtgagaaggagagaggtcaagaagaagaagggagaggaggaagatggtagtgggtggaggaggagagagaggcgtgagaggatgaggcagagtcttgggagagggaaggagaatgatgatggcaaaacggtgaataggagtgatcagaagggtgttttgggaaggttaggagaagtagagaagcagattgagccgaagatttatagtccttttccaggacgtgagagtttgttgaagaaagttatgaacaagagaaggtctcaatgacacataaagagtatgttgtgttagtattagtaaaggcagttcctttgtgtatctgaaagatcaaaactttacttattcatctcaagttcaagct

SEQ ID NO: 109861 - protein, 290 aa, Zea mays subsp. mays
  misc_feature (1)..(290): Ceres Seq. ID no. 15174025
  misc_feature (9)..(290): Homolog of NCBI NO: 15223713 NR Description: hypothetical protein [Arabidopsis thaliana]
LETQHNTTMSFSVVLFQKPYPATPTLPITTTFTISSSSSSFRPRRRLPSSTNRIFPVNQPKPITKNRQTETLAARDTIIDFGKHKGKMLGSLPSSYLKWVSKNLRAGDTEYWAKLADQVLEDDVYKDRIEWEFAEKILHGSDESLKKSREEEVSSVSMLLEISERFGWDNEDKIGWSRVNFELLGTSKGGRIPRLGEDRGDMVRRREVKKKKGEEEDGSGWRRRERRERMRQSLGRGKENDDGKTVNRSDQKGVLGRLGEVEKQIEPKIYSPFPGRESLLKKVMNKRRSQ

SEQ ID NO: 109862 - protein, 282 aa, Zea mays subsp. mays
  misc_feature (1)..(282): Ceres Seq. ID no. 15174026
  misc_feature (1)..(282): Homolog of NCBI NO: 15223713 NR Description: hypothetical protein [Arabidopsis thaliana]
MSFSVVLFQKPYPATPTLPITTTFTISSSSSSFRPRRRLPSSTNRIFPVNQPKPITKNRQTETLAARDTIIDFGKHKGKMLGSLPSSYLKWVSKNLRAGDTEYWAKLADQVLEDDVYKDRIEWEFAEKILHGSDESLKKSREEEVSSVSMLLEISERFGWDNEDKIGWSRVNFELLGTSKGGRIPRLGEDRGDMVRRREVKKKKGEEEDGSGWRRRERRERMRQSLGRGKENDDGKTVNRSDQKGVLGRLGEVEKQIEPKIYSPFPGRESLLKKVMNKRRSQ

SEQ ID NO: 109863 - protein, 203 aa, Zea mays subsp. mays
  misc_feature (1)..(203): Ceres Seq. ID no. 15174027
  misc_feature (1)..(203): Homolog of NCBI NO: 15223713 NR Description: hypothetical protein [Arabidopsis thaliana]
MLGSLPSSYLKWVSKNLRAGDTEYWAKLADQVLEDDVYKDRIEWEFAEKILHGSDESLKKSREEEVSSVSMLLEISERFGWDNEDKIGWSRVNFELLGTSKGGRIPRLGEDRGDMVRRREVKKKKGEEEDGSGWRRRERRERMRQSLGRGKENDDGKTVNRSDQKGVLGRLGEVEKQIEPKIYSPFPGRESLLKKVMNKRRSQ

SEQ ID NO: 109864 - DNA, 752 bp, Zea mays subsp. mays
  misc_feature (1)..(752): Ceres Seq. ID no. 15177467
acacaactttcaaagtaagacaacaaaataaccgtctgtttgaaatatttaagctctttgcttatttgaaaatggaggtcgtcagattcgccgtcgccgtcgtttttgtattgttctctgtttcttcgtctaacgctgagcctacaccggcaatgggtggaggcggaggaggaggaggaggagatgctcactcaatgccgtgtatacagaaactgatgccatgtcagccttatcttcactcggtgactcctccacctcccgcgtcgtgttgcctgccgatgaaggagatcgtcgagaaagacgccacgtgtctttgctccgtcttcaacaatgtcgacatgctcaaatcgcttaacctcactaaagaaaacgctcttgttctccctaaagcttgtggcgccaaggctgacatctcgctatgcaaatccagcaatggcaccactacaccttcgacgggaactaccacaactcctccggcatcttccactgggagcggtttcaccggagcttcatcttcttcaacggccaaaccaacaaactcggctcctggcatcaccttcgccggagctagcttcgcatcagctttcatggcattggcaacaatcttcttctgatctactactatattgcattttttctttattcattattacgtaggttttttatatgttgaaaatttgtttggttattaattattattattattatcattatgtactttgaaatttctaataatagtaataatttccagc

SEQ ID NO: 109865 - protein, 203 aa, Zea mays subsp. mays
  misc_feature (1)..(203): Ceres Seq. ID no. 15177468
  misc_feature (67)..(140): Pfam Name: Protease inhibitor/seed storage/LTP family Pfam Description: Protease inhibitor/seed storage/LTP family
  misc_feature (67)..(140): Pfam Name: Protease inhibitor/seed storage/LTP family Pfam Description: Protease inhibitor/seed storage/LTP family
  misc_feature (67)..(171): Homolog of NCBI NO: 30696757 NR Description: protease inhibitor/seed storage/lipid transfer
  misc_feature (67)..(162): Homolog of NCBI NO: 15221585 NR Description: protease inhibitor/seed storage/lipid transfer
  misc_feature (61)..(201): Homolog of NCBI NO: 7484433 NR Description: lipid transfer protein - Norway spruce
  misc_feature (24)..(201): Homolog of NCBI NO: 25553588 NR Description: OJ1656_E11.14 [Oryza sativa (japonica
  misc_feature (60)..(144): Homolog of NCBI NO: 25406275 NR Description: hypothetical protein F6D5.6 [imported] -
  misc_feature (67)..(171): Homolog of NCBI NO: 30696757 NR Description: protease inhibitor/seed storage/lipid transfer
  misc_feature (61)..(201): Homolog of NCBI NO: 7484433 NR Description: lipid transfer protein - Norway spruce
  misc_feature (60)..(144): Homolog of NCBI NO: 25406275 NR Description: hypothetical protein F6D5.6 [imported] -
  misc_feature (24)..(203): Homolog of NCBI NO: 15221052 NR Description: lipid transfer protein family [Arabidopsis
  misc_feature (24)..(162): Homolog of NCBI NO: 18410388 NR Description: lipid transfer protein family [Arabidopsis
  misc_feature (24)..(162): Homolog of NCBI NO: 21593596 NR Description: lipid transfer protein, putative [Arabidopsis
  misc_feature (24)..(140): Homolog of NCBI NO: 25406276 NR Description: probable lipid transfer protein F6D5.5
  misc_feature (60)..(163): Homolog of NCBI NO: 15219496 NR Description: protease inhibitor/seed storage/lipid transfer
  misc_feature (24)..(201): Homolog of NCBI NO: 25553588 NR Description: OJ1656_E11.14 [Oryza sativa (japonica
  misc_feature (67)..(162): Homolog of NCBI NO: 15221585 NR Description: protease inhibitor/seed storage/lipid transfer
  misc_feature (60)..(163): Homolog of NCBI NO: 15219496 NR Description: protease inhibitor/seed storage/lipid transfer
  misc_feature (24)..(140): Homolog of NCBI NO: 25406276 NR Description: probable lipid transfer protein F6D5.5
  misc_feature (24)..(162): Homolog of NCBI NO: 21593596 NR Description: lipid transfer protein, putative [Arabidopsis
  misc_feature (24)..(162): Homolog of NCBI NO: 18410388 NR Description: lipid transfer protein family [Arabidopsis
  misc_feature (24)..(203): Homolog of NCBI NO: 15221052 NR Description: lipid transfer protein family [Arabidopsis
TTFKVRQQNNRLFEIFKLFAYLKMEVVRFAVAVVFVLFSVSSSNAEPTPAMGGGGGGGGGDAHSMPCIQKLMPCQPYLHSVTPPPPASCCLPMKEIVEKDATCLCSVFNNVDMLKSLNLTKENALVLPKACGAKADISLCKSSNGTTTPSTGTTTTPPASSTGSGFTGASSSSTAKPTNSAPGITFAGASFASAFMALATIFF

SEQ ID NO: 109866 - protein, 180 aa, Zea mays subsp. mays
  misc_feature (1)..(180): Ceres Seq. ID no. 15177469
  misc_feature (44)..(117): Pfam Name: Protease inhibitor/seed storage/LTP family Pfam Description: Protease inhibitor/seed storage/LTP family
  misc_feature (44)..(117): Pfam Name: Protease inhibitor/seed storage/LTP family Pfam Description: Protease inhibitor/seed storage/LTP family
  misc_feature (44)..(148): Homolog of NCBI NO: 30696757 NR Description: protease inhibitor/seed storage/lipid transfer
  misc_feature (44)..(139): Homolog of NCBI NO: 15221585 NR Description: protease inhibitor/seed storage/lipid transfer
  misc_feature (38)..(178): Homolog of NCBI NO: 7484433 NR Description: lipid transfer protein - Norway spruce
  misc_feature (1)..(178): Homolog of NCBI NO: 25553588 NR Description: OJ1656_E11.14 [Oryza sativa (japonica
  misc_feature (37)..(121): Homolog of NCBI NO: 25406275 NR Description: hypothetical protein F6D5.6 [imported] -
  misc_feature (44)..(148): Homolog of NCBI NO: 30696757 NR Description: protease inhibitor/seed storage/lipid transfer
  misc_feature (38)..(178): Homolog of NCBI NO: 7484433 NR Description: lipid transfer protein - Norway spruce
  misc_feature (37)..(121): Homolog of NCBI NO: 25406275 NR Description: hypothetical protein F6D5.6 [imported] -
  misc_feature (1)..(180): Homolog of NCBI NO: 15221052 NR Description: lipid transfer protein family [Arabidopsis
  misc_feature (1)..(139): Homolog of NCBI NO: 18410388 NR Description: lipid transfer protein family [Arabidopsis
  misc_feature (1)..(139): Homolog of NCBI NO: 21593596 NR Description: lipid transfer protein, putative [Arabidopsis
  misc_feature (1)..(117): Homolog of NCBI NO: 25406276 NR Description: probable lipid transfer protein F6D5.5
  misc_feature (37)..(140): Homolog of NCBI NO: 15219496 NR Description: protease inhibitor/seed storage/lipid transfer
  misc_feature (1)..(178): Homolog of NCBI NO: 25553588 NR Description: OJ1656_E11.14 [Oryza sativa (japonica
  misc_feature (44)..(139): Homolog of NCBI NO: 15221585 NR Description: protease inhibitor/seed storage/lipid transfer
  misc_feature (37)..(140): Homolog of NCBI NO: 15219496 NR Description: protease inhibitor/seed storage/lipid transfer
  misc_feature (1)..(117): Homolog of NCBI NO: 25406276 NR Description: probable lipid transfer protein F6D5.5
  misc_feature (1)..(139): Homolog of NCBI NO: 21593596 NR Description: lipid transfer protein, putative [Arabidopsis
  misc_feature (1)..(139): Homolog of NCBI NO: 18410388 NR Description: lipid transfer protein family [Arabidopsis
  misc_feature (1)..(180): Homolog of NCBI NO: 15221052 NR Description: lipid transfer protein family [Arabidopsis
MEVVRFAVAVVFVLFSVSSSNAEPTPAMGGGGGGGGGDAHSMPCIQKLMPCQPYLHSVTPPPPASCCLPMKEIVEKDATCLCSVFNNVDMLKSLNLTKENALVLPKACGAKADISLCKSSNGTTTPSTGTTTTPPASSTGSGFTGASSSSTAKPTNSAPGITFAGASFASAFMALATIFF

SEQ ID NO: 109867 - protein, 153 aa, Zea mays subsp. mays
  misc_feature (1)..(153): Ceres Seq. ID no. 15177470
  misc_feature (17)..(90): Pfam Name: Protease inhibitor/seed storage/LTP family Pfam Description: Protease inhibitor/seed storage/LTP family
  misc_feature (17)..(90): Pfam Name: Protease inhibitor/seed storage/LTP family Pfam Description: Protease inhibitor/seed storage/LTP family
  misc_feature (17)..(121): Homolog of NCBI NO: 30696757 NR Description: protease inhibitor/seed storage/lipid transfer
  misc_feature (17)..(112): Homolog of NCBI NO: 15221585 NR Description: protease inhibitor/seed storage/lipid transfer
  misc_feature (11)..(151): Homolog of NCBI NO: 7484433 NR Description: lipid transfer protein - Norway spruce
  misc_feature (1)..(151): Homolog of NCBI NO: 25553588 NR Description: OJ1656_E11.14 [Oryza sativa (japonica
  misc_feature (10)..(94): Homolog of NCBI NO: 25406275 NR Description: hypothetical protein F6D5.6 [imported] -
  misc_feature (17)..(121): Homolog of NCBI NO: 30696757 NR Description: protease inhibitor/seed storage/lipid transfer
  misc_feature (11)..(151): Homolog of NCBI NO: 7484433 NR Description: lipid transfer protein - Norway spruce
  misc_feature (10)..(94): Homolog of NCBI NO: 25406275 NR Description: hypothetical protein F6D5.6 [imported] -
  misc_feature (1)..(153): Homolog of NCBI NO: 15221052 NR Description: lipid transfer protein family [Arabidopsis
  misc_feature (1)..(112): Homolog of NCBI NO: 18410388 NR Description: lipid transfer protein family [Arabidopsis
  misc_feature (1)..(112): Homolog of NCBI NO: 21593596 NR Description: lipid transfer protein, putative [Arabidopsis
  misc_feature (1)..(90): Homolog of NCBI NO: 25406276 NR Description: probable lipid transfer protein F6D5.5
  misc_feature (10)..(113): Homolog of NCBI NO: 15219496 NR Description: protease inhibitor/seed storage/lipid transfer
  misc_feature (1)..(151): Homolog of NCBI NO: 25553588 NR Description: OJ1656_E11.14 [Oryza sativa (japonica
  misc_feature (17)..(112): Homolog of NCBI NO: 15221585 NR Description: protease inhibitor/seed storage/lipid transfer
  misc_feature (10)..(113): Homolog of NCBI NO: 15219496 NR Description: protease inhibitor/seed storage/lipid transfer
  misc_feature (1)..(90): Homolog of NCBI NO: 25406276 NR Description: probable lipid transfer protein F6D5.5
  misc_feature (1)..(112): Homolog of NCBI NO: 21593596 NR Description: lipid transfer protein, putative [Arabidopsis
  misc_feature (1)..(112): Homolog of NCBI NO: 18410388 NR Description: lipid transfer protein family [Arabidopsis
  misc_feature (1)..(153): Homolog of NCBI NO: 15221052 NR Description: lipid transfer protein family [Arabidopsis
MGGGGGGGGGDAHSMPCIQKLMPCQPYLHSVTPPPPASCCLPMKEIVEKDATCLCSVFNNVDMLKSLNLTKENALVLPKACGAKADISLCKSSNGTTTPSTGTTTTPPASSTGSGFTGASSSSTAKPTNSAPGITFAGASFASAFMALATIFF

SEQ ID NO: 109868 - DNA, 679 bp, Zea mays subsp. mays
  misc_feature (1)..(679): Ceres Seq. ID no. 15177923
aactacgtttcctcatttccttggccaaatctctctctctctctctctctctcatcaacaatggcgaaatcagcggcgacggcggcttcctccctcgtgcaaaccctcaggcgctacatcaagaagccatgggagatcaccggaccttgcgcccacccggagtacctcgaatccgttcccaaggcgacggagtatcgtatccgatgccccgcaacgatcgatcaggaggcgatcgtgcctacggcggatccggagaacgtgtacaacatcttgtaccacgcgagggatcagaggcgaaaccgcccgccgattaggcgatacttgttgaagaaggaggacgtggtggagatgatgaatgagaagaagacgttcgaggagtcggacttccctagggtttacttgacgaccactgttgaggaggatgagaacgctcgtggcggaggctacgagtaacaaacaggtttttgctagtctcgtgtcttttctcctgtaatctgctgtggtgggagacggactgcgtgtgataatatctcactaccgagaaaaatccttactagttttcattttatctaataaaggctgtttatgtactacaaaacacttgatgttccttcacaggaactggattgttgttcagttgtattccctttgttcactcacataaatatttttatgtcct

SEQ ID NO: 109869 - protein, 150 aa, Zea mays subsp. mays
  misc_feature (1)..(150): Ceres Seq. ID no. 15177924
  misc_feature (2)..(150): Homolog of NCBI NO: 34909786 NR Description: P0512C01.35 [Oryza sativa (japonica
  misc_feature (21)..(150): Homolog of NCBI NO: 21592443 NR Description: unknown [Arabidopsis thaliana]
  misc_feature (21)..(150): Homolog of NCBI NO: 15241510 NR Description: expressed protein [Arabidopsis thaliana]
NYVSSFPWPNLSLSLSLSSTMAKSAATAASSLVQTLRRYIKKPWEITGPCAHPEYLESVPKATEYRIRCPATIDQEAIVPTADPENVYNILYHARDQRRNRPPIRRYLLKKEDVVEMMNEKKTFEESDFPRVYLTTTVEEDENARGGGYE

SEQ ID NO: 109870 - protein, 130 aa, Zea mays subsp. mays
  misc_feature (1)..(130): Ceres Seq. ID no. 15177925
  misc_feature (1)..(130): Homolog of NCBI NO: 34909786 NR Description: P0512C01.35 [Oryza sativa (japonica
  misc_feature (1)..(130): Homolog of NCBI NO: 21592443 NR Description: unknown [Arabidopsis thaliana]
  misc_feature (1)..(130): Homolog of NCBI NO: 15241510 NR Description: expressed protein [Arabidopsis thaliana]
MAKSAATAASSLVQTLRRYIKKPWEITGPCAHPEYLESVPKATEYRIRCPATIDQEAIVPTADPENVYNILYHARDQRRNRPPIRRYLLKKEDVVEMMNEKKTFEESDFPRVYLTTTVEEDENARGGGYE

SEQ ID NO: 109871 - protein, 108 aa, Zea mays subsp. mays
  misc_feature (1)..(108): Ceres Seq. ID no. 15177926
TTFPHFLGQISLSLSLSHQQWRNQRRRRLPPSCKPSGATSRSHGRSPDLAPTRSTSNPFPRRRSIVSDAPQRSIRRRSCLRRIRRTCTTSCTTRGIRGETARRLGDTC

SEQ ID NO: 109872 - DNA, 892 bp, Zea mays subsp. mays
  misc_feature (1)..(892): Ceres Seq. ID no. 15178133
aactcgaaaatggagagaggcctccttgtaggagtaagataactaaaaacacctttcgtcactctacgccgcttctctctcttaaattatacttgtccattgattccaagcatgtttctcttctgtatgcgaaccaaaatctcagaaaccaccaactccttgttctaatatggcttcacacatcttaccaacatcactatcaattttagaaactgacaaaggtcgatcctttacaatcaatctgttccacacaagaaatgcgtcgttgatcatcactcccatgaaaagtttccagattcgaagaagacgaaaccagataatagcgtttgcgttagacacaggatcttcttcttctgttcctggaggaggaggagaacgacaagagattaatgaagacagaacaggtctaggtagcactagattaggcagaatagcgattgccttaggcagacagcttcttttgaagataaactctgctagaaaaaacttccccatgaagatattcttactgcttcttggtttctacactgctaatgcattagccaccattcttggccaaaccggtgactgggacgtgcttgtggcaggcatcgtcgtggctgctatcgaagggatcggtatgcttatgtacaagaagaagaagaagccatcttcatcttcttcttctgggaagaagttgcagtcttttgttgtgtttatgaatttctggaaagctggtgtttgtttgggtctctttgttgatgctttcaagcttggtagttgaatataaaacaagcttttcctttcttctagcatatgagttaatgtttgtgtatagagagagcctttgattgtatcagttaaaagagtttcagttttgttggaatatatatatatataactaagataaaag

SEQ ID NO: 109873 - protein, 197 aa, Zea mays subsp. mays
  misc_feature (1)..(197): Ceres Seq. ID no. 15178134
  misc_feature (130)..(197): Pfam Name: Protein of unknown function (DUF565) Pfam Description: Protein of unknown function (DUF565)
  misc_feature (73)..(197): Homolog of NCBI NO: 6136502 NR Description: Ycf20-like protein
  misc_feature (1)..(197): Homolog of NCBI NO: 21593789 NR Description: antigen receptor, putative [Arabidopsis thaliana]
  misc_feature (112)..(197): Homolog of NCBI NO: 7484292 NR Description: hypothetical protein ORF96 - red alga (Cyanidium
  misc_feature (80)..(197): Homolog of NCBI NO: 11466439 NR Description: hypothetical chloroplast RF20 [Mesostigma viride]
  misc_feature (89)..(184): Homolog of NCBI NO: 28394796 NR Description: putative antigen receptor [Arabidopsis lyrata]
  misc_feature (89)..(184): Homolog of NCBI NO: 28436400 NR Description: putative antigen receptor [Arabidopsis thaliana]
  misc_feature (37)..(194): Homolog of NCBI NO: 15230144 NR Description: expressed protein [Arabidopsis thaliana]
  misc_feature (114)..(197): Homolog of NCBI NO: 11465680 NR Description: ORF20 [Porphyra purpurea]
  misc_feature (112)..(197): Homolog of NCBI NO: 11465590 NR Description: unknown [Cyanidium caldarium]
  misc_feature (1)..(197): Homolog of NCBI NO: 18408276 NR Description: antigen receptor -related [Arabidopsis thaliana]
MASHILPTSLSILETDKGRSFTINLFHTRNASLIITPMKSFQIRRRRNQIIAFALDTGSSSSVPGGGGERQEINEDRTGLGSTRLGRIAIALGRQLLLKINSARKNFPMKIFLLLLGFYTANALATILGQTGDWDVLVAGIVVAAIEGIGMLMYKKKKKPSSSSSSGKKLQSFVVFMNFWKAGVCLGLFVDAFKLGS

SEQ ID NO: 109874 - protein, 160 aa, Zea mays subsp. mays
  misc_feature (1)..(160): Ceres Seq. ID no. 15178135
  misc_feature (93)..(160): Pfam Name: Protein of unknown function (DUF565) Pfam Description: Protein of unknown function (DUF565)
  misc_feature (75)..(160): Homolog of NCBI NO: 11465590 NR Description: unknown [Cyanidium caldarium]
  misc_feature (75)..(160): Homolog of NCBI NO: 7484292 NR Description: hypothetical protein ORF96 - red alga (Cyanidium
  misc_feature (77)..(160): Homolog of NCBI NO: 11465680 NR Description: ORF20 [Porphyra purpurea]
  misc_feature (43)..(160): Homolog of NCBI NO: 11466439 NR Description: hypothetical chloroplast RF20 [Mesostigma viride]
  misc_feature (1)..(157): Homolog of NCBI NO: 15230144 NR Description: expressed protein [Arabidopsis thaliana]
  misc_feature (52)..(147): Homolog of NCBI NO: 28394796 NR Description: putative antigen receptor [Arabidopsis lyrata]
  misc_feature (52)..(147): Homolog of NCBI NO: 28436400 NR Description: putative antigen receptor [Arabidopsis thaliana]
  misc_feature (36)..(160): Homolog of NCBI NO: 6136502 NR Description: Ycf20-like protein
  misc_feature (1)..(160): Homolog of NCBI NO: 21593789 NR Description: antigen receptor, putative [Arabidopsis thaliana]
  misc_feature (1)..(160): Homolog of NCBI NO: 18408276 NR Description: antigen receptor -related [Arabidopsis thaliana]
MKSFQIRRRRNQIIAFALDTGSSSSVPGGGGERQEINEDRTGLGSTRLGRIAIALGRQLLLKINSARKNFPMKIFLLLLGFYTANALATILGQTGDWDVLVAGIVVAAIEGIGMLMYKKKKKPSSSSSSGKKLQSFVVFMNFWKAGVCLGLFVDAFKLGS

SEQ ID NO: 109875 - DNA, 697 bp, Zea mays subsp. mays
  misc_feature (1)..(697): Ceres Seq. ID no. 15178291
agttttgggttagtaacgactttgacacggtgtttcggttctgctccgctcctcccaaatcgccgagtccacctgcgagagtcgatctccgttaattagacatggctatgaccatcgaagtacttgctggacttgccttcatgttttcatctagtatcctcctacagatcctggcgtgtgcactatatagtaactggtggccaatgctttcagcactcatgtatgtggttgtgcctatgccttgcatgttctttggaggaggctcaacacaattcctaattagtcgagatggtggaggatggatagatgcagcaaagttcttgacaggagcatcaacggtaggaagcctggcgattccaatcatattaaggcatgcaggaatgatcgagacgggtgcaatgctcatagagttcacatcgttcttcatattcatctgcactgtcatgtgttttcaccgagctagtctcgatgattatgattggtaacagatacgttgttggtggtgatttactaattggtcatgatcaaaagagaggagagagtttaagtgtgaagaagatgagttaaccatgaacccgagatcaggtgttgaagaaagttatcttctttctcttcttttctccctctttgtacaactttgtattaatcagtgtctgtaaaaatgttttattcattataatgaaacatgatgcttgtg

SEQ ID NO: 109876 - protein, 127 aa, Zea mays subsp. mays
  misc_feature (1)..(127): Ceres Seq. ID no. 15178292
  misc_feature (1)..(117): Homolog of NCBI NO: 40738696 NR Description: hypothetical protein AN6546.2 [Aspergillus
  misc_feature (1)..(127): Homolog of NCBI NO: 32413038 NR Description: hypothetical protein [Neurospora crassa]
  misc_feature (5)..(117): Homolog of NCBI NO: 38103616 NR Description: hypothetical protein MG04054.4 [Magnaporthe
  misc_feature (8)..(115): Homolog of NCBI NO: 25518386 NR Description: hypothetical protein F5D14.18 - Arabidopsis
  misc_feature (8)..(125): Homolog of NCBI NO: 18398420 NR Description: expressed protein [Arabidopsis thaliana]
  misc_feature (8)..(127): Homolog of NCBI NO: 21554354 NR Description: unknown [Arabidopsis thaliana]
  misc_feature (46)..(127): Homolog of NCBI NO: 34905898 NR Description: P0458E05.25 [Oryza sativa (japonica
  misc_feature (14)..(127): Homolog of NCBI NO: 18399269 NR Description: expressed protein [Arabidopsis thaliana]
  misc_feature (1)..(127): Homolog of NCBI NO: 12322900 NR Description: unknown protein; 72859-71336 [Arabidopsis
  misc_feature (1)..(127): Homolog of NCBI NO: 16648828 NR Description: AT3g11530/F24K9_21 [Arabidopsis thaliana]
MAMTIEVLAGLAFMFSSSILLQILACALYSNWWPMLSALMYVVVPMPCMFFGGGSTQFLISRDGGGWIDAAKFLTGASTVGSLAIPIILRHAGMIETGAMLIEFTSFFIFICTVMCFHRASLDDYDW

SEQ ID NO: 109877 - protein, 125 aa, Zea mays subsp. mays
  misc_feature (1)..(125): Ceres Seq. ID no. 15178293
  misc_feature (1)..(115): Homolog of NCBI NO: 40738696 NR Description: hypothetical protein AN6546.2 [Aspergillus
  misc_feature (1)..(125): Homolog of NCBI NO: 32413038 NR Description: hypothetical protein [Neurospora crassa]
  misc_feature (3)..(115): Homolog of NCBI NO: 38103616 NR Description: hypothetical protein MG04054.4 [Magnaporthe
  misc_feature (6)..(113): Homolog of NCBI NO: 25518386 NR Description: hypothetical protein F5D14.18 - Arabidopsis
  misc_feature (6)..(123): Homolog of NCBI NO: 18398420 NR Description: expressed protein [Arabidopsis thaliana]
  misc_feature (6)..(125): Homolog of NCBI NO: 21554354 NR Description: unknown [Arabidopsis thaliana]
  misc_feature (44)..(125): Homolog of NCBI NO: 34905898 NR Description: P0458E05.25 [Oryza sativa (japonica
  misc_feature (12)..(125): Homolog of NCBI NO: 18399269 NR Description: expressed protein [Arabidopsis thaliana]
  misc_feature (1)..(125): Homolog of NCBI NO: 12322900 NR Description: unknown protein; 72859-71336 [Arabidopsis
  misc_feature (1)..(125): Homolog of NCBI NO: 16648828 NR Description: AT3g11530/F24K9_21 [Arabidopsis thaliana]
MTIEVLAGLAFMFSSSILLQILACALYSNWWPMLSALMYVVVPMPCMFFGGGSTQFLISRDGGGWIDAAKFLTGASTVGSLAIPIILRHAGMIETGAMLIEFTSFFIFICTVMCFHRASLDDYDW

SEQ ID NO: 109878 - protein, 114 aa, Zea mays subsp. mays
  misc_feature (1)..(114): Ceres Seq. ID no. 15178294
  misc_feature (1)..(104): Homolog of NCBI NO: 40738696 NR Description: hypothetical protein AN6546.2 [Aspergillus
  misc_feature (1)..(114): Homolog of NCBI NO: 32413038 NR Description: hypothetical protein [Neurospora crassa]
  misc_feature (1)..(104): Homolog of NCBI NO: 38103616 NR Description: hypothetical protein MG04054.4 [Magnaporthe
  misc_feature (1)..(102): Homolog of NCBI NO: 25518386 NR Description: hypothetical protein F5D14.18 - Arabidopsis
  misc_feature (1)..(112): Homolog of NCBI NO: 18398420 NR Description: expressed protein [Arabidopsis thaliana]
  misc_feature (1)..(114): Homolog of NCBI NO: 21554354 NR Description: unknown [Arabidopsis thaliana]
  misc_feature (33)..(114): Homolog of NCBI NO: 34905898 NR Description: P0458E05.25 [Oryza sativa (japonica
  misc_feature (1)..(114): Homolog of NCBI NO: 18399269 NR Description: expressed protein [Arabidopsis thaliana]
  misc_feature (1)..(114): Homolog of NCBI NO: 12322900 NR Description: unknown protein; 72859-71336 [Arabidopsis
  misc_feature (1)..(114): Homolog of NCBI NO: 16648828 NR Description: AT3g11530/F24K9_21 [Arabidopsis thaliana]
MFSSSILLQILACALYSNWWPMLSALMYVVVPMPCMFFGGGSTQFLISRDGGGWIDAAKFLTGASTVGSLAIPIILRHAGMIETGAMLIEFTSFFIFICTVMCFHRASLDDYDW

SEQ ID NO: 109879 - DNA, 1250 bp, Zea mays subsp. mays
  misc_feature (1)..(1250): Ceres Seq. ID no. 15179467
ttggcaccgttactaatctaacatctctctctctctctctctggaactctcatcaccttatcatctcccgtaacaaaaccaaaatgttcctcttaaagacatggagatcaaccgctttcgggatttatggctatatgaatttcaccaagactggtttcctagaccattcaaagaagttcaaacctgaagatatgcagatacaaatccaaggaaagaactgtgtggtcactggagctaactctggtattggttacgccgttgctgaaggtcttgcttcacgtggagcaactgtttacatggtgtgtcggaacaaggaaagaggagaggaggctctttctaagattcaaaactctacaggaaaccagaatgtctaccttgaagtttgtgatttgtcttctgttaatgatataaagtcatttgcttcgagttttgcttcaaaggatgttccggttcatgtgctggttaataacgccggtttgcttgagaacaaacgaacgactacacctgaaggattcgagttgaactacgcggtgaatgtacttgggacatacacaatgacagagctgatgcttccgctgttggagaaagcgtcgcctgactccaaagtcatcaccgtctcctctggtggaatgtacacgtcgccacttacaacagatcttcagtttagtggtgaaaagttcgatggagtgttacaatacgcacggaataaaagaatccaggtggctctgacagaaaaatgggctgataagtacaagaacaaaggcataggtttctactcaatgcaccctggctgggctgagacacctggtgtcgccaggagtttgcccagtttcaaagaatcgttctctggtaagcttagaacgagcgaagaaggagcagacacagttgtttggctagcacttcagcctaaagagaagctggtctctggtgcattctatttcgatagagcagaagcaccaaaacatctgacgcttgcaggtacaagcaagtctcatgaccttatagactctgtcattgacacactgcattccatggcagctcttgatccttaaaaactatatcttctacatgggttttttctcgagaataaatgtgatcgatctctggtaaatatcacaatggaataagattcaaatattaaactttcctattctttccttggaaagtattattgtgctggatgattacatagtatcagaacataagaaatacacatggtttttaacattggcatagtagccatgttatgg

SEQ ID NO: 109880 - protein, 349 aa, Zea mays subsp. mays
  misc_feature (1)..(349): Ceres Seq. ID no. 15179468
  misc_feature (94)..(314): Homolog of NCBI NO: 37361908 NR Description: LRRGT00111 [Rattus norvegicus]
  misc_feature (66)..(314): Homolog of NCBI NO: 34866146 NR Description: similar to M42C60 [Rattus norvegicus]
  misc_feature (66)..(314): Homolog of NCBI NO: 6630624 NR Description: M42C60 [Mus musculus]
  misc_feature (66)..(314): Homolog of NCBI NO: 34395789 NR Description: Retinol dehydrogenase 11 (Retinal reductase 1) (Prostate short-chain dehydrogenase/reductase 1) short-chain dehydrogenase/reductase 1) (HCV core-binding protein
  misc_feature (66)..(314): Homolog of NCBI NO: 20070798 NR Description: androgen-regulated short-chain
  misc_feature (66)..(314): Homolog of NCBI NO: 20070272 NR Description: androgen-regulated short-chain
  misc_feature (70)..(319): Homolog of NCBI NO: 24586330 NR Description: CG30495-PA [Drosophila melanogaster]
  misc_feature (110)..(311): Homolog of NCBI NO: 13375997 NR Description: hypothetical protein FLJ13639 [Homo sapiens]
  misc_feature (31)..(330): Homolog of NCBI NO: 34106252 NR Description: short chain dehydrogenase/reductase [Danio rerio]
  misc_feature (28)..(349): Homolog of NCBI NO: 15234031 NR Description: short-chain dehydrogenase/reductase family
GTVTNLTSLSLSLWNSHHLIISRNKTKMFLLKTWRSTAFGIYGYMNFTKTGFLDHSKKFKPEDMQIQIQGKNCVVTGANSGIGYAVAEGLASRGATVYMVCRNKERGEEALSKIQNSTGNQNVYLEVCDLSSVNDIKSFASSFASKDVPVHVLVNNAGLLENKRTTTPEGFELNYAVNVLGTYTMTELMLPLLEKASPDSKVITVSSGGMYTSPLTTDLQFSGEKFDGVLQYARNKRIQVALTEKWADKYKNKGIGFYSMHPGWAETPGVARSLPSFKESFSGKLRTSEEGADTVVWLALQPKEKLVSGAFYFDRAEAPKHLTLAGTSKSHDLIDSVIDTLHSMAALDP

SEQ ID NO: 109881 - protein, 322 aa, Zea mays subsp. mays
  misc_feature (1)..(322): Ceres Seq. ID no. 15179469
  misc_feature (67)..(287): Homolog of NCBI NO: 37361908 NR Description: LRRGT00111 [Rattus norvegicus]
  misc_feature (39)..(287): Homolog of NCBI NO: 34866146 NR Description: similar to M42C60 [Rattus norvegicus]
  misc_feature (39)..(287): Homolog of NCBI NO: 6630624 NR Description: M42C60 [Mus musculus]
  misc_feature (39)..(287): Homolog of NCBI NO: 34395789 NR Description: Retinol dehydrogenase 11 (Retinal reductase 1) (Prostate short-chain dehydrogenase/reductase 1) short-chain dehydrogenase/reductase 1) (HCV core-binding protein
  misc_feature (39)..(287): Homolog of NCBI NO: 20070798 NR Description: androgen-regulated short-chain
  misc_feature (39)..(287): Homolog of NCBI NO: 20070272 NR Description: androgen-regulated short-chain
  misc_feature (43)..(292): Homolog of NCBI NO: 24586330 NR Description: CG30495-PA [Drosophila melanogaster]
  misc_feature (83)..(284): Homolog of NCBI NO: 13375997 NR Description: hypothetical protein FLJ13639 [Homo sapiens]
  misc_feature (4)..(303): Homolog of NCBI NO: 34106252 NR Description: short chain dehydrogenase/reductase [Danio rerio]
  misc_feature (1)..(322): Homolog of NCBI NO: 15234031 NR Description: short-chain dehydrogenase/reductase family
MFLLKTWRSTAFGIYGYMNFTKTGFLDHSKKFKPEDMQIQIQGKNCVVTGANSGIGYAVAEGLASRGATVYMVCRNKERGEEALSKIQNSTGNQNVYLEVCDLSSVNDIKSFASSFASKDVPVHVLVNNAGLLENKRTTTPEGFELNYAVNVLGTYTMTELMLPLLEKASPDSKVITVSSGGMYTSPLTTDLQFSGEKFDGVLQYARNKRIQVALTEKWADKYKNKGIGFYSMHPGWAETPGVARSLPSFKESFSGKLRTSEEGADTVVWLALQPKEKLVSGAFYFDRAEAPKHLTLAGTSKSHDLIDSVIDTLHSMAALDP

SEQ ID NO: 109882 - protein, 305 aa, Zea mays subsp. mays
  misc_feature (1)..(305): Ceres Seq. ID no. 15179470
  misc_feature (50)..(270): Homolog of NCBI NO: 37361908 NR Description: LRRGT00111 [Rattus norvegicus]
  misc_feature (22)..(270): Homolog of NCBI NO: 34866146 NR Description: similar to M42C60 [Rattus norvegicus]
  misc_feature (22)..(270): Homolog of NCBI NO: 6630624 NR Description: M42C60 [Mus musculus]
  misc_feature (22)..(270): Homolog of NCBI NO: 20070798 NR Description: androgen-regulated short-chain
  misc_feature (22)..(270): Homolog of NCBI NO: 34395789 NR Description: Retinol dehydrogenase 11 (Retinal reductase 1) (Prostate short-chain dehydrogenase/reductase 1) short-chain dehydrogenase/reductase 1) (HCV core-binding protein
  misc_feature (22)..(270): Homolog of NCBI NO: 20070272 NR Description: androgen-regulated short-chain
  misc_feature (26)..(275): Homolog of NCBI NO: 24586330 NR Description: CG30495-PA [Drosophila melanogaster]
  misc_feature (66)..(267): Homolog of NCBI NO: 13375997 NR Description: hypothetical protein FLJ13639 [Homo sapiens]
  misc_feature (1)..(286): Homolog of NCBI NO: 34106252 NR Description: short chain dehydrogenase/reductase [Danio rerio]
  misc_feature (1)..(305): Homolog of NCBI NO: 15234031 NR Description: short-chain dehydrogenase/reductase family
MNFTKTGFLDHSKKFKPEDMQIQIQGKNCVVTGANSGIGYAVAEGLASRGATVYMVCRNKERGEEALSKIQNSTGNQNVYLEVCDLSSVNDIKSFASSFASKDVPVHVLVNNAGLLENKRTTTPEGFELNYAVNVLGTYTMTELMLPLLEKASPDSKVITVSSGGMYTSPLTTDLQFSGEKFDGVLQYARNKRIQVALTEKWADKYKNKGIGFYSMHPGWAETPGVARSLPSFKESFSGKLRTSEEGADTVVWLALQPKEKLVSGAFYFDRAEAPKHLTLAGTSKSHDLIDSVIDTLHSMAALDP

SEQ ID NO: 109883 - DNA, 651 bp, Zea mays subsp. mays
  misc_feature (1)..(651): Ceres Seq. ID no. 15177688
aacaacacacagagaaattttcttggtggtctctccaatggcattctcagcaactctgtctcagctttcttctctttcgacaatctcctcctcactcccactttcttctagaatcttccctcttcgatctcagactcatttcagagtcaaagcagaggcagagaaacagagcacgcaggctaaatccgaaggggaagcttcaccagctgcaaccaaaacccctaaaactcttcccaagaaaccggtttactcgatgaagaagggtcaaatcgttcgtgtagacaaggagaagtacctcaacagcatcaattacttatcagttggtcatcctcctttctacaaaggacttgattacatctacgaagatcgcggcgaggtactagacattcgtgtctttgagacaggagagtatgcacttgttggatgggttggtatcccaaccgcaccggcttggctaccaacagatatgctcatcaagtctgagaaacttgtttacgagagactatagagtcttcaagaagatcatgtcttcaagagtttaacaagtatcataatgttaccatagtcaaaaaaaaaaaaactgttgtgtaatgtaaaaaatgtaatgagacttgagttttacaataatgcatctaccgtagttgcatccct

SEQ ID NO: 109884 - protein, 168 aa, Zea mays subsp. mays
  misc_feature (1)..(168): Ceres Seq. ID no. 15177689
  misc_feature (52)..(157): Homolog of NCBI NO: 34905786 NR Description: P0401G10.19 [Oryza sativa (japonica
  misc_feature (13)..(168): Homolog of NCBI NO: 18410719 NR Description: expressed protein [Arabidopsis thaliana]
TTHREIFLVVSPMAFSATLSQLSSLSTISSSLPLSSRIFPLRSQTHFRVKAEAEKQSTQAKSEGEASPAATKTPKTLPKKPVYSMKKGQIVRVDKEKYLNSINYLSVGHPPFYKGLDYIYEDRGEVLDIRVFETGEYALVGWVGIPTAPAWLPTDMLIKSEKLVYERL

SEQ ID NO: 109885 - protein, 156 aa, Zea mays subsp. mays
  misc_feature (1)..(156): Ceres Seq. ID no. 15177690
  misc_feature (40)..(145): Homolog of NCBI NO: 34905786 NR Description: P0401G10.19 [Oryza sativa (japonica
  misc_feature (1)..(156): Homolog of NCBI NO: 18410719 NR Description: expressed protein [Arabidopsis thaliana]
MAFSATLSQLSSLSTISSSLPLSSRIFPLRSQTHFRVKAEAEKQSTQAKSEGEASPAATKTPKTLPKKPVYSMKKGQIVRVDKEKYLNSINYLSVGHPPFYKGLDYIYEDRGEVLDIRVFETGEYALVGWVGIPTAPAWLPTDMLIKSEKLVYERL

SEQ ID NO: 109886 - protein, 84 aa, Zea mays subsp. mays
  misc_feature (1)..(84): Ceres Seq. ID no. 15177691
QHTEKFSWWSLQWHSQQLCLSFLLFRQSPPHSHFLLESSLFDLRLISESKQRQRNRARRLNPKGKLHQLQPKPLKLFPRNRFTR

SEQ ID NO: 109887 - DNA, 721 bp, Zea mays subsp. mays
  misc_feature (1)..(721): Ceres Seq. ID no. 15179445
aaggctgcaaatcgggatttggagaaaccctagaaaccggcgagagaggtgaaatctttggggtcgagacgatgaagagcgactggtttaacttgcatcagattgcgagaaactcattcatagctacatcaaccgtgtacgcttccaccgaattcaactttgatcgaagaagcttctgcttttttgcaccagacagatctggctttgtcgtgttgaaatcggagaaggagttcaacaatgcactcagcaaagctcaagatggatctttgccatcggttttctacttcactgctgcgtggtgtggaccttgcaggcttatcgctcctgtaatgttggagctcggtaagaaatatccacatgttactacatacaaggtcgacattgatgagggcggtctttcaaatgctcttgggaagttaaacgtctctgctgtgccaacaatgcaattcttcaaagggggcgtcaagaaagcagagcttgtaggtgcagatgtcattaagctcaggagtatcatggaacatctctacaagtgagagagactctgtcacttgttttactttttttttttgctgcgctgcgtcaaagtaatgcaccaagtgattacgaacaaggaaacaaaaaaaaaactttgttaagatcgtattgaagactcactgtctcacggcatttatttatcaatgtacataatttttgtgattttatcaaaataagtttcattgct

SEQ ID NO: 109888 - protein, 176 aa, Zea mays subsp. mays
  misc_feature (1)..(176): Ceres Seq. ID no. 15179446
  misc_feature (68)..(176): Pfam Name: Thioredoxin Pfam Description: Thioredoxin
  misc_feature (75)..(174): Homolog of NCBI NO: 40287476 NR Description: thioredoxin [Capsicum annuum]
  misc_feature (67)..(174): Homolog of NCBI NO: 3915131 NR Description: Thioredoxin H-type (TRX-H) (Phloem sap 13 kDa
  misc_feature (62)..(172): Homolog of NCBI NO: 27763683 NR Description: thioredoxin o [Chlamydomonas reinhardtii]
  misc_feature (81)..(176): Homolog of NCBI NO: 26453152 NR Description: putative thioredoxin [Arabidopsis thaliana]
  misc_feature (34)..(176): Homolog of NCBI NO: 15226875 NR Description: thioredoxin family [Arabidopsis thaliana]
  misc_feature (24)..(176): Homolog of NCBI NO: 9755396 NR Description: F17F8.6 [Arabidopsis thaliana]
  misc_feature (24)..(176): Homolog of NCBI NO: 18397764 NR Description: thioredoxin family [Arabidopsis thaliana]
GCKSGFGETLETGERGEIFGVETMKSDWFNLHQIARNSFIATSTVYASTEFNFDRRSFCFFAPDRSGFVVLKSEKEFNNALSKAQDGSLPSVFYFTAAWCGPCRLIAPVMLELGKKYPHVTTYKVDIDEGGLSNALGKLNVSAVPTMQFFKGGVKKAELVGADVIKLRSIMEHLYK

SEQ ID NO: 109889 - protein, 153 aa, Zea mays subsp. mays
  misc_feature (1)..(153): Ceres Seq. ID no. 15179447
  misc_feature (45)..(153): Pfam Name: Thioredoxin Pfam Description: Thioredoxin
  misc_feature (1)..(153): Homolog of NCBI NO: 18397764 NR Description: thioredoxin family [Arabidopsis thaliana]
  misc_feature (52)..(151): Homolog of NCBI NO: 40287476 NR Description: thioredoxin [Capsicum annuum]
  misc_feature (44)..(151): Homolog of NCBI NO: 3915131 NR Description: Thioredoxin H-type (TRX-H) (Phloem sap 13 kDa
  misc_feature (39)..(149): Homolog of NCBI NO: 27763683 NR Description: thioredoxin o [Chlamydomonas reinhardtii]
  misc_feature (58)..(153): Homolog of NCBI NO: 26453152 NR Description: putative thioredoxin [Arabidopsis thaliana]
  misc_feature (11)..(153): Homolog of NCBI NO: 15226875 NR Description: thioredoxin family [Arabidopsis thaliana]
  misc_feature (1)..(153): Homolog of NCBI NO: 9755396 NR Description: F17F8.6 [Arabidopsis thaliana]
MKSDWFNLHQIARNSFIATSTVYASTEFNFDRRSFCFFAPDRSGFVVLKSEKEFNNALSKAQDGSLPSVFYFTAAWCGPCRLIAPVMLELGKKYPHVTTYKVDIDEGGLSNALGKLNVSAVPTMQFFKGGVKKAELVGADVIKLRSIMEHLYK

SEQ ID NO: 109890 - DNA, 1391 bp, Zea mays subsp. mays
  misc_feature (1)..(1391): Ceres Seq. ID no. 15179967
acaatctcagattctttgacttttgtctcctctctagattattgcattcgtgtatgagcttaaaccggttccggttaagaatggccgaggaaatctcaaagacaaagctcggatcttcctccgcctctgcttcggtctccggttcatctgctgcctcagctgcaaccaacgccgcgaaatccagatggaacatcttatggcccagttccctccgctggatccccacctccaccgacaacatcatcgccgccgagaaccgccttctctccatcctcaagacgccttatgtacaagagcaagtcaatattggctctggaccaccaggttcgaaagtcaggtggtttaggtcttcaagcgatgagtctaggttcatcaacactgttacctttgacgccaaggaaggttctcctacgcttgtgatggttcatggttatggtgcttctcaaggcttcttctttcgtaacttcgatgctctcgctagtcggtttagggtcattgctattgatcaacttgggtggggtggatcgagtaggcctgattttacttgtaaaagcactgaagaaacagaggcgtggtttattgactcatttgaggaatggcgtaagtccaagaatcttagtaacttcattctgttaggacattcttttggaggttatgttgctgctaagtacgcgcttaagcatcctgagcatgttcagcacttggttctggtgggatctgctggtttctcagctgaatcagatgccaagtccgagtggctgactaagtttagagcaacgtggaaaggtgctcttctaaatcatctatgggagtccaatttcactcctcagaagctgattagagggttaggtccttggggtccgggtcttgtgaaccggtatacaagtgcaagatttggagcacattctgtgggaactgtgctaacagatgaggaatccagattgctcaccgattatgtgtatcatacgttggctgcaaaggctagtggagagttgtgcttgaaatacatcttctcctttggagcatttgctcggaagccactcttacaaagtgcatcagagtggaaagtgccaacaacttttatctatggaatgaatgattggatgaactatcaaggtgcagtggaagcacggaaacacatgaaggtcccttgcgaaatcattcgtgttccacagggtggccattttgtgttcatagacaacccagctggttttcattcagcagtgatgtatgcttgccgcaagtatatatctcaagactcttctcatcaagaactcattccagatggttttcaattggtttaatcgtgctattgttcattttaccttatcaactttactttattaaaaatgtacaaaaaccatatataaaagagaaacaattattttctt

SEQ ID NO: 109891 - protein, 433 aa, Zea mays subsp. mays
  misc_feature (1)..(433): Ceres Seq. ID no. 15179968
  misc_feature (162)..(411): Pfam Name: alpha/beta hydrolase fold Pfam Description: alpha/beta hydrolase fold
  misc_feature (77)..(250): Homolog of NCBI NO: 40740327 NR Description: hypothetical protein AN4046.2 [Aspergillus
  misc_feature (42)..(415): Homolog of NCBI NO: 24586385 NR Description: CG1882-PA [Drosophila melanogaster]
  misc_feature (72)..(413): Homolog of NCBI NO: 31204749 NR Description: ENSANGP00000017492 [Anopheles gambiae]
  misc_feature (66)..(412): Homolog of NCBI NO: 11545767 NR Description: abhydrolase domain containing 4 [Homo sapiens]
  misc_feature (126)..(412): Homolog of NCBI NO: 26326239 NR Description: unnamed protein product [Mus musculus]
  misc_feature (66)..(412): Homolog of NCBI NO: 19353227 NR Description: hypothetical protein FLJ12816 [Homo sapiens]
  misc_feature (66)..(412): Homolog of NCBI NO: 19527302 NR Description: RIKEN cDNA 1110035H23 [Mus musculus]
  misc_feature (58)..(412): Homolog of NCBI NO: 34875013 NR Description: similar to RIKEN cDNA 1110035H23 [Rattus
  misc_feature (27)..(433): Homolog of NCBI NO: 7446839 NR Description: hypothetical protein T19F6.150 - Arabidopsis
  misc_feature (18)..(433): Homolog of NCBI NO: 30686425 NR Description: hydrolase, alpha/beta fold family [Arabidopsis
NLRFFDFCLLSRLLHSCMSLNRFRLRMAEEISKTKLGSSSASASVSGSSAASAATNAAKSRWNILWPSSLRWIPTSTDNIIAAENRLLSILKTPYVQEQVNIGSGPPGSKVRWFRSSSDESRFINTVTFDAKEGSPTLVMVHGYGASQGFFFRNFDALASRFRVIAIDQLGWGGSSRPDFTCKSTEETEAWFIDSFEEWRKSKNLSNFILLGHSFGGYVAAKYALKHPEHVQHLVLVGSAGFSAESDAKSEWLTKFRATWKGALLNHLWESNFTPQKLIRGLGPWGPGLVNRYTSARFGAHSVGTVLTDEESRLLTDYVYHTLAAKASGELCLKYIFSFGAFARKPLLQSASEWKVPTTFIYGMNDWMNYQGAVEARKHMKVPCEIIRVPQGGHFVFIDNPAGFHSAVMYACRKYISQDSSHQELIPDGFQLV

SEQ ID NO: 109892 - protein, 416 aa, Zea mays subsp. mays
  misc_feature (1)..(416): Ceres Seq. ID no. 15179969
  misc_feature (145)..(394): Pfam Name: alpha/beta hydrolase fold Pfam Description: alpha/beta hydrolase fold
  misc_feature (60)..(233): Homolog of NCBI NO: 40740327 NR Description: hypothetical protein AN4046.2 [Aspergillus
  misc_feature (25)..(398): Homolog of NCBI NO: 24586385 NR Description: CG1882-PA [Drosophila melanogaster]
  misc_feature (55)..(396): Homolog of NCBI NO: 31204749 NR Description: ENSANGP00000017492 [Anopheles gambiae]
  misc_feature (49)..(395): Homolog of NCBI NO: 11545767 NR Description: abhydrolase domain containing 4 [Homo sapiens]
  misc_feature (109)..(395): Homolog of NCBI NO: 26326239 NR Description: unnamed protein product [Mus musculus]
  misc_feature (49)..(395): Homolog of NCBI NO: 19353227 NR Description: hypothetical protein FLJ12816 [Homo sapiens]
  misc_feature (49)..(395): Homolog of NCBI NO: 19527302 NR Description: RIKEN cDNA 1110035H23 [Mus musculus]
  misc_feature (41)..(395): Homolog of NCBI NO: 34875013 NR Description: similar to RIKEN cDNA 1110035H23 [Rattus
  misc_feature (10)..(416): Homolog of NCBI NO: 7446839 NR Description: hypothetical protein T19F6.150 - Arabidopsis
  misc_feature (1)..(416): Homolog of NCBI NO: 30686425 NR Description: hydrolase, alpha/beta fold family [Arabidopsis
MSLNRFRLRMAEEISKTKLGSSSASASVSGSSAASAATNAAKSRWNILWPSSLRWIPTSTDNIIAAENRLLSILKTPYVQEQVNIGSGPPGSKVRWFRSSSDESRFINTVTFDAKEGSPTLVMVHGYGASQGFFFRNFDALASRFRVIAIDQLGWGGSSRPDFTCKSTEETEAWFIDSFEEWRKSKNLSNFILLGHSFGGYVAAKYALKHPEHVQHLVLVGSAGFSAESDAKSEWLTKFRATWKGALLNHLWESNFTPQKLIRGLGPWGPGLVNRYTSARFGAHSVGTVLTDEESRLLTDYVYHTLAAKASGELCLKYIFSFGAFARKPLLQSASEWKVPTTFIYGMNDWMNYQGAVEARKHMKVPCEIIRVPQGGHFVFIDNPAGFHSAVMYACRKYISQDSSHQELIPDGFQLV

SEQ ID NO: 109893 - protein, 407 aa, Zea mays subsp. mays
  misc_feature (1)..(407): Ceres Seq. ID no. 15179970
  misc_feature (136)..(385): Pfam Name: alpha/beta hydrolase fold Pfam Description: alpha/beta hydrolase fold
  misc_feature (51)..(224): Homolog of NCBI NO: 40740327 NR Description: hypothetical protein AN4046.2 [Aspergillus
  misc_feature (16)..(389): Homolog of NCBI NO: 24586385 NR Description: CG1882-PA [Drosophila melanogaster]
  misc_feature (46)..(387): Homolog of NCBI NO: 31204749 NR Description: ENSANGP00000017492 [Anopheles gambiae]
  misc_feature (40)..(386): Homolog of NCBI NO: 11545767 NR Description: abhydrolase domain containing 4 [Homo sapiens]
  misc_feature (100)..(386): Homolog of NCBI NO: 26326239 NR Description: unnamed protein product [Mus musculus]
  misc_feature (40)..(386): Homolog of NCBI NO: 19353227 NR Description: hypothetical protein FLJ12816 [Homo sapiens]
  misc_feature (40)..(386): Homolog of NCBI NO: 19527302 NR Description: RIKEN cDNA 1110035H23 [Mus musculus]
  misc_feature (32)..(386): Homolog of NCBI NO: 34875013 NR Description: similar to RIKEN cDNA 1110035H23 [Rattus
  misc_feature (1)..(407): Homolog of NCBI NO: 7446839 NR Description: hypothetical protein T19F6.150 - Arabidopsis
  misc_feature (1)..(407): Homolog of NCBI NO: 30686425 NR Description: hydrolase, alpha/beta fold family [Arabidopsis
MAEEISKTKLGSSSASASVSGSSAASAATNAAKSRWNILWPSSLRWIPTSTDNIIAAENRLLSILKTPYVQEQVNIGSGPPGSKVRWFRSSSDESRFINTVTFDAKEGSPTLVMVHGYGASQGFFFRNFDALASRFRVIAIDQLGWGGSSRPDFTCKSTEETEAWFIDSFEEWRKSKNLSNFILLGHSFGGYVAAKYALKHPEHVQHLVLVGSAGFSAESDAKSEWLTKFRATWKGALLNHLWESNFTPQKLIRGLGPWGPGLVNRYTSARFGAHSVGTVLTDEESRLLTDYVYHTLAAKASGELCLKYIFSFGAFARKPLLQSASEWKVPTTFIYGMNDWMNYQGAVEARKHMKVPCEIIRVPQGGHFVFIDNPAGFHSAVMYACRKYISQDSSHQELIPDGFQLV

SEQ ID NO: 109894 - DNA, 627 bp, Zea mays subsp. mays
  misc_feature (1)..(627): Ceres Seq. ID no. 15179946
ctagattcttcacccattagggttagtgaattttactgagcgatggcgactacaggaactgcgacggcgaagagaaaacctgtgtttgtgaaagtagaacagctgaagcctgggacgaccggtcacacgttgactgttaaggtcgttgattccaatcctgtggctccgacaacccggaaggctcgtccggggagctctatgagtcgtccgtctcagcctagtcgaatcgctgagtgtctcatcggagatgagactgggtgtattctcttcactgctcgtaacgaacaagttgatattatgaagccgggagaaacggtgatactgcgcaattcgaggatagacatgttcaagggtacgatgaggctaggggttgataaatggggacgcatcgaagccactgagcctgcatctttcactgtcaaggaggataacaatctgtctcttgttgagtacgaactgattaacgttaatgatcagtgatcttcttttagtgtttgtttgggaagttagagggttatgattcttcttctactgtgaaggtctttgattaagatgatgcatgacttgtccacagatgcttgcttgtaggaatgttttccttttttttaccctaaacttcaagatctc

SEQ ID NO: 109895 - protein, 145 aa, Zea mays subsp. mays
  misc_feature (1)..(145): Ceres Seq. ID no. 15179947
  misc_feature (38)..(116): Pfam Name: OB-fold nucleic acid binding domain Pfam Description: OB-fold nucleic acid binding domain
  misc_feature (6)..(87): Homolog of NCBI NO: 25329540 NR Description: probable tyrosyl-tRNA synthetase [imported] -
  misc_feature (11)..(145): Homolog of NCBI NO: 24413970 NR Description: contains EST AU181579(C50456)~similar to Oryza
  misc_feature (8)..(142): Homolog of NCBI NO: 18391179 NR Description: expressed protein [Arabidopsis thaliana]
  misc_feature (6)..(142): Homolog of NCBI NO: 18395285 NR Description: expressed protein [Arabidopsis thaliana]
  misc_feature (3)..(140): Homolog of NCBI NO: 15219562 NR Description: hypothetical protein [Arabidopsis thaliana]
  misc_feature (7)..(142): Homolog of NCBI NO: 34909622 NR Description: P0435B05.31 [Oryza sativa (japonica
  misc_feature (6)..(145): Homolog of NCBI NO: 18403397 NR Description: expressed protein [Arabidopsis thaliana]
  misc_feature (5)..(144): Homolog of NCBI NO: 34904470 NR Description: OSJNBa0086P08.14 [Oryza sativa (japonica
  misc_feature (1)..(145): Homolog of NCBI NO: 15235304 NR Description: expressed protein [Arabidopsis thaliana]
MATTGTATAKRKPVFVKVEQLKPGTTGHTLTVKVVDSNPVAPTTRKARPGSSMSRPSQPSRIAECLIGDETGCILFTARNEQVDIMKPGETVILRNSRIDMFKGTMRLGVDKWGRIEATEPASFTVKEDNNLSLVEYELINVNDQ

SEQ ID NO: 109896 - protein, 93 aa, Zea mays subsp. mays
  misc_feature (1)..(93): Ceres Seq. ID no. 15179948
  misc_feature (1)..(64): Pfam Name: OB-fold nucleic acid binding domain Pfam Description: OB-fold nucleic acid binding domain
  misc_feature (1)..(35): Homolog of NCBI NO: 25329540 NR Description: probable tyrosyl-tRNA synthetase [imported] -
  misc_feature (1)..(93): Homolog of NCBI NO: 24413970 NR Description: contains EST AU181579(C50456)~similar to Oryza
  misc_feature (1)..(90): Homolog of NCBI NO: 18391179 NR Description: expressed protein [Arabidopsis thaliana]
  misc_feature (1)..(90): Homolog of NCBI NO: 18395285 NR Description: expressed protein [Arabidopsis thaliana]
  misc_feature (1)..(88): Homolog of NCBI NO: 15219562 NR Description: hypothetical protein [Arabidopsis thaliana]
  misc_feature (1)..(90): Homolog of NCBI NO: 34909622 NR Description: P0435B05.31 [Oryza sativa (japonica
  misc_feature (1)..(93): Homolog of NCBI NO: 18403397 NR Description: expressed protein [Arabidopsis thaliana]
  misc_feature (1)..(92): Homolog of NCBI NO: 34904470 NR Description: OSJNBa0086P08.14 [Oryza sativa (japonica
  misc_feature (1)..(93): Homolog of NCBI NO: 15235304 NR Description: expressed protein [Arabidopsis thaliana]
MSRPSQPSRIAECLIGDETGCILFTARNEQVDIMKPGETVILRNSRIDMFKGTMRLGVDKWGRIEATEPASFTVKEDNNLSLVEYELINVNDQ

SEQ ID NO: 109897 - DNA, 722 bp, Zea mays subsp. mays
  misc_feature (1)..(722): Ceres Seq. ID no. 15179245
gtagtctccgctcatccaccctcccttttctgttcttgacttgtgcagcgcagttgcataaagaaatggcgacttttcaaatctcttccactagcatgaccaccaaggcggttcttagaagccagccgaccaacaagctcatcacttacaagagcccacaagtttccattggatccgtcaagaaagtctcgagatcctttggcttgaaatgctcagccaattctggtgccactatgtcagctgtatacaaggtcaagctcataggacccgaaggcgaagaacacgagttcgaggttcaggacgaccagttcatattggacgcagctgaagaggcaggagttgacttgccttactcttgcagagccggagcgtgttccacctgcgccggtcagatcgtgaaaggccaagttgaccagtctgaaggttcgtttcttgaggatgatcacttggagaaaggttttgtcttgacatgtgtggcttacccgcagtcggactgtgtgatccatacccacaaggaaactgaactcttctaagtcacggtggtagtgatgcccaattgtcatttgagttattgttattattgttatcagtttccttctacgaatttgggtgtgtttaattgtatgcttttgtatggaaacgtctcaggatatgccttttagtgttcatcagtcttcaccgggttgcaactggttaataaaatggttaaatgttattcagtc

SEQ ID NO: 109898 - protein, 176 aa, Zea mays subsp. mays
  misc_feature (1)..(176): Ceres Seq. ID no. 15179246
  misc_feature (87)..(163): Pfam Name: 2Fe-2S iron-sulfur cluster binding domain Pfam Description: 2Fe-2S iron-sulfur cluster binding domain
  misc_feature (57)..(176): Homolog of NCBI NO: 3023750 NR Description: Ferredoxin VI, chloroplast precursor (Fd VI)
  misc_feature (22)..(176): Homolog of NCBI NO: 6970498 NR Description: non-photosynthetic ferredoxin [Ipomoea nil]
  misc_feature (50)..(176): Homolog of NCBI NO: 7430754 NR Description: ferredoxin [2Fe-2S], root - rice
  misc_feature (22)..(176): Homolog of NCBI NO: 40714664 NR Description: putative ferredoxin [Oryza sativa (japonica
  misc_feature (29)..(176): Homolog of NCBI NO: 119958 NR Description: Ferredoxin III, chloroplast precursor (Fd III)
  misc_feature (79)..(176): Homolog of NCBI NO: 119934 NR Description: Ferredoxin, root R-B1
  misc_feature (22)..(176): Homolog of NCBI NO: 13182955 NR Description: ferredoxin [Impatiens balsamina]
  misc_feature (22)..(175): Homolog of NCBI NO: 2129915 NR Description: ferredoxin
  misc_feature (79)..(176): Homolog of NCBI NO: 119952 NR Description: Ferredoxin, root R-B2
  misc_feature (22)..(176): Homolog of NCBI NO: 15225888 NR Description: ferredoxin, putative [Arabidopsis thaliana]
SLRSSTLPFLFLTCAAQLHKEMATFQISSTSMTTKAVLRSQPTNKLITYKSPQVSIGSVKKVSRSFGLKCSANSGATMSAVYKVKLIGPEGEEHEFEVQDDQFILDAAEEAGVDLPYSCRAGACSTCAGQIVKGQVDQSEGSFLEDDHLEKGFVLTCVAYPQSDCVIHTHKETELF

SEQ ID NO: 109899 - protein, 155 aa, Zea mays subsp. mays
  misc_feature (1)..(155): Ceres Seq. ID no. 15179247
  misc_feature (66)..(142): Pfam Name: 2Fe-2S iron-sulfur cluster binding domain Pfam Description: 2Fe-2S iron-sulfur cluster binding domain
  misc_feature (36)..(155): Homolog of NCBI NO: 3023750 NR Description: Ferredoxin VI, chloroplast precursor (Fd VI)
  misc_feature (1)..(155): Homolog of NCBI NO: 6970498 NR Description: non-photosynthetic ferredoxin [Ipomoea nil]
  misc_feature (29)..(155): Homolog of NCBI NO: 7430754 NR Description: ferredoxin [2Fe-2S], root - rice
  misc_feature (1)..(155): Homolog of NCBI NO: 40714664 NR Description: putative ferredoxin [Oryza sativa (japonica
  misc_feature (8)..(155): Homolog of NCBI NO: 119958 NR Description: Ferredoxin III, chloroplast precursor (Fd III)
  misc_feature (58)..(155): Homolog of NCBI NO: 119934 NR Description: Ferredoxin, root R-B1
  misc_feature (1)..(155): Homolog of NCBI NO: 13182955 NR Description: ferredoxin [Impatiens balsamina]
  misc_feature (1)..(154): Homolog of NCBI NO: 2129915 NR Description: ferredoxin
  misc_feature (58)..(155): Homolog of NCBI NO: 119952 NR Description: Ferredoxin, root R-B2
  misc_feature (1)..(155): Homolog of NCBI NO: 15225888 NR Description: ferredoxin, putative [Arabidopsis thaliana]
MATFQISSTSMTTKAVLRSQPTNKLITYKSPQVSIGSVKKVSRSFGLKCSANSGATMSAVYKVKLIGPEGEEHEFEVQDDQFILDAAEEAGVDLPYSCRAGACSTCAGQIVKGQVDQSEGSFLEDDHLEKGFVLTCVAYPQSDCVIHTHKETELF

SEQ ID NO: 109900 - protein, 145 aa, Zea mays subsp. mays
  misc_feature (1)..(145): Ceres Seq. ID no. 15179248
  misc_feature (56)..(132): Pfam Name: 2Fe-2S iron-sulfur cluster binding domain Pfam Description: 2Fe-2S iron-sulfur cluster binding domain
  misc_feature (19)..(145): Homolog of NCBI NO: 7430754 NR Description: ferredoxin [2Fe-2S], root - rice
  misc_feature (1)..(145): Homolog of NCBI NO: 40714664 NR Description: putative ferredoxin [Oryza sativa (japonica
  misc_feature (1)..(145): Homolog of NCBI NO: 119958 NR Description: Ferredoxin III, chloroplast precursor (Fd III)
  misc_feature (48)..(145): Homolog of NCBI NO: 119934 NR Description: Ferredoxin, root R-B1
  misc_feature (26)..(145): Homolog of NCBI NO: 3023750 NR Description: Ferredoxin VI, chloroplast precursor (Fd VI)
  misc_feature (1)..(145): Homolog of NCBI NO: 6970498 NR Description: non-photosynthetic ferredoxin [Ipomoea nil]
  misc_feature (1)..(145): Homolog of NCBI NO: 13182955 NR Description: ferredoxin [Impatiens balsamina]
  misc_feature (1)..(144): Homolog of NCBI NO: 2129915 NR Description: ferredoxin
  misc_feature (48)..(145): Homolog of NCBI NO: 119952 NR Description: Ferredoxin, root R-B2
  misc_feature (1)..(145): Homolog of NCBI NO: 15225888 NR Description: ferredoxin, putative [Arabidopsis thaliana]
MTTKAVLRSQPTNKLITYKSPQVSIGSVKKVSRSFGLKCSANSGATMSAVYKVKLIGPEGEEHEFEVQDDQFILDAAEEAGVDLPYSCRAGACSTCAGQIVKGQVDQSEGSFLEDDHLEKGFVLTCVAYPQSDCVIHTHKETELF

SEQ ID NO: 109901 - DNA, 1000 bp, Zea mays subsp. mays
  misc_feature (1)..(1000): Ceres Seq. ID no. 15179176
caaaaagaatcataaaatcctcatcaagtctcctatataaacatctccactcctcaacgatccatctattaactaaaaacgttccaaagggacaaagatcacaaacaaatgtcttttggatcggtccctatcgtggccgcggtggccatacaactcctccttatacccagcgttgttctgtctcttaacattaccaatttgtatctccaccatgcatgcaacaacacccaagggaaatacaagccggggagtttgttcgagaaaaatctcaacactgtcatcaaaaacatatccacctttgatctgcacaacggcttcgcgctcgactctaatatgaagagtccctattttgatatacctcccaatactgttttcgtcacgctccaatgccgtggtgactcctacgggcccaagtgtcactcttgccttgccgaagccctctctgggcttcggaagaaatgtcctggacacaaaggagcaacaatatggtatgaccaatgtcttttggatatttctacagaaaattccattagaacggccctaccgaacagagtccactacgataattatttgtgtataagcaatccaaaatccgtgagcggcgataagaagatcttcgaaaagaagaagaaggatttcaccgataagctattgtctgtagtcaacaagacgactgacagcaacctcagggggccactgtacgcaaagggggagatgatgattgggaaaaagaaattttatggaatgttgcaatgtacgaacgagttatttgcgagtgcttgctatgtgtgtctagagtggcttgtcttggggcatccattctgcttctatgaaggacaaggagctagactaatgtgtagaagctgtgttgcaaggtttgagttttacccttttcttagaacttaagactgttttatgggagctcttaatttgctttatgtttgaataagtgctatatcaaggaataaaaacagtcaacctctttgtggttattttatgt

SEQ ID NO: 109902 - protein, 265 aa, Zea mays subsp. mays
  misc_feature (1)..(265): Ceres Seq. ID no. 15179177
  misc_feature (88)..(140): Pfam Name: Domain of unknown function DUF26 Pfam Description: Domain of unknown function DUF26
  misc_feature (12)..(265): Homolog of NCBI NO: 15233241 NR Description: receptor-like protein kinase-related [Arabidopsis
  misc_feature (6)..(263): Homolog of NCBI NO: 15233201 NR Description: receptor-like protein kinase-related [Arabidopsis
  misc_feature (9)..(264): Homolog of NCBI NO: 9279762 NR Description: emb|CAB45834.1~gene_id:MZN24.23~similar to
  misc_feature (7)..(263): Homolog of NCBI NO: 9279746 NR Description: contains similarity to receptor protein
  misc_feature (3)..(264): Homolog of NCBI NO: 15233366 NR Description: pollen coat receptor kinase, putative
  misc_feature (3)..(264): Homolog of NCBI NO: 15233235 NR Description: receptor-like kinase-related [Arabidopsis
  misc_feature (12)..(264): Homolog of NCBI NO: 15228583 NR Description: receptor kinase, putative [Arabidopsis thaliana]
  misc_feature (8)..(264): Homolog of NCBI NO: 11994708 NR Description: contains similarity to serine/threonine
  misc_feature (3)..(248): Homolog of NCBI NO: 9279753 NR Description: emb|CAB45833.1~gene_id:MZN24.14~similar to
  misc_feature (3)..(264): Homolog of NCBI NO: 15233228 NR Description: receptor-like protein kinase-related [Arabidopsis
MSFGSVPIVAAVAIQLLLIPSVVLSLNITNLYLHHACNNTQGKYKPGSLFEKNLNTVIKNISTFDLHNGFALDSNMKSPYFDIPPNTVFVTLQCRGDSYGPKCHSCLAEALSGLRKKCPGHKGATIWYDQCLLDISTENSIRTALPNRVHYDNYLCISNPKSVSGDKKIFEKKKKDFTDKLLSVVNKTTDSNLRGPLYAKGEMMIGKKKFYGMLQCTNELFASACYVCLEWLVLGHPFCFYEGQGARLMCRSCVARFEFYPFLRT

SEQ ID NO: 109903 - protein, 190 aa, Zea mays subsp. mays
  misc_feature (1)..(190): Ceres Seq. ID no. 15179178
  misc_feature (13)..(65): Pfam Name: Domain of unknown function DUF26 Pfam Description: Domain of unknown function DUF26
  misc_feature (1)..(190): Homolog of NCBI NO: 15233241 NR Description: receptor-like protein kinase-related [Arabidopsis
  misc_feature (1)..(188): Homolog of NCBI NO: 15233201 NR Description: receptor-like protein kinase-related [Arabidopsis
  misc_feature (1)..(189): Homolog of NCBI NO: 9279762 NR Description: emb|CAB45834.1~gene_id:MZN24.23~similar to
  misc_feature (1)..(188): Homolog of NCBI NO: 9279746 NR Description: contains similarity to receptor protein
  misc_feature (1)..(189): Homolog of NCBI NO: 15233366 NR Description: pollen coat receptor kinase, putative
  misc_feature (1)..(189): Homolog of NCBI NO: 15233235 NR Description: receptor-like kinase-related [Arabidopsis
  misc_feature (1)..(189): Homolog of NCBI NO: 15228583 NR Description: receptor kinase, putative [Arabidopsis thaliana]
  misc_feature (1)..(189): Homolog of NCBI NO: 11994708 NR Description: contains similarity to serine/threonine
  misc_feature (1)..(173): Homolog of NCBI NO: 9279753 NR Description: emb|CAB45833.1~gene_id:MZN24.14~similar to
  misc_feature (1)..(189): Homolog of NCBI NO: 15233228 NR Description: receptor-like protein kinase-related [Arabidopsis
MKSPYFDIPPNTVFVTLQCRGDSYGPKCHSCLAEALSGLRKKCPGHKGATIWYDQCLLDISTENSIRTALPNRVHYDNYLCISNPKSVSGDKKIFEKKKKDFTDKLLSVVNKTTDSNLRGPLYAKGEMMIGKKKFYGMLQCTNELFASACYVCLEWLVLGHPFCFYEGQGARLMCRSCVARFEFYPFLRT

SEQ ID NO: 109904 - DNA, 1083 bp, Zea mays subsp. mays
  misc_feature (1)..(1083): Ceres Seq. ID no. 15179333
aaaccacaagttctgatggaccgtgttccttgagctcttaacacttcccttcagaccattactgaacaatcatcgtctcttggtgacagaagagaagagttaaggtaaagagcgaaaaatggcagcacaggcacttgtctcttcttcacttacctcctctgttcagacagctagacagatattcggcacaaaaccagctgtctccgtgaggaagacctcctttgttattaaggctgcctcaactccacctgtcaagcaaggagcaaacagaccattgtggtttgcatcttcacaatctctgtcttacttggatggcagcttacctggcgactatggattcgacccgcttggtctttcagacccagaaggtactggaggtttcatcgagccaagatggttagcctacggagagatcatcaacggaaggttcgctatgttaggtgcagctggagctattgcccctgagattcttggcaaagcaggtttgattccagcagacactgcccttccttggttccaaaccggtgtgattccacctgcagggacatacagctactgggcagacccttacacactctttgttctcgagatggctttgatgggatttgctgagcaccggaggttgcaggattggtacaacccaggatcaatgggcaaacagtacttcttgggcttagagaaaggttttgccggttcgggtgacccgtcttaccccggtggacctttctttaaccctcttgggtttgggaaagacgagaagtcaatgaaggagttgaaactcaaggaggtcaagaacggtagactggctatgctcgcaatcctaggctattttgtgcagggactagtgaccggtgtggggccataccagaaccttcttgatcatttggcggatccagtcaacaacaatgtcttgaccagcctcaagttccactgagatgatcttcatatcatcccatgtgttttatgttggactctcattctcttgtatcctacagtcttcgtattgtaacaccctttgtaaacatattatatctttgtaagatatgaaaatgccaatggccaaaaagaacaacttcgaggatt

SEQ ID NO: 109905 - protein, 271 aa, Zea mays subsp. mays
  misc_feature (1)..(271): Ceres Seq. ID no. 15179334
  misc_feature (59)..(242): Pfam Name: Chlorophyll A-B binding protein Pfam Description: Chlorophyll A-B binding protein
  misc_feature (107)..(271): Homolog of NCBI NO: 37780998 NR Description: chlorophyll a/b binding protein [Vitis vinifera]
  misc_feature (11)..(267): Homolog of NCBI NO: 40714511 NR Description: light-harvesting chlorophyll-a/b protein of
  misc_feature (70)..(262): Homolog of NCBI NO: 7271947 NR Description: chlorophyll a/b-binding protein type III [Alonsoa
  misc_feature (1)..(271): Homolog of NCBI NO: 99487 NR Description: chlorophyll a/b-binding protein (clone pINEab 43)
  misc_feature (1)..(271): Homolog of NCBI NO: 7443229 NR Description: probable chlorophyll a/b-binding protein type III
  misc_feature (1)..(271): Homolog of NCBI NO: 115813 NR Description: Chlorophyll A-B binding protein 8, chloroplast
  misc_feature (1)..(271): Homolog of NCBI NO: 82080 NR Description: chlorophyll a/b-binding protein type III
  misc_feature (1)..(271): Homolog of NCBI NO: 21554335 NR Description: PSI type III chlorophyll a/b-binding protein,
  misc_feature (1)..(271): Homolog of NCBI NO: 430947 NR Description: PSI type III chlorophyll a/b-binding protein
  misc_feature (1)..(271): Homolog of NCBI NO: 15219941 NR Description: light-harvesting chlorophyll a/b binding protein
MAAQALVSSSLTSSVQTARQIFGTKPAVSVRKTSFVIKAASTPPVKQGANRPLWFASSQSLSYLDGSLPGDYGFDPLGLSDPEGTGGFIEPRWLAYGEIINGRFAMLGAAGAIAPEILGKAGLIPADTALPWFQTGVIPPAGTYSYWADPYTLFVLEMALMGFAEHRRLQDWYNPGSMGKQYFLGLEKGFAGSGDPSYPGGPFFNPLGFGKDEKSMKELKLKEVKNGRLAMLAILGYFVQGLVTGVGPYQNLLDHLADPVNNNVLTSLKFH

SEQ ID NO: 109906 - protein, 166 aa, Zea mays subsp. mays
  misc_feature (1)..(166): Ceres Seq. ID no. 15179335
  misc_feature (1)..(137): Pfam Name: Chlorophyll A-B binding protein Pfam Description: Chlorophyll A-B binding protein
  misc_feature (2)..(166): Homolog of NCBI NO: 37780998 NR Description: chlorophyll a/b binding protein [Vitis vinifera]
  misc_feature (1)..(162): Homolog of NCBI NO: 40714511 NR Description: light-harvesting chlorophyll-a/b protein of
  misc_feature (1)..(157): Homolog of NCBI NO: 7271947 NR Description: chlorophyll a/b-binding protein type III [Alonsoa
  misc_feature (1)..(166): Homolog of NCBI NO: 99487 NR Description: chlorophyll a/b-binding protein (clone pINEab 43)
  misc_feature (1)..(166): Homolog of NCBI NO: 7443229 NR Description: probable chlorophyll a/b-binding protein type III
  misc_feature (1)..(166): Homolog of NCBI NO: 115813 NR Description: Chlorophyll A-B binding protein 8, chloroplast
  misc_feature (1)..(166): Homolog of NCBI NO: 82080 NR Description: chlorophyll a/b-binding protein type III
  misc_feature (1)..(166): Homolog of NCBI NO: 21554335 NR Description: PSI type III chlorophyll a/b-binding protein,
  misc_feature (1)..(166): Homolog of NCBI NO: 430947 NR Description: PSI type III chlorophyll a/b-binding protein
  misc_feature (1)..(166): Homolog of NCBI NO: 15219941 NR Description: light-harvesting chlorophyll a/b binding protein
MLGAAGAIAPEILGKAGLIPADTALPWFQTGVIPPAGTYSYWADPYTLFVLEMALMGFAEHRRLQDWYNPGSMGKQYFLGLEKGFAGSGDPSYPGGPFFNPLGFGKDEKSMKELKLKEVKNGRLAMLAILGYFVQGLVTGVGPYQNLLDHLADPVNNNVLTSLKFH

SEQ ID NO: 109907 - DNA, 780 bp, Zea mays subsp. mays
  misc_feature (1)..(780): Ceres Seq. ID no. 15175364
aaaatccgatccaaatccctccaccgccgtcccggatttaccaaaaacccggccaccaccgccatgggctccgcgagccgcgccatctcgtgcctgtgctgcccctgcaggtgcctcttcagctgcctgtgcagcatcctcgtctcgctcgccgtcacgctgggcctcctggccctcgccctctacctcatattgaagccgcgcatgatcgcggccaccgtcgactcggcctcgctctcccagttcgcgctctccgcttcctccacgctcgcctacgacctcaacgtcaccatgacggtgcgcaaccccaacacgcgggtggggctctactacgacgacgtccaggcgctggcctcgtacgagggccagcgcttcggctacgcgccgctcgacgccttctatcagggcacgggggcggccaccaagctggcgccggggttccgcggcacgcagctgctccagggcgacgtcgccgccggccagttcaggcagcagcagtccgcggggcgcttcgacgtcgacgtggatctcaacgccaagctcagggtcaagttctgggcgttcaaggcccacgggcccaacgcgaagatcacgtgcacgctctccgtccccgccgccgccagcgcctcgccctttcagcccacggattgcaaagtgtggttctgatttttggctgataggatagggatactctgcctgctgctgctgctgtacatcgccgtggacagcgaataacgctcgtgcgccctggtggccacaagacaagtttgtttttctgac

SEQ ID NO: 109908 - protein, 224 aa, Zea mays subsp. mays
  misc_feature (1)..(224): Ceres Seq. ID no. 15175365
NPIQIPPPPSRIYQKPGHHRHGLREPRHLVPVLPLQVPLQLPVQHPRLARRHAGPPGPRPLPHIEAAHDRGHRRLGLALPVRALRFLHARLRPQRHHDGAQPQHAGGALLRRRPGAGLVRGPALRLRAARRLLSGHGGGHQAGAGVPRHAAAPGRRRRRPVQAAAVRGALRRRRGSQRQAQGQVLGVQGPRAQREDHVHALRPRRRQRLALSAHGLQSVVLIFG

SEQ ID NO: 109909 - protein, 221 aa, Zea mays subsp. mays
  misc_feature (1)..(221): Ceres Seq. ID no. 15175366
  misc_feature (31)..(221): Homolog of NCBI NO: 21450870 NR Description: putative harpin-induced protein [Arabidopsis
  misc_feature (31)..(221): Homolog of NCBI NO: 15239999 NR Description: harpin-induced protein 1 family (NDR1/HIN1-like
  misc_feature (30)..(219): Homolog of NCBI NO: 15226994 NR Description: harpin-induced protein 1 family (HIN1)
  misc_feature (30)..(217): Homolog of NCBI NO: 18399306 NR Description: harpin-induced protein family (NDR1/HIN1-Like
  misc_feature (15)..(220): Homolog of NCBI NO: 7489141 NR Description: hin1 protein - common tobacco
  misc_feature (30)..(217): Homolog of NCBI NO: 9502174 NR Description: NDR1/HIN1-Like protein 2 [Arabidopsis thaliana]
  misc_feature (33)..(220): Homolog of NCBI NO: 24429927 NR Description: hin1-like protein [Solanum tuberosum]
  misc_feature (33)..(220): Homolog of NCBI NO: 7417006 NR Description: harpin inducing protein [Nicotiana tabacum]
  misc_feature (22)..(221): Homolog of NCBI NO: 7489482 NR Description: hin1 protein homolog - rice
  misc_feature (22)..(221): Homolog of NCBI NO: 32488714 NR Description: OSJNBa0088H09.15 [Oryza sativa (japonica
KIRSKSLHRRPGFTKNPATTAMGSASRAISCLCCPCRCLFSCLCSILVSLAVTLGLLALALYLILKPRMIAATVDSASLSQFALSASSTLAYDLNVTMTVRNPNTRVGLYYDDVQALASYEGQRFGYAPLDAFYQGTGAATKLAPGFRGTQLLQGDVAAGQFRQQQSAGRFDVDVDLNAKLRVKFWAFKAHGPNAKITCTLSVPAAASASPFQPTDCKVWF

SEQ ID NO: 109910 - protein, 200 aa, Zea mays subsp. mays
  misc_feature (1)..(200): Ceres Seq. ID no. 15175367
  misc_feature (10)..(200): Homolog of NCBI NO: 21450870 NR Description: putative harpin-induced protein [Arabidopsis
  misc_feature (10)..(200): Homolog of NCBI NO: 15239999 NR Description: harpin-induced protein 1 family (NDR1/HIN1-like
  misc_feature (9)..(198): Homolog of NCBI NO: 15226994 NR Description: harpin-induced protein 1 family (HIN1)
  misc_feature (9)..(196): Homolog of NCBI NO: 18399306 NR Description: harpin-induced protein family (NDR1/HIN1-Like
  misc_feature (1)..(199): Homolog of NCBI NO: 7489141 NR Description: hin1 protein - common tobacco
  misc_feature (9)..(196): Homolog of NCBI NO: 9502174 NR Description: NDR1/HIN1-Like protein 2 [Arabidopsis thaliana]
  misc_feature (12)..(199): Homolog of NCBI NO: 24429927 NR Description: hin1-like protein [Solanum tuberosum]
  misc_feature (12)..(199): Homolog of NCBI NO: 7417006 NR Description: harpin inducing protein [Nicotiana tabacum]
  misc_feature (1)..(200): Homolog of NCBI NO: 7489482 NR Description: hin1 protein homolog - rice
  misc_feature (1)..(200): Homolog of NCBI NO: 32488714 NR Description: OSJNBa0088H09.15 [Oryza sativa (japonica
MGSASRAISCLCCPCRCLFSCLCSILVSLAVTLGLLALALYLILKPRMIAATVDSASLSQFALSASSTLAYDLNVTMTVRNPNTRVGLYYDDVQALASYEGQRFGYAPLDAFYQGTGAATKLAPGFRGTQLLQGDVAAGQFRQQQSAGRFDVDVDLNAKLRVKFWAFKAHGPNAKITCTLSVPAAASASPFQPTDCKVWF

SEQ ID NO: 109911 - DNA, 972 bp, Zea mays subsp. mays
  misc_feature (1)..(972): Ceres Seq. ID no. 15174020
tccaatatctaaaaggagttctcaagaataataaaacaagaaaagtaataattgtgtaaaagatcagcaaaatggttgctcaagggttcactgtggatcttgacaagccccttgctttccaggttggtcatctcggagaagcttacgacgaatgggttcaccaacctattgtaaccaaggaaggccctcggtttttccatagtgacttttgggagttcttgacccttacagtttggtgggcggttcctgtcatttggttgccagttgttgtctggtgcatctccatgtcagtaagcatcggctgttcattcccagaaattgtctcattggttgccttgggaatatttatctggacttttatagaatactgtcttcaccgtttccttttccacatgaagaccaagagttactggggaaacacggcacactatcttattcacggataccatcacaagcacccaatggaccaccttcgactcgtctttcctcctgccttaacagctattatgtgctttcctctctggaaccttgcgaagctaatcgcaactccttcaaccgcacctgcattgtttggaggcggcctgctcggctatgtgatgtacgatcttactcactactaccttcaccatgccaacccaaccataccagtaaccaaaagcctcaagaaatcccatttgaaccatcacttcaggattcaggacaagggatatggagtaacttcgtcgctatgggacatagtgtttggtacccttcccaccacaaaagctctcaaaagagcgcaacaaaagtactaagatggatgcaaaacgaaaaggatatttgtaatacactgtttatcttaaactattaatcatcactctatgttaatctgatcacgtttcatttgggcaatgtctttgtatatcaatatacttcacatcctatgtaatagtttttatgtgtttcacaacttaaaaaaaaaagactttgttt

SEQ ID NO: 109912 - protein, 240 aa, Zea mays subsp. mays
  misc_feature (1)..(240): Ceres Seq. ID no. 15174021
  misc_feature (86)..(229): Pfam Name: Fatty acid hydroxylase Pfam Description: Fatty acid hydroxylase
  misc_feature (6)..(234): Homolog of NCBI NO: 31200833 NR Description: ENSANGP00000014963 [Anopheles gambiae]
  misc_feature (8)..(226): Homolog of NCBI NO: 6323928 NR Description: Required for the hydroxylation of the very long
  misc_feature (8)..(226): Homolog of NCBI NO: 18447515 NR Description: RE63157p [Drosophila melanogaster]
  misc_feature (8)..(234): Homolog of NCBI NO: 40746791 NR Description: hypothetical protein AN0918.2 [Aspergillus
  misc_feature (8)..(226): Homolog of NCBI NO: 32404274 NR Description: hypothetical protein [Neurospora crassa]
  misc_feature (16)..(68): Homolog of NCBI NO: 20071844 NR Description: Faxdc1 protein [Mus musculus]
  misc_feature (71)..(237): Homolog of NCBI NO: 20071844 NR Description: Faxdc1 protein [Mus musculus]
  misc_feature (1)..(231): Homolog of NCBI NO: 34897078 NR Description: putative fatty acid hydroxylase
  misc_feature (1)..(232): Homolog of NCBI NO: 15233426 NR Description: fatty acid hydroxylase, putative [Arabidopsis
  misc_feature (1)..(237): Homolog of NCBI NO: 15226828 NR Description: fatty acid hydroxylase (FAH1) [Arabidopsis
MVAQGFTVDLDKPLAFQVGHLGEAYDEWVHQPIVTKEGPRFFHSDFWEFLTLTVWWAVPVIWLPVVVWCISMSVSIGCSFPEIVSLVALGIFIWTFIEYCLHRFLFHMKTKSYWGNTAHYLIHGYHHKHPMDHLRLVFPPALTAIMCFPLWNLAKLIATPSTAPALFGGGLLGYVMYDLTHYYLHHANPTIPVTKSLKKSHLNHHFRIQDKGYGVTSSLWDIVFGTLPTTKALKRAQQKY

SEQ ID NO: 109913 - protein, 169 aa, Zea mays subsp. mays
  misc_feature (1)..(169): Ceres Seq. ID no. 15174022
  misc_feature (15)..(158): Pfam Name: Fatty acid hydroxylase Pfam Description: Fatty acid hydroxylase
  misc_feature (1)..(156): Homolog of NCBI NO: 39589620 NR Description: Hypothetical protein CBG12227 [Caenorhabditis
  misc_feature (1)..(163): Homolog of NCBI NO: 31200833 NR Description: ENSANGP00000014963 [Anopheles gambiae]
  misc_feature (1)..(155): Homolog of NCBI NO: 6323928 NR Description: Required for the hydroxylation of the very long
  misc_feature (1)..(155): Homolog of NCBI NO: 18447515 NR Description: RE63157p [Drosophila melanogaster]
  misc_feature (1)..(163): Homolog of NCBI NO: 40746791 NR Description: hypothetical protein AN0918.2 [Aspergillus
  misc_feature (1)..(155): Homolog of NCBI NO: 32404274 NR Description: hypothetical protein [Neurospora crassa]
  misc_feature (1)..(166): Homolog of NCBI NO: 20071844 NR Description: Faxdc1 protein [Mus musculus]
  misc_feature (1)..(160): Homolog of NCBI NO: 34897078 NR Description: putative fatty acid hydroxylase
  misc_feature (1)..(161): Homolog of NCBI NO: 15233426 NR Description: fatty acid hydroxylase, putative [Arabidopsis
  misc_feature (1)..(166): Homolog of NCBI NO: 15226828 NR Description: fatty acid hydroxylase (FAH1) [Arabidopsis
MSVSIGCSFPEIVSLVALGIFIWTFIEYCLHRFLFHMKTKSYWGNTAHYLIHGYHHKHPMDHLRLVFPPALTAIMCFPLWNLAKLIATPSTAPALFGGGLLGYVMYDLTHYYLHHANPTIPVTKSLKKSHLNHHFRIQDKGYGVTSSLWDIVFGTLPTTKALKRAQQKY

SEQ ID NO: 109914 - protein, 133 aa, Zea mays subsp. mays
  misc_feature (1)..(133): Ceres Seq. ID no. 15174023
  misc_feature (1)..(122): Pfam Name: Fatty acid hydroxylase Pfam Description: Fatty acid hydroxylase
  misc_feature (1)..(119): Homolog of NCBI NO: 18447515 NR Description: RE63157p [Drosophila melanogaster]
  misc_feature (1)..(127): Homolog of NCBI NO: 40746791 NR Description: hypothetical protein AN0918.2 [Aspergillus
  misc_feature (1)..(119): Homolog of NCBI NO: 32404274 NR Description: hypothetical protein [Neurospora crassa]
  misc_feature (1)..(130): Homolog of NCBI NO: 20071844 NR Description: Faxdc1 protein [Mus musculus]
  misc_feature (1)..(127): Homolog of NCBI NO: 31200833 NR Description: ENSANGP00000014963 [Anopheles gambiae]
  misc_feature (1)..(119): Homolog of NCBI NO: 6323928 NR Description: Required for the hydroxylation of the very long
  misc_feature (1)..(120): Homolog of NCBI NO: 39589620 NR Description: Hypothetical protein CBG12227 [Caenorhabditis
  misc_feature (1)..(124): Homolog of NCBI NO: 34897078 NR Description: putative fatty acid hydroxylase
  misc_feature (1)..(125): Homolog of NCBI NO: 15233426 NR Description: fatty acid hydroxylase, putative [Arabidopsis
  misc_feature (1)..(130): Homolog of NCBI NO: 15226828 NR Description: fatty acid hydroxylase (FAH1) [Arabidopsis
MKTKSYWGNTAHYLIHGYHHKHPMDHLRLVFPPALTAIMCFPLWNLAKLIATPSTAPALFGGGLLGYVMYDLTHYYLHHANPTIPVTKSLKKSHLNHHFRIQDKGYGVTSSLWDIVFGTLPTTKALKRAQQKY

SEQ ID NO: 109915 - DNA, 817 bp, Zea mays subsp. mays
  misc_feature (1)..(817): Ceres Seq. ID no. 15179979
aagagacgaatctctctcttagatcgtatgatctgatccgaagagaagctcaggaagaagatgggaatcgtattcacgaagctgttttcctccgtgtttggaaacaaagaagctcgtatcctcgtcctcggcctcgacaatgccggaaaaaccaccatcctctatcggcttcagatgggagaggtcgtctccacgatcccgactattggatttaacgtggagactgtgcagtacaacaatatcaagtttcaggtctgggatttaggtggacaaacgagtatcaggccatattggagatgctattttccaaatacacaggcagtgatttacgttgttgattcgagtgatactgatagaattggagtggcgaaagaggagttccatgcaattttggaggaagaggaattgaaaggtgcaatggttcttatatttgcaaacaagcaggatctgccaggcgcacttgacgatgcggctgtgacagaggccttggagttgcacaagataaagagtcgtcaatgggcaatcttcaaaacttgtgctgtgaaaggcgaaggacttttcgaaggcctagactggttgagtaataccctcaaatcagggacgggttaacctcatcactcaccacaaagcagcagcgtgcgtgtatcacatcttttctactgttagctttgcattcttcgacaaagagttgatagcgtctcagttattaatctcttatgtttttgtccgaagaagataagacttgtggatttgttgttgtgacatttaagacaggatattgatttttaacatgaaatataacatattaagaatcacc

SEQ ID NO: 109916 - protein, 182 aa, Zea mays subsp. mays
  misc_feature (1)..(182): Ceres Seq. ID no. 15179980
  misc_feature (4)..(177): Pfam Name: ADP-ribosylation factor family Pfam Description: ADP-ribosylation factor family
  misc_feature (1)..(179): Homolog of NCBI NO: 31240205 NR Description: ENSANGP00000015770 [Anopheles gambiae]
  misc_feature (1)..(179): Homolog of NCBI NO: 11131023 NR Description: ADP-ribosylation factor 1
  misc_feature (1)..(179): Homolog of NCBI NO: 29124979 NR Description: ADP-ribosylation factor 1 [Populus tremuloides]
  misc_feature (1)..(179): Homolog of NCBI NO: 39653273 NR Description: ADP-ribosylation factor [Medicago sativa]
  misc_feature (1)..(179): Homolog of NCBI NO: 4502227 NR Description: ADP-ribosylation factor-like 1 [Homo sapiens]
  misc_feature (1)..(179): Homolog of NCBI NO: 11693150 NR Description: ADP-ribosylation factor-like 1 [Rattus
  misc_feature (1)..(179): Homolog of NCBI NO: 13385340 NR Description: ADP-ribosylation-like 1 [Mus musculus]
  misc_feature (1)..(179): Homolog of NCBI NO: 40253742 NR Description: putative ADP-ribosylation factor 3
  misc_feature (1)..(182): Homolog of NCBI NO: 30682545 NR Description: ADP-ribosylation factor 3 (ARF3) [Arabidopsis
  misc_feature (1)..(182): Homolog of NCBI NO: 3182922 NR Description: ADP-ribosylation factor 1
MGIVFTKLFSSVFGNKEARILVLGLDNAGKTTILYRLQMGEVVSTIPTIGFNVETVQYNNIKFQVWDLGGQTSIRPYWRCYFPNTQAVIYVVDSSDTDRIGVAKEEFHAILEEEELKGAMVLIFANKQDLPGALDDAAVTEALELHKIKSRQWAIFKTCAVKGEGLFEGLDWLSNTLKSGTG

SEQ ID NO: 109917 - protein, 144 aa, Zea mays subsp. mays
  misc_feature (1)..(144): Ceres Seq. ID no. 15179981
  misc_feature (1)..(139): Pfam Name: ADP-ribosylation factor family Pfam Description: ADP-ribosylation factor family
  misc_feature (1)..(141): Homolog of NCBI NO: 31240205 NR Description: ENSANGP00000015770 [Anopheles gambiae]
  misc_feature (1)..(141): Homolog of NCBI NO: 11131023 NR Description: ADP-ribosylation factor 1
  misc_feature (1)..(141): Homolog of NCBI NO: 29124979 NR Description: ADP-ribosylation factor 1 [Populus tremuloides]
  misc_feature (1)..(141): Homolog of NCBI NO: 39653273 NR Description: ADP-ribosylation factor [Medicago sativa]
  misc_feature (1)..(141): Homolog of NCBI NO: 4502227 NR Description: ADP-ribosylation factor-like 1 [Homo sapiens]
  misc_feature (1)..(141): Homolog of NCBI NO: 11693150 NR Description: ADP-ribosylation factor-like 1 [Rattus
  misc_feature (1)..(141): Homolog of NCBI NO: 13385340 NR Description: ADP-ribosylation-like 1 [Mus musculus]
  misc_feature (1)..(141): Homolog of NCBI NO: 40253742 NR Description: putative ADP-ribosylation factor 3
  misc_feature (1)..(144): Homolog of NCBI NO: 30682545 NR Description: ADP-ribosylation factor 3 (ARF3) [Arabidopsis
  misc_feature (1)..(144): Homolog of NCBI NO: 3182922 NR Description: ADP-ribosylation factor 1
MGEVVSTIPTIGFNVETVQYNNIKFQVWDLGGQTSIRPYWRCYFPNTQAVIYVVDSSDTDRIGVAKEEFHAILEEEELKGAMVLIFANKQDLPGALDDAAVTEALELHKIKSRQWAIFKTCAVKGEGLFEGLDWLSNTLKSGTG

SEQ ID NO: 109918 - DNA, 1061 bp, Zea mays subsp. mays
  misc_feature (1)..(1061): Ceres Seq. ID no. 15179996
attcaccaatctctaaccaatagtcacacactcacaatggccaccgtcgctaacttctcagccaaccgaatcaccaccgtgattccacggccaacatccgccgttgcctcaacctcctccttcgtattcttcgaccccaaacccaactcactgatcctaaagcagagatgggtaaaaaatccctcgaaaagaagcttctcagccgtgaaggtcaaggccggtgcggcatcgccggggaaggtgggtacaccggcggtgaatgacgagaaagtgcaaaagattcacagcggagaggagttcgacgaagcgcttaagaaggccaagaacaagcttgtggttgtggagtttgccacgagtaagagtgatcagagcaacaagatatatccgtttatggtggagctgagcaggacatgtaacgacgtcgatttcttgctcgtcatgggtgatgagtctgaaacgaccagagagctttgtcggagagagaagatcgagaaagttcctcacttcagcttttataagagcatggagaaaatacacgaggaagaaggtattggaccggaccagctaatgggggacgtactatattacggagacagccactcggcggttgtgcagctgcacggccgagctgatgtggagaagcttattgatgagaaccgtactggaggcaagctgattgtactcgacgtcggtctgaaacactgtgggccatgtgtcaaggtttatccgacggtgctgaagctttcccggtcgatgtcggagaccatcgtgttcgctagaatgaacggggacgagaacgatagctgtatggagtttctaaaggacatgaatgttatcgaagtgcccacgttcttgttcattagaaacggtgatatttgtgggcggtatgttggttccggtaaaggagaacttattggagagattctccggtactcaggcgtccgtgtcacttattaagttgtatcaaaactcgatttattgaaaggaaatgcttttgtgggttttgtttgtaccatccgagaccggttaatatgaaaaaaacgcatgtgattcttggtttg

SEQ ID NO: 109919 - protein, 318 aa, Zea mays subsp. mays
  misc_feature (1)..(318): Ceres Seq. ID no. 15179997
  misc_feature (211)..(313): Pfam Name: Thioredoxin Pfam Description: Thioredoxin
  misc_feature (205)..(317): Homolog of NCBI NO: 40287476 NR Description: thioredoxin [Capsicum annuum]
  misc_feature (199)..(308): Homolog of NCBI NO: 15218902 NR Description: thioredoxin, putative [Arabidopsis thaliana]
  misc_feature (203)..(304): Homolog of NCBI NO: 38048645 NR Description: similar to Drosophila melanogaster thioredoxin
  misc_feature (201)..(304): Homolog of NCBI NO: 34394553 NR Description: putative thioredoxin [Oryza sativa (japonica
  misc_feature (191)..(311): Homolog of NCBI NO: 25990392 NR Description: thioredoxin h [Brassica rapa]
  misc_feature (80)..(317): Homolog of NCBI NO: 34901636 NR Description: putative plastid thioredoxin
  misc_feature (13)..(318): Homolog of NCBI NO: 7489278 NR Description: thioredoxin-like protein CDSP32, chloroplast -
  misc_feature (13)..(318): Homolog of NCBI NO: 21554102 NR Description: chloroplast drought-induced stress protein,
  misc_feature (13)..(318): Homolog of NCBI NO: 15222954 NR Description: thioredoxin family [Arabidopsis thaliana]
IHQSLTNSHTLTMATVANFSANRITTVIPRPTSAVASTSSFVFFDPKPNSLILKQRWVKNPSKRSFSAVKVKAGAASPGKVGTPAVNDEKVQKIHSGEEFDEALKKAKNKLVVVEFATSKSDQSNKIYPFMVELSRTCNDVDFLLVMGDESETTRELCRREKIEKVPHFSFYKSMEKIHEEEGIGPDQLMGDVLYYGDSHSAVVQLHGRADVEKLIDENRTGGKLIVLDVGLKHCGPCVKVYPTVLKLSRSMSETIVFARMNGDENDSCMEFLKDMNVIEVPTFLFIRNGDICGRYVGSGKGELIGEILRYSGVRVTY

SEQ ID NO: 109920 - protein, 306 aa, Zea mays subsp. mays
  misc_feature (1)..(306): Ceres Seq. ID no. 15179998
  misc_feature (199)..(301): Pfam Name: Thioredoxin Pfam Description: Thioredoxin
  misc_feature (193)..(305): Homolog of NCBI NO: 40287476 NR Description: thioredoxin [Capsicum annuum]
  misc_feature (187)..(296): Homolog of NCBI NO: 15218902 NR Description: thioredoxin, putative [Arabidopsis thaliana]
  misc_feature (191)..(292): Homolog of NCBI NO: 38048645 NR Description: similar to Drosophila melanogaster thioredoxin
  misc_feature (189)..(292): Homolog of NCBI NO: 34394553 NR Description: putative thioredoxin [Oryza sativa (japonica
  misc_feature (179)..(299): Homolog of NCBI NO: 25990392 NR Description: thioredoxin h [Brassica rapa]
  misc_feature (68)..(305): Homolog of NCBI NO: 34901636 NR Description: putative plastid thioredoxin
  misc_feature (1)..(306): Homolog of NCBI NO: 7489278 NR Description: thioredoxin-like protein CDSP32, chloroplast -
  misc_feature (1)..(306): Homolog of NCBI NO: 21554102 NR Description: chloroplast drought-induced stress protein,
  misc_feature (1)..(306): Homolog of NCBI NO: 15222954 NR Description: thioredoxin family [Arabidopsis thaliana]
MATVANFSANRITTVIPRPTSAVASTSSFVFFDPKPNSLILKQRWVKNPSKRSFSAVKVKAGAASPGKVGTPAVNDEKVQKIHSGEEFDEALKKAKNKLVVVEFATSKSDQSNKIYPFMVELSRTCNDVDFLLVMGDESETTRELCRREKIEKVPHFSFYKSMEKIHEEEGIGPDQLMGDVLYYGDSHSAVVQLHGRADVEKLIDENRTGGKLIVLDVGLKHCGPCVKVYPTVLKLSRSMSETIVFARMNGDENDSCMEFLKDMNVIEVPTFLFIRNGDICGRYVGSGKGELIGEILRYSGVRVTY

SEQ ID NO: 109921 - protein, 188 aa, Zea mays subsp. mays
  misc_feature (1)..(188): Ceres Seq. ID no. 15179999
  misc_feature (81)..(183): Pfam Name: Thioredoxin Pfam Description: Thioredoxin
  misc_feature (75)..(187): Homolog of NCBI NO: 40287476 NR Description: thioredoxin [Capsicum annuum]
  misc_feature (69)..(178): Homolog of NCBI NO: 15218902 NR Description: thioredoxin, putative [Arabidopsis thaliana]
  misc_feature (73)..(174): Homolog of NCBI NO: 38048645 NR Description: similar to Drosophila melanogaster thioredoxin
  misc_feature (71)..(174): Homolog of NCBI NO: 34394553 NR Description: putative thioredoxin [Oryza sativa (japonica
  misc_feature (61)..(181): Homolog of NCBI NO: 25990392 NR Description: thioredoxin h [Brassica rapa]
  misc_feature (1)..(187): Homolog of NCBI NO: 34901636 NR Description: putative plastid thioredoxin
  misc_feature (1)..(188): Homolog of NCBI NO: 7489278 NR Description: thioredoxin-like protein CDSP32, chloroplast -
  misc_feature (1)..(188): Homolog of NCBI NO: 21554102 NR Description: chloroplast drought-induced stress protein,
  misc_feature (1)..(188): Homolog of NCBI NO: 15222954 NR Description: thioredoxin family [Arabidopsis thaliana]
MVELSRTCNDVDFLLVMGDESETTRELCRREKIEKVPHFSFYKSMEKIHEEEGIGPDQLMGDVLYYGDSHSAVVQLHGRADVEKLIDENRTGGKLIVLDVGLKHCGPCVKVYPTVLKLSRSMSETIVFARMNGDENDSCMEFLKDMNVIEVPTFLFIRNGDICGRYVGSGKGELIGEILRYSGVRVTY

SEQ ID NO: 109922 - DNA, 591 bp, Zea mays subsp. mays
  misc_feature (1)..(591): Ceres Seq. ID no. 15179096
attttcgtctctttcgcttttacatcacaaaaccgaagcgatgcagtcattgaccgtcgcagcagcgaagacgctacgaaaccggatcttctcccggtccggatccacatccgccgggccgagccgctgggccacgccgggccacgaggagcggcccaagggctacttcatgaaccgcacccctccgccgccgggacagtcgcgcaaatgggaggactgggagcttccttgctacatcacgagcttcctcacgatcgtcatcctcggcgtcgggctcaacgctaagcctgatctctcgatcgagacctgggctcatcagaaggccctggaacgcctccagatggagaggctcgcttcgtcagccggagattcttccgattgagcttcaccgcttgatctccggaaggtggattgtggcgatcaagaaggcttggagagagttagggctttctgaagaagtttgtttttggatatcgtttgtttagtcgataatgatgaaataagtgttatttaactgtttttgacgcattacatttctcaaagttgatcacttttgatacaacatctgcaatttgatttgctccttcgaag

SEQ ID NO: 109923 - protein, 126 aa, Zea mays subsp. mays
  misc_feature (1)..(126): Ceres Seq. ID no. 15179097
  misc_feature (1)..(113): Homolog of NCBI NO: 29150398 NR Description: hypothetical protein [Oryza sativa (japonica
  misc_feature (3)..(115): Homolog of NCBI NO: 9858777 NR Description: BAC19.9 [Lycopersicon esculentum]
  misc_feature (19)..(125): Homolog of NCBI NO: 18410807 NR Description: expressed protein [Arabidopsis thaliana]
  misc_feature (19)..(125): Homolog of NCBI NO: 7485503 NR Description: hypothetical protein F15B8.20 - Arabidopsis
  misc_feature (15)..(126): Homolog of NCBI NO: 15227917 NR Description: expressed protein [Arabidopsis thaliana]
FSSLSLLHHKTEAMQSLTVAAAKTLRNRIFSRSGSTSAGPSRWATPGHEERPKGYFMNRTPPPPGQSRKWEDWELPCYITSFLTIVILGVGLNAKPDLSIETWAHQKALERLQMERLASSAGDSSD

SEQ ID NO: 109924 - protein, 113 aa, Zea mays subsp. mays
  misc_feature (1)..(113): Ceres Seq. ID no. 15179098
  misc_feature (1)..(100): Homolog of NCBI NO: 29150398 NR Description: hypothetical protein [Oryza sativa (japonica
  misc_feature (1)..(102): Homolog of NCBI NO: 9858777 NR Description: BAC19.9 [Lycopersicon esculentum]
  misc_feature (6)..(112): Homolog of NCBI NO: 18410807 NR Description: expressed protein [Arabidopsis thaliana]
  misc_feature (6)..(112): Homolog of NCBI NO: 7485503 NR Description: hypothetical protein F15B8.20 - Arabidopsis
  misc_feature (2)..(113): Homolog of NCBI NO: 15227917 NR Description: expressed protein [Arabidopsis thaliana]
MQSLTVAAAKTLRNRIFSRSGSTSAGPSRWATPGHEERPKGYFMNRTPPPPGQSRKWEDWELPCYITSFLTIVILGVGLNAKPDLSIETWAHQKALERLQMERLASSAGDSSD

SEQ ID NO: 109925 - protein, 94 aa, Zea mays subsp. mays
  misc_feature (1)..(94): Ceres Seq. ID no. 15179099
IFVSFAFTSQNRSDAVIDRRSSEDATKPDLLPVRIHIRRAEPLGHAGPRGAAQGLLHEPHPSAAGTVAQMGGLGASLLHHELPHDRHPRRRAQR

SEQ ID NO: 109926 - DNA, 1175 bp, Zea mays subsp. mays; identical to SEQ ID NO: 56822
  misc_feature (1)..(1175): Ceres Seq. ID no. 15179075

SEQ ID NO: 109927 - protein, 285 aa, Zea mays subsp. mays; identical to SEQ ID NO: 56823
  misc_feature (1)..(285): Ceres Seq. ID no. 15179076
  misc_feature (78)..(132): Pfam Name: Homeobox domain Pfam Description: Homeobox domain
  misc_feature (7)..(280): Homolog of NCBI NO: 15232066 NR Description: Homeobox-leucine zipper protein/HD-Zip
  misc_feature (78)..(273): Homolog of NCBI NO: 6175248 NR Description: jasmonic acid 1 [Lycopersicon esculentum]
  misc_feature (37)..(283): Homolog of NCBI NO: 7446243 NR Description: homeotic protein - carrot
  misc_feature (24)..(219): Homolog of NCBI NO: 19071644 NR Description: putative DNA-binding protein
  misc_feature (43)..(231): Homolog of NCBI NO: 25386233 NR Description: hypothetical protein T2P11.15 - Arabidopsis
  misc_feature (47)..(285): Homolog of NCBI NO: 1435022 NR Description: DNA-binding protein [Daucus carota]
  misc_feature (1)..(231): Homolog of NCBI NO: 18396130 NR Description: homeobox-leucine zipper protein. putative
  misc_feature (1)..(285): Homolog of NCBI NO: 7446247 NR Description: homeotic protein - common sunflower
  misc_feature (7)..(285): Homolog of NCBI NO: 21555784 NR Description: homeobox gene 13 protein [Arabidopsis thaliana]
  misc_feature (1)..(285): Homolog of NCBI NO: 15222452 NR Description: homeobox-leucine zipper protein ATHB-13 (HD-Zip

SEQ ID NO: 109928 - protein, 279 aa, Zea mays subsp. mays; identical to SEQ ID NO: 56824
  misc_feature (1)..(279): Ceres Seq. ID no. 15179077
  misc_feature (72)..(126): Pfam Name: Homeobox domain Pfam Description: Homeobox domain
  misc_feature (1)..(274): Homolog of NCBI NO: 15232066 NR Description: Homeobox-leucine zipper protein/HD-Zip
  misc_feature (72)..(267): Homolog of NCBI NO: 6175248 NR Description: jasmonic acid 1 [Lycopersicon esculentum]
  misc_feature (31)..(277): Homolog of NCBI NO: 7446243 NR Description: homeotic protein - carrot
  misc_feature (18)..(213): Homolog of NCBI NO: 19071644 NR Description: putative DNA-binding protein
  misc_feature (37)..(225): Homolog of NCBI NO: 25386233 NR Description: hypothetical protein T2P11.15 - Arabidopsis
  misc_feature (41)..(279): Homolog of NCBI NO: 1435022 NR Description: DNA-binding protein [Daucus carota]
  misc_feature (1)..(225): Homolog of NCBI NO: 18396130 NR Description: homeobox-leucine zipper protein. putative
  misc_feature (1)..(279): Homolog of NCBI NO: 7446247 NR Description: homeotic protein - common sunflower
  misc_feature (1)..(279): Homolog of NCBI NO: 21555784 NR Description: homeobox gene 13 protein [Arabidopsis thaliana]
  misc_feature (1)..(279): Homolog of NCBI NO: 15222452 NR Description: homeobox-leucine zipper protein ATHB-13 (HD-Zip

SEQ ID NO: 109929 - protein, 271 aa, Zea mays subsp. mays; identical to SEQ ID NO: 56825
  misc_feature (1)..(271): Ceres Seq. ID no. 15179078
  misc_feature (64)..(118): Pfam Name: Homeobox domain Pfam Description: Homeobox domain
  misc_feature (29)..(217): Homolog of NCBI NO: 25386233 NR Description: hypothetical protein T2P11.15 - Arabidopsis
  misc_feature (33)..(271): Homolog of NCBI NO: 1435022 NR Description: DNA-binding protein [Daucus carota]
  misc_feature (1)..(217): Homolog of NCBI NO: 18396130 NR Description: homeobox-leucine zipper protein. putative
  misc_feature (23)..(269): Homolog of NCBI NO: 7446243 NR Description: homeotic protein - carrot
  misc_feature (1)..(266): Homolog of NCBI NO: 15232066 NR Description: Homeobox-leucine zipper protein/HD-Zip
  misc_feature (64)..(259): Homolog of NCBI NO: 6175248 NR Description: jasmonic acid 1 [Lycopersicon esculentum]
  misc_feature (10)..(205): Homolog of NCBI NO: 19071644 NR Description: putative DNA-binding protein
  misc_feature (1)..(271): Homolog of NCBI NO: 7446247 NR Description: homeotic protein - common sunflower
  misc_feature (1)..(271): Homolog of NCBI NO: 21555784 NR Description: homeobox gene 13 protein [Arabidopsis thaliana]
  misc_feature (1)..(271): Homolog of NCBI NO: 15222452 NR Description: homeobox-leucine zipper protein ATHB-13 (HD-Zip

SEQ ID NO: 109930 - protein, 224 aa, Zea mays subsp. mays
  misc_feature (1)..(224): Ceres Seq. ID no. 15179079
  misc_feature (17)..(71): Pfam Name: Homeobox domain Pfam Description: Homeobox domain
  misc_feature (1)..(219): Homolog of NCBI NO: 15232066 NR Description: Homeobox-leucine zipper protein/HD-Zip
  misc_feature (17)..(212): Homolog of NCBI NO: 6175248 NR Description: jasmonic acid 1 [Lycopersicon esculentum]
  misc_feature (1)..(222): Homolog of NCBI NO: 7446243 NR Description: homeotic protein - carrot
  misc_feature (1)..(158): Homolog of NCBI NO: 19071644 NR Description: putative DNA-binding protein
  misc_feature (1)..(170): Homolog of NCBI NO: 25386233 NR Description: hypothetical protein T2P11.15 - Arabidopsis
  misc_feature (1)..(224): Homolog of NCBI NO: 1435022 NR Description: DNA-binding protein [Daucus carota]
  misc_feature (1)..(170): Homolog of NCBI NO: 18396130 NR Description: homeobox-leucine zipper protein. putative
  misc_feature (1)..(224): Homolog of NCBI NO: 7446247 NR Description: homeotic protein - common sunflower
  misc_feature (1)..(224): Homolog of NCBI NO: 21555784 NR Description: homeobox gene 13 protein [Arabidopsis thaliana]
  misc_feature (1)..(224): Homolog of NCBI NO: 15222452 NR Description: homeobox-leucine zipper protein ATHB-13 (HD-Zip
MNGEEDYSDDGSQMGEKKRRLNMEQVKTLEKNFELGNKLDPERKMQLARALGLQPRQIAIWFQNRRARWKTKQLEKDYDTLKRQFDSLKAENDHLQTHNQKLQAEIMSSRNREQTESINLNKETEGSCSNRSDNSSDNFRLDISTAVPSVDSTITGGHPPAPQTVGRHFFPPATATTTTTTMQFFQNSSSGQSMVKEENSISNMFCAMDDHSGFWPWLDQQQYN

SEQ ID NO: 109931 - DNA, 786 bp, Zea mays subsp. mays
  misc_feature (1)..(786): Ceres Seq. ID no. 15174400
agatctatcataccgtctcctctcaacgaaaacttacaaaaaattcaccctaaatactttagtttataaataaagctcccaaaatctaagagaggagaagacaaagacttacaagataaaaggcatcataatggccaaattcttcatcgtgttccttgcctctgccctatgtttcaccactctccttcacttggtggccgctgatgccgacgactttgaccgtttcaacatcacgggctccgtctactgcgacacatgccgcgtccaattcgttacccgcctcagtaaattcctcgaaggggcaaaggtaaagcttgagtgcaagagtcgtgtgaaccagacagtgacactgaccaaagaagctgtgactgacaaagacggaaaataccagatggaagttatgggagaccacgaagaggaactgtgcgagatcatcctcgtccaatcaccggacgcagagtgtggcgaagtgaacaacgaagagttcctaagaaacgcagcaaggatcagtctcacggctaacgatggcattgtctctaatgagattcgaaccattaacccacttgggttcatgaggaagactcctctcgccgattgtcctcaagttttcaaggagcttggaatcgtccctgacgtcatcttctaagcttaataccgatatacatcgatctctgaacaattttaatttttgttgtaactctttacatttcgtatataacaacatttatatttgatttcacttgttgtcggtaaaagatacttaactaacgctgttttcttctttcc

SEQ ID NO: 109932 - protein, 171 aa, Zea mays subsp. mays
  misc_feature (1)..(171): Ceres Seq. ID no. 15174401
  misc_feature (34)..(158): Pfam Name: Pollen proteins Ole e I family Pfam Description: Pollen proteins Ole e I family
  misc_feature (1)..(167): Homolog of NCBI NO: 125887 NR Description: Anther specific LAT52 protein precursor
  misc_feature (1)..(165): Homolog of NCBI NO: 22074346 NR Description: Che a 1 allergen precursor [Chenopodium album]
  misc_feature (1)..(168): Homolog of NCBI NO: 28380096 NR Description: Olee1-like protein precursor
  misc_feature (57)..(171): Homolog of NCBI NO: 28393099 NR Description: unknown protein [Arabidopsis thaliana]
  misc_feature (16)..(171): Homolog of NCBI NO: 9758935 NR Description: Ole e I (main olive allergen)-like protein
  misc_feature (1)..(168): Homolog of NCBI NO: 7486300 NR Description: hypothetical protein F28J12.250 - Arabidopsis
  misc_feature (2)..(171): Homolog of NCBI NO: 18415132 NR Description: Ole e I (main olive allergen)-related protein
  misc_feature (2)..(171): Homolog of NCBI NO: 21593871 NR Description: Ole e I (main olive allergen)-like protein
  misc_feature (2)..(171): Homolog of NCBI NO: 18422603 NR Description: Ole e I (main olive allergen)-related protein
  misc_feature (1)..(171): Homolog of NCBI NO: 15218844 NR Description: expressed protein [Arabidopsis thaliana]
MAKFFIVFLASALCFTTLLHLVAADADDFDRFNITGSVYCDTCRVQFVTRLSKFLEGAKVKLECKSRVNQTVTLTKEAVTDKDGKYQMEVMGDHEEELCEIILVQSPDAECGEVNNEEFLRNAARISLTANDGIVSNEIRTINPLGFMRKTPLADCPQVFKELGIVPDVIF

SEQ ID NO: 109933 - DNA, 806 bp, Zea mays subsp. mays
  misc_feature (1)..(806): Ceres Seq. ID no. 15178993
aatttcatctttggagaggagtgatcggaaactatcatcatcggcgatgggttggctgacgagatttctaaccgcggtagcgtttttagccgccggagttatattctcaccggagacattcggatcgctgtccaagggcgagaatccagcgaaggttttgatattcgtgaagctagctcatctcctcagcttcgctacagcttggggagctgctctctgggctaccttcatcggcggaatcatcatgttcaagaacttaccgaggcatcagttcggtaacctccagagcaagatgtttccagcttatttcactctcgttggttcttgctgcgccatttcactctctgcgtttggttacttgcatccatggaagtcatcttctaccgcggagaagtatcagcttgggttcctcgtctccgcttttgctttcaatctcaccaatttgctcgtcttcactcccatgaccatcgatatgatgaagcaaaggcacaaagtagagagagagaacaacattggagatgaagttggttggtccaagaacagggagaaggctaagactatccctaagctagctgccatgaacaagaagtttggtatgattcacggcttgtcgtctctagctaacatcttttcttttgggagccttgccatgcattcttggtaccttgctgggaagttggatctctaagtttcttttcacaaaggtctgagctttttatgtcacccttcatgaataaaatatatatctcttgctttgtaagattatcatacccggcagtgaaatcatgaaacagtttgttataatg

SEQ ID NO: 109934 - protein, 228 aa, Zea mays subsp. mays
  misc_feature (1)..(228): Ceres Seq. ID no. 15178994
  misc_feature (60)..(227): Homolog of NCBI NO: 40741706 NR Description: hypothetical protein AN4553.2 [Aspergillus
  misc_feature (57)..(226): Homolog of NCBI NO: 31204397 NR Description: ENSANGP00000020420 [Anopheles gambiae]
  misc_feature (60)..(226): Homolog of NCBI NO: 38112002 NR Description: hypothetical protein MG10156.4 [Magnaporthe
  misc_feature (43)..(224): Homolog of NCBI NO: 27719651 NR Description: similar to hypothetical protein MBC3205
  misc_feature (56)..(224): Homolog of NCBI NO: 37552510 NR Description: similar to Hypothetical protein MGC18837 [Homo
  misc_feature (43)..(224): Homolog of NCBI NO: 7259296 NR Description: contains transmembrane (TM) region [Mus musculus]
  misc_feature (43)..(224): Homolog of NCBI NO: 31982159 NR Description: hypothetical protein MGC18837 [Mus musculus]
  misc_feature (58)..(202): Homolog of NCBI NO: 11357672 NR Description: hypothetical protein F26K9.10 - Arabidopsis
  misc_feature (16)..(215): Homolog of NCBI NO: 15724187 NR Description: AT3g62580/T12C14_280 [Arabidopsis thaliana]
  misc_feature (16)..(228): Homolog of NCBI NO: 18412424 NR Description: membrane protein -related [Arabidopsis thaliana]
ISSLERSDRKLSSSAMGWLTRFLTAVAFLAAGVIFSPETFGSLSKGENPAKVLIFVKLAHLLSFATAWGAALWATFIGGIIMFKNLPRHQFGNLQSKMFPAYFTLVGSCCAISLSAFGYLHPWKSSSTAEKYQLGFLVSAFAFNLTNLLVFTPMTIDMMKQRHKVERENNIGDEVGWSKNREKAKTIPKLAAMNKKFGMIHGLSSLANIFSFGSLAMHSWYLAGKLDL

SEQ ID NO: 109935 - protein, 213 aa, Zea mays subsp. mays
  misc_feature (1)..(213): Ceres Seq. ID no. 15178995
  misc_feature (45)..(212): Homolog of NCBI NO: 40741706 NR Description: hypothetical protein AN4553.2 [Aspergillus
  misc_feature (42)..(211): Homolog of NCBI NO: 31204397 NR Description: ENSANGP00000020420 [Anopheles gambiae]
  misc_feature (45)..(211): Homolog of NCBI NO: 38112002 NR Description: hypothetical protein MG10156.4 [Magnaporthe
  misc_feature (28)..(209): Homolog of NCBI NO: 27719651 NR Description: similar to hypothetical protein MBC3205
  misc_feature (41)..(209): Homolog of NCBI NO: 37552510 NR Description: similar to Hypothetical protein MGC18837 [Homo
  misc_feature (28)..(209): Homolog of NCBI NO: 7259296 NR Description: contains transmembrane (TM) region [Mus musculus]
  misc_feature (28)..(209): Homolog of NCBI NO: 31982159 NR Description: hypothetical protein MGC18837 [Mus musculus]
  misc_feature (43)..(187): Homolog of NCBI NO: 11357672 NR Description: hypothetical protein F26K9.10 - Arabidopsis
  misc_feature (1)..(200): Homolog of NCBI NO: 15724187 NR Description: AT3g62580/T12C14_280 [Arabidopsis thaliana]
  misc_feature (1)..(213): Homolog of NCBI NO: 18412424 NR Description: membrane protein -related [Arabidopsis thaliana]
MGWLTRFLTAVAFLAAGVIFSPETFGSLSKGENPAKVLIFVKLAHLLSFATAWGAALWATFIGGIIMFKNLPRHQFGNLQSKMFPAYFTLVGSCCAISLSAFGYLHPWKSSSTAEKYQLGFLVSAFAFNLTNLLVFTPMTIDMMKQRHKVERENNIGDEVGWSKNREKAKTIPKLAAMNKKFGMIHGLSSLANIFSFGSLAMHSWYLAGKLDL

SEQ ID NO: 109936 - protein, 147 aa, Zea mays subsp. mays
  misc_feature (1)..(147): Ceres Seq. ID no. 15178996
  misc_feature (1)..(146): Homolog of NCBI NO: 40741706 NR Description: hypothetical protein AN4553.2 [Aspergillus
  misc_feature (1)..(145): Homolog of NCBI NO: 31204397 NR Description: ENSANGP00000020420 [Anopheles gambiae]
  misc_feature (1)..(145): Homolog of NCBI NO: 38112002 NR Description: hypothetical protein MG10156.4 [Magnaporthe
  misc_feature (1)..(143): Homolog of NCBI NO: 27719651 NR Description: similar to hypothetical protein MBC3205
  misc_feature (1)..(143): Homolog of NCBI NO: 37552510 NR Description: similar to Hypothetical protein MGC18837 [Homo
  misc_feature (1)..(143): Homolog of NCBI NO: 7259296 NR Description: contains transmembrane (TM) region [Mus musculus]
  misc_feature (1)..(143): Homolog of NCBI NO: 31982159 NR Description: hypothetical protein MGC18837 [Mus musculus]
  misc_feature (1)..(121): Homolog of NCBI NO: 11357672 NR Description: hypothetical protein F26K9.10 - Arabidopsis
  misc_feature (1)..(134): Homolog of NCBI NO: 15724187 NR Description: AT3g62580/T12C14_280 [Arabidopsis thaliana]
  misc_feature (1)..(147): Homolog of NCBI NO: 18412424 NR Description: membrane protein -related [Arabidopsis thaliana]
MFKNLPRHQFGNLQSKMFPAYFTLVGSCCAISLSAFGYLHPWKSSSTAEKYQLGFLVSAFAFNLTNLLVFTPMTIDMMKQRHKVERENNIGDEVGWSKNREKAKTIPKLAAMNKKFGMIHGLSSLANIFSFGSLAMHSWYLAGKLDL

SEQ ID NO: 109937 - DNA, 1264 bp, Zea mays subsp. mays
  misc_feature (1)..(1264): Ceres Seq. ID no. 15177718
ttttccgacggaaaaaccaaggaatctcctccactatgctctctctatactcctcctctaccatcaaagcctcttttcattcttcctttcctcctctccgatcatcaccaccaccactctccgttggatctcatatccggctcgttaagcgagatcactccgtagccgctgcttctggtggtgtctcgatgtcaacgaacagagattctcacggatcgtcctcgcaggtcgctgaaccgtttttcagaagcgttttaggacagatggaaacggtttacctaaaccggaacccgacgcctagatcagtcttggagcttgtcagatccgttgatgacgagcagctttgctatgatcatctcgctttcaggacctttgggattggcggttatgggattgactcgcttgcaagcttcttccttgactatgggtatacccaaatggatgagctgaggtttcctgccaaaaagctgagagctttgtggtttgcgcctcctcatgcttctgctgttcctggtggaagtggtgtagatggtcctttaccgagagtttttatctcagagctccttgtcgaacagatgagtacacagactcaggatgtgatcaggagatacactgaaacatcgcctaatgggagaaagtatgctgctctctctagtgctttgggtagtttaccatgggaaaagcccctatcttctgagtttgaacagttggctagggaaagtgaatacgcagcatggacgcttgccaatggctatgcacttaaccacgtgactatctctgtccatcggcttaaatctcatctaaacaagattaagaagctcaatcagttttttgaagaaaaaggtttcaaattgaactctgaaggaggagtccttaaagttagtcctgatggtggtttgctgcaaagctctactgtggcagactctatttctttcaagttctctgatggagtcaccaaatctatcccttgttcatacattgagtttgctgaacgccttgtgcttccccagtttcagaatgtacccgaaagcgatataaaagagtttcatagaagagatggatttgaggtgggaaatgcagacaagatcttcgagagcacaaatcaggagcagctttcccgacgaaccggctgatggcaaaatagccacagcttcagccaccatataaattccatcatgccttgtacatttacatgtaaagaataagagctgaaactgtttgtaatgtctttaatcagtaacaataactaatccaaaacctccct

SEQ ID NO: 109938 - protein, 376 aa, Zea mays subsp. mays
  misc_feature (1)..(376): Ceres Seq. ID no. 15177719
  misc_feature (92)..(331): Homolog of NCBI NO: 27364716 NR Description: Conserved hypothetical protein [Vibrio vulnificus
  misc_feature (92)..(370): Homolog of NCBI NO: 24372211 NR Description: conserved hypothetical protein [Shewanella
  misc_feature (92)..(341): Homolog of NCBI NO: 15642610 NR Description: conserved hypothetical protein [Vibrio cholerae]
  misc_feature (92)..(367): Homolog of NCBI NO: 28899568 NR Description: conserved hypothetical protein
  misc_feature (151)..(375): Homolog of NCBI NO: 22973852 NR Description: hypothetical protein [Chloroflexus aurantiacus]
  misc_feature (70)..(366): Homolog of NCBI NO: 18396149 NR Description: expressed protein [Arabidopsis thaliana]
  misc_feature (77)..(366): Homolog of NCBI NO: 15223410 NR Description: expressed protein [Arabidopsis thaliana]
  misc_feature (77)..(375): Homolog of NCBI NO: 37535166 NR Description: unknown protein [Oryza sativa (japonica
  misc_feature (12)..(376): Homolog of NCBI NO: 18390717 NR Description: expressed protein [Arabidopsis thaliana]
FRRKNQGISSTMLSLYSSSTIKASFHSSFPPLRSSPPPLSVGSHIRLVKRDHSVAAASGGVSMSTNRDSHGSSSQVAEPFFRSVLGQMETVYLNRNPTPRSVLELVRSVDDEQLCYDHLAFRTFGIGGYGIDSLASFFLDYGYTQMDELRFPAKKLRALWFAPPHASAVPGGSGVDGPLPRVFISELLVEQMSTQTQDVIRRYTETSPNGRKYAALSSALGSLPWEKPLSSEFEQLARESEYAAWTLANGYALNHVTISVHRLKSHLNKIKKLNQFFEEKGFKLNSEGGVLKVSPDGGLLQSSTVADSISFKFSDGVTKSIPCSYIEFAERLVLPQFQNVPESDIKEFHRRDGFEVGNADKIFESTNQEQLSRRTG

SEQ ID NO: 109939 - protein, 365 aa, Zea mays subsp. mays
  misc_feature (1)..(365): Ceres Seq. ID no. 15177720
  misc_feature (81)..(320): Homolog of NCBI NO: 27364716 NR Description: Conserved hypothetical protein [Vibrio vulnificus
  misc_feature (81)..(359): Homolog of NCBI NO: 24372211 NR Description: conserved hypothetical protein [Shewanella
  misc_feature (81)..(330): Homolog of NCBI NO: 15642610 NR Description: conserved hypothetical protein [Vibrio cholerae]
  misc_feature (81)..(356): Homolog of NCBI NO: 28899568 NR Description: conserved hypothetical protein
  misc_feature (140)..(364): Homolog of NCBI NO: 22973852 NR Description: hypothetical protein [Chloroflexus aurantiacus]
  misc_feature (59)..(355): Homolog of NCBI NO: 18396149 NR Description: expressed protein [Arabidopsis thaliana]
  misc_feature (66)..(355): Homolog of NCBI NO: 15223410 NR Description: expressed protein [Arabidopsis thaliana]
  misc_feature (66)..(364): Homolog of NCBI NO: 37535166 NR Description: unknown protein [Oryza sativa (japonica
  misc_feature (1)..(365): Homolog of NCBI NO: 18390717 NR Description: expressed protein [Arabidopsis thaliana]
MLSLYSSSTIKASFHSSFPPLRSSPPPLSVGSHIRLVKRDHSVAAASGGVSMSTNRDSHGSSSQVAEPFFRSVLGQMETVYLNRNPTPRSVLELVRSVDDEQLCYDHLAFRTFGIGGYGIDSLASFFLDYGYTQMDELRFPAKKLRALWFAPPHASAVPGGSGVDGPLPRVFISELLVEQMSTQTQDVIRRYTETSPNGRKYAALSSALGSLPWEKPLSSEFEQLARESEYAAWTLANGYALNHVTISVHRLKSHLNKIKKLNQFFEEKGFKLNSEGGVLKVSPDGGLLQSSTVADSISFKFSDGVTKSIPCSYIEFAERLVLPQFQNVPESDIKEFHRRDGFEVGNADKIFESTNQEQLSRRTG

SEQ ID NO: 109940 - protein, 314 aa, Zea mays subsp. mays
  misc_feature (1)..(314): Ceres Seq. ID no. 15177721
  misc_feature (30)..(269): Homolog of NCBI NO: 27364716 NR Description: Conserved hypothetical protein [Vibrio vulnificus
  misc_feature (30)..(308): Homolog of NCBI NO: 24372211 NR Description: conserved hypothetical protein [Shewanella
  misc_feature (30)..(279): Homolog of NCBI NO: 15642610 NR Description: conserved hypothetical protein [Vibrio cholerae]
  misc_feature (30)..(305): Homolog of NCBI NO: 28899568 NR Description: conserved hypothetical protein
  misc_feature (89)..(313): Homolog of NCBI NO: 22973852 NR Description: hypothetical protein [Chloroflexus aurantiacus]
  misc_feature (8)..(304): Homolog of NCBI NO: 18396149 NR Description: expressed protein [Arabidopsis thaliana]
  misc_feature (15)..(304): Homolog of NCBI NO: 15223410 NR Description: expressed protein [Arabidopsis thaliana]
  misc_feature (15)..(313): Homolog of NCBI NO: 37535166 NR Description: unknown protein [Oryza sativa (japonica
  misc_feature (1)..(314): Homolog of NCBI NO: 18390717 NR Description: expressed protein [Arabidopsis thaliana]
MSTNRDSHGSSSQVAEPFFRSVLGQMETVYLNRNPTPRSVLELVRSVDDEQLCYDHLAFRTFGIGGYGIDSLASFFLDYGYTQMDELRFPAKKLRALWFAPPHASAVPGGSGVDGPLPRVFISELLVEQMSTQTQDVIRRYTETSPNGRKYAALSSALGSLPWEKPLSSEFEQLARESEYAAWTLANGYALNHVTISVHRLKSHLNKIKKLNQFFEEKGFKLNSEGGVLKVSPDGGLLQSSTVADSISFKFSDGVTKSIPCSYIEFAERLVLPQFQNVPESDIKEFHRRDGFEVGNADKIFESTNQEQLSRRTG

SEQ ID NO: 109941 - DNA, 856 bp, Zea mays subsp. mays
  misc_feature (1)..(856): Ceres Seq. ID no. 15178359
acgacctaaaaaaatcagagattcgagttttcgtactcttctctctctcttaatacgattctgattctatttttctcaccaaccattgaaaattctccatagacctcttctctttttgctatccaattttatctgccatgggacacggaacaatggcgacaccaccgacaaccaccatcaccgccaagacgacgctcgtgttcacgtacggtactctaaagagaggattctcgaaccacgtcctgatgcaagatctgatccgatcaggcgacgcatctttaaaaggagtctaccaaacgctagagaaatatcccctcgtctgcggaccataccgagtccctttcctcctcaacaagcctggaacgggccatcgcgtgacgggagagctttacgtggtttctcctcgcggtctctcgcgtctggacgagcttgaagggatcgctaggggacattacgtgaggcaaccgatccgtctagctgctgctgagaaagaaggaggagatctggaagcagagcatgcgacgtcgtcgtgcgtggtggaagcgtattacgcgcacaagagctacgaggaggagctgtggaagaggaatggagggagatcgttcggcgcgtacacggagaacgaagcgcgtggatatgtgaagcgtaaggatcggccgcagcatcttaccttcttggaccatatccgtattttcgtttcttctccatgtgactgatttcgattattccctctctcattttttatcttattcaagggaaattaaataagaaagtacaaacgcaaacaactagtttcatctattctaaggggtcccacttgttcgtcgtacccgtacaacggttgttgttagttgtt

SEQ ID NO: 109942 - protein, 192 aa, Zea mays subsp. mays
  misc_feature (1)..(192): Ceres Seq. ID no. 15178360
  misc_feature (28)..(141): Pfam Name: Uncharacterised protein family (UPF0131) Pfam Description: Uncharacterised protein family (UPF0131)
  misc_feature (20)..(148): Homolog of NCBI NO: 33875960 NR Description: LOC87769 protein [Homo sapiens]
  misc_feature (21)..(146): Homolog of NCBI NO: 34876150 NR Description: similar to cDNA sequence BC006662 [Rattus
  misc_feature (15)..(148): Homolog of NCBI NO: 13279332 NR Description: Unknown (protein for IMAGE:2822295) [Homo sapiens]
  misc_feature (20)..(192): Homolog of NCBI NO: 15237492 NR Description: expressed protein [Arabidopsis thaliana]
  misc_feature (14)..(99): Homolog of NCBI NO: 24762794 NR Description: CG2803-PA [Drosophila melanogaster]
  misc_feature (7)..(189): Homolog of NCBI NO: 29126342 NR Description: unknown protein [Oryza sativa (japonica
  misc_feature (16)..(192): Homolog of NCBI NO: 11387354 NR Description: Hypothetical UPF0131 protein At3g02910
  misc_feature (1)..(192): Homolog of NCBI NO: 18396380 NR Description: expressed protein [Arabidopsis thaliana]
  misc_feature (1)..(192): Homolog of NCBI NO: 21555032 NR Description: unknown [Arabidopsis thaliana]
MGHGTMATPPTTTITAKTTLVFTYGTLKRGFSNHVLMQDLIRSGDASLKGVYQTLEKYPLVCGPYRVPFLLNKPGTGHRVTGELYVVSPRGLSRLDELEGIARGHYVRQPIRLAAAEKEGGDLEAEHATSSCVVEAYYAHKSYEEELWKRNGGRSFGAYTENEARGYVKRKDRPQHLTFLDHIRIFVSSPCD

SEQ ID NO: 109943 - protein, 187 aa, Zea mays subsp. mays
  misc_feature (1)..(187): Ceres Seq. ID no. 15178361
  misc_feature (23)..(136): Pfam Name: Uncharacterised protein family (UPF0131) Pfam Description: Uncharacterised protein family (UPF0131)
  misc_feature (9)..(94): Homolog of NCBI NO: 24762794 NR Description: CG2803-PA [Drosophila melanogaster]
  misc_feature (15)..(143): Homolog of NCBI NO: 33875960 NR Description: LOC87769 protein [Homo sapiens]
  misc_feature (16)..(141): Homolog of NCBI NO: 34876150 NR Description: similar to cDNA sequence BC006662 [Rattus
  misc_feature (10)..(143): Homolog of NCBI NO: 13279332 NR Description: Unknown (protein for IMAGE:2822295) [Homo sapiens]
  misc_feature (15)..(187): Homolog of NCBI NO: 15237492 NR Description: expressed protein [Arabidopsis thaliana]
  misc_feature (2)..(184): Homolog of NCBI NO: 29126342 NR Description: unknown protein [Oryza sativa (japonica
  misc_feature (11)..(187): Homolog of NCBI NO: 11387354 NR Description: Hypothetical UPF0131 protein At3g02910
  misc_feature (1)..(187): Homolog of NCBI NO: 18396380 NR Description: expressed protein [Arabidopsis thaliana]
  misc_feature (1)..(187): Homolog of NCBI NO: 21555032 NR Description: unknown [Arabidopsis thaliana]
MATPPTTTITAKTTLVFTYGTLKRGFSNHVLMQDLIRSGDASLKGVYQTLEKYPLVCGPYRVPFLLNKPGTGHRVTGELYVVSPRGLSRLDELEGIARGHYVRQPIRLAAAEKEGGDLEAEHATSSCVVEAYYAHKSYEEELWKRNGGRSFGAYTENEARGYVKRKDRPQHLTFLDHIRIFVSSPCD

SEQ ID NO: 109944 - protein, 156 aa, Zea mays subsp. mays
  misc_feature (1)..(156): Ceres Seq. ID no. 15178362
  misc_feature (1)..(105): Pfam Name: Uncharacterised protein family (UPF0131) Pfam Description: Uncharacterised protein family (UPF0131)
  misc_feature (1)..(63): Homolog of NCBI NO: 24762794 NR Description: CG2803-PA [Drosophila melanogaster]
  misc_feature (1)..(112): Homolog of NCBI NO: 33875960 NR Description: LOC87769 protein [Homo sapiens]
  misc_feature (1)..(110): Homolog of NCBI NO: 34876150 NR Description: similar to cDNA sequence BC006662 [Rattus
  misc_feature (1)..(112): Homolog of NCBI NO: 13279332 NR Description: Unknown (protein for IMAGE:2822295) [Homo sapiens]
  misc_feature (1)..(156): Homolog of NCBI NO: 15237492 NR Description: expressed protein [Arabidopsis thaliana]
  misc_feature (1)..(153): Homolog of NCBI NO: 29126342 NR Description: unknown protein [Oryza sativa (japonica
  misc_feature (1)..(156): Homolog of NCBI NO: 11387354 NR Description: Hypothetical UPF0131 protein At3g02910
  misc_feature (1)..(156): Homolog of NCBI NO: 18396380 NR Description: expressed protein [Arabidopsis thaliana]
  misc_feature (1)..(156): Homolog of NCBI NO: 21555032 NR Description: unknown [Arabidopsis thaliana]
MQDLIRSGDASLKGVYQTLEKYPLVCGPYRVPFLLNKPGTGHRVTGELYVVSPRGLSRLDELEGIARGHYVRQPIRLAAAEKEGGDLEAEHATSSCVVEAYYAHKSYEEELWKRNGGRSFGAYTENEARGYVKRKDRPQHLTFLDHIRIFVSSPCD

SEQ ID NO: 109945 - DNA, 487 bp, Zea mays subsp. mays
  misc_feature (1)..(487): Ceres Seq. ID no. 15178813
acactctggaaaaaaaacctttctaaagctttaagcattttcgaatcaacaaaaaaaaaaacactagcctccttttgctccctctcccttctctctctaacacaaatggcgttgtcaaagtcttccgtcgttgctctcgtcgcggtgatcgtctccgtcgtagctaccgtcgcttctgctcagtctgagtctccagccccaagccctacgtccggatctggtgctttctctccgtcgatcgtttcagctggagttgcggccgtcgcggctcttgttttcgggtctgctcttcggatctaagtctttgcgatggagattcgtatttttggaaaaaaaaattgatcgggtatagcattattattattattcatgatgttcgttcgtgtgtattccggagctatagatctctttctatttttctatatcttaccttccttcatatctgtatgagggtagtactatatctatatctagagtattgtggttt

SEQ ID NO: 109946 - protein, 99 aa, Zea mays subsp. mays
  misc_feature (1)..(99): Ceres Seq. ID no. 15178814
  misc_feature (37)..(98): Homolog of NCBI NO: 7484750 NR Description: gibberellin-responsive protein CRG16 - cucumber
  misc_feature (42)..(99): Homolog of NCBI NO: 25992536 NR Description: fiber protein Fb7 [Gossypium barbadense]
  misc_feature (36)..(99): Homolog of NCBI NO: 15239156 NR Description: arabinogalactan-protein (AGP15) [Arabidopsis
TLWKKNLSKALSIFESTKKKTLASFCSLSLLSLTQMALSKSSVVALVAVIVSVVATVASAQSESPAPSPTSGSGAFSPSIVSAGVAAVAALVFGSALRI

SEQ ID NO: 109947 - protein, 64 aa, Zea mays subsp. mays
  misc_feature (1)..(64): Ceres Seq. ID no. 15178815
  misc_feature (2)..(63): Homolog of NCBI NO: 7484750 NR Description: gibberellin-responsive protein CRG16 - cucumber
  misc_feature (7)..(64): Homolog of NCBI NO: 25992536 NR Description: fiber protein Fb7 [Gossypium barbadense]
  misc_feature (1)..(64): Homolog of NCBI NO: 15239156 NR Description: arabinogalactan-protein (AGP15) [Arabidopsis
MALSKSSVVALVAVIVSVVATVASAQSESPAPSPTSGSGAFSPSIVSAGVAAVAALVFGSALRI

SEQ ID NO: 109948 - DNA, 632 bp, Zea mays subsp. mays
  misc_feature (1)..(632): Ceres Seq. ID no. 15178120
attaatcattatccaatcatagaagtaagaagaaacaggttgcgtttctgactttctccgcaagaatcaaacatcttcttcttctcattccatcaatcctctctctattatcagaagtaaagatgaataaaggcagcagctttaagctggacaacgatttcgaaaagaggaaagctgaagctggaaggatcttagagaagtaccctgacagaatcccggtgattgtggaaaaggctgagaaaagtgatatcccagacattgacaagaagaaataccttgtgccatcagacctaacagttggacaatttgtgtatgtgattcggaagagaatcaaactaagtgccgagaaagcaatcttcatattcgtagacaatgtccttcctcccacaggagagattatgtcaagcgtctacgaggagaagaaagaccaagatggcttcctctacatcacttacagtggcgagaacacatttggtgcttcctcaatctaaacctcagtgtgatgttcccctctttcaatttgtgtatatagttctaataataatttatcgtttctatgttcttgcactttgttaaaatgtatatagactaatattaaaatattatctttattcgcattattatcttaaagt

SEQ ID NO: 109949 - protein, 122 aa, Zea mays subsp. mays
  misc_feature (1)..(122): Ceres Seq. ID no. 15178121
  misc_feature (15)..(118): Pfam Name: Microtubule associated protein 1A/1B, light chain 3 Pfam Description: Microtubule associated protein 1A/1B, light
  misc_feature (5)..(118): Homolog of NCBI NO: 23394382 NR Description: microtubial binding protein [Phytophthora
  misc_feature (5)..(118): Homolog of NCBI NO: 21592920 NR Description: putative microtubule-associated protein
  misc_feature (5)..(118): Homolog of NCBI NO: 38344173 NR Description: OSJNBa0053K19.12 [Oryza sativa (japonica
  misc_feature (5)..(118): Homolog of NCBI NO: 40253647 NR Description: putative microtubial binding protein
  misc_feature (5)..(119): Homolog of NCBI NO: 34595981 NR Description: microtubule-associated protein 1 light chain 3
  misc_feature (6)..(120): Homolog of NCBI NO: 15232387 NR Description: (AtAPG8g) autophagy 8g protein [Arabidopsis
  misc_feature (5)..(118): Homolog of NCBI NO: 21615419 NR Description: microtubule associated protein [Cicer arietinum]
  misc_feature (5)..(121): Homolog of NCBI NO: 18414683 NR Description: symbiosis-related like protein [Arabidopsis
  misc_feature (1)..(122): Homolog of NCBI NO: 15225418 NR Description: microtubule-associated protein -related
  misc_feature (1)..(122): Homolog of NCBI NO: 15724332 NR Description: At2g45170/T14P1.2 [Arabidopsis thaliana]
MNKGSSFKLDNDFEKRKAEAGRILEKYPDRIPVIVEKAEKSDIPDIDKKKYLVPSDLTVGQFVYVIRKRIKLSAEKAIFIFVDNVLPPTGEIMSSVYEEKKDQDGFLYITYSGENTFGASSI

SEQ ID NO: 109950 - protein, 67 aa, Zea mays subsp. mays
  misc_feature (1)..(67): Ceres Seq. ID no. 15178122
MSFLPQERLCQASTRRRKTKMASSTSLTVARTHLVLPQSKPQCDVPLFQFVYIVLIIIYRFYVLALC

SEQ ID NO: 109951 - DNA, 1077 bp, Zea mays subsp. mays
  misc_feature (1)..(1077): Ceres Seq. ID no. 15177486
agtattattaatagtacaaaatttaatttgattgcgaaaatctatacatacacagagacttactttatatgtaaaggaggcattgacgtgacaaactgtccaccgtcctcctcctcctcctcctcctcctcctccttgtctccgccagcatgcccccttcctcctcctcatcatccctccacccctgcaagcattccccgtcagcaactctcgacctcctaatcctaatcctcgtcgtcttctccggcgcattcctcatctcctcctacttctcgtacctaatccactccttatctctcctctcctctcatttcccatcgatcgccctctctctctcctctctccctctccctctgatcctcctcttctccgatcacgaccacgatcccgatgatgaagatcacgacggaatctctctggcgtcgtttgtgttcgtgttcgcggtcttcttcgctgcctcggtcgcgttcctcgacctgtgctgcggctcgaggtcgaggaggtgccgtaaccctaaatgcaaagggctgaagaaagctatggagtttgatttgcagctgcagacggaggagagtgttaggacgggattggggaaggagattgaacggttgccgtgaaaggagggagcgagagcaatcctgattacgagtgtttgagagctgagcttaggaagatggctccggttaatggtcgagctgttttgcttttccggtcaaggtgtggttgccctgttgctaagcttgaagggcgggggcctaagagaagccgccgtcttaaaaaattgccggcaaaattagctgtaaaggggtgtgtagacaatcactgacctggaaaatctccaaactatacttacagattatcacattaaaagttgttgcagatgtacaatttgcaggttcttcctctatgattacacattcatttaggattatgaggaaaacataaaagtattgaattttttccatttcttatatagttaatccctgaaactctaaatgccttcttactctgtgaacacttgtataacttatatgtactatgaaaaatcaaaattcaatgttatcaaaaatcaaatgc

SEQ ID NO: 109952 - protein, 155 aa, Zea mays subsp. mays
  misc_feature (1)..(155): Ceres Seq. ID no. 15177487
  misc_feature (98)..(149): Homolog of NCBI NO: 6714471 NR Description: unknown protein [Arabidopsis thaliana]
  misc_feature (98)..(149): Homolog of NCBI NO: 18395728 NR Description: expressed protein [Arabidopsis thaliana]
  misc_feature (1)..(155): Homolog of NCBI NO: 15230653 NR Description: expressed protein [Arabidopsis thaliana]
  misc_feature (1)..(155): Homolog of NCBI NO: 15239636 NR Description: pentatricopeptide (PPR) repeat-containing protein
MPPSSSSSSLHPCKHSPSATLDLLILILVVFSGAFLISSYFSYLIHSLSLLSSHFPSIALSLSSLPLPLILLFSDHDHDPDDEDHDGISLASFVFVFAVFFAASVAFLDLCCGSRSRRCRNPKCKGLKKAMEFDLQLQTEESVRTGLGKEIERLP

SEQ ID NO: 109953 - DNA, 1132 bp, Zea mays subsp. mays
  misc_feature (1)..(1132): Ceres Seq. ID no. 15177475
aacggagctcaaaaaatggaatcgaaagctatttggttagggtttcttccgccaagacttcaactttcatctcgagtttcactctcccgccctcatggttcttccacatctccaaaatctgatgtcagacaaacccttgtctggagcaaaccacaaggtggaggttacttgaaccgaggccgtgtcctatgttcttctcaacctgatagtaatgttcctcgagctgagctgttccgtggaaagtctggttcagtttctttcaacggtctaacccaccagctggttgaagaaagtaaacttgtctcagctccgtttcaagaagaagacaaaggttccctctggtgggtcttggctcctgctgtcttgatatcctcactgattcttccgcagttctttctcagtggtgccattgaagctacctttaaaaacgacaccgttgcagagattgttacttctttctgctttgagacggcgttttatgctggtctggcgatattcctgtctgtgactgaccgagtgcagaggccctacttagacttcagctccaagagatggggtttaatcactggactaagaggatacctcatgtccacatttctgatgatgggtttgaaagttgtagtccctgtgtttgctgtatacatgacttggccagctcttgggatggatgccttgattgcagtccttcctttcttggttggatgtgcggttcaacgaggtttcgaggctcagcttgaaagacgcggctcttcgtgttggcccattgttccaatagtctttgaggtatataggctgtatcaggtgacaagggcagccacttttgttcagaggctgatgtttatgatgaaagatgcgtcaactactgtagagattacagagcgaggagttgcgcttgttggtttggttgtgactttgcagtttctagctgttctgtgtctctggtcgctgatcacttttctaatgcgcctttttccttcgagacctgtagctgaaaactactaaatcaatagtagtgtttagtgaaagccattgagctttgatttctgtgtttctttcagaggattaacgtgttgtatcgagtcaggaattgcagtgtaggacacttttgatcacgagggatgaaattggctgc

SEQ ID NO: 109954 - protein, 333 aa, Zea mays subsp. mays
  misc_feature (1)..(333): Ceres Seq. ID no. 15177476
  misc_feature (75)..(273): Homolog of NCBI NO: 11281196 NR Description: hypothetical protein T8B10.250 - Arabidopsis
  misc_feature (207)..(327): Homolog of NCBI NO: 26450751 NR Description: unknown protein [Arabidopsis thaliana]
  misc_feature (80)..(327): Homolog of NCBI NO: 21592953 NR Description: unknown [Arabidopsis thaliana]
  misc_feature (80)..(327): Homolog of NCBI NO: 18424658 NR Description: expressed protein [Arabidopsis thaliana]
  misc_feature (80)..(327): Homolog of NCBI NO: 9758304 NR Description: emb|CAB81845.1~gene_id:MJH22.10~similar to
  misc_feature (80)..(331): Homolog of NCBI NO: 34910348 NR Description: P0684B02.8 [Oryza sativa (japonica
  misc_feature (6)..(333): Homolog of NCBI NO: 25405928 NR Description: protein T1N15.7 [imported] - Arabidopsis thaliana
  misc_feature (6)..(333): Homolog of NCBI NO: 15221197 NR Description: expressed protein [Arabidopsis thaliana]
NGAQKMESKAIWLGFLPPRLQLSSRVSLSRPHGSSTSPKSDVRQTLVWSKPQGGGYLNRGRVLCSSQPDSNVPRAELFRGKSGSVSFNGLTHQLVEESKLVSAPFQEEDKGSLWWVLAPAVLISSLILPQFFLSGAIEATFKNDTVAEIVTSFCFETAFYAGLAIFLSVTDRVQRPYLDFSSKRWGLITGLRGYLMSTFLMMGLKVVVPVFAVYMTWPALGMDALIAVLPFLVGCAVQRGFEAQLERRGSSCWPIVPIVFEVYRLYQVTRAATFVQRLMFMMKDASTTVEITERGVALVGLVVTLQFLAVLCLWSLITFLMRLFPSRPVAENY

SEQ ID NO: 109955 - protein, 328 aa, Zea mays subsp. mays
  misc_feature (1)..(328): Ceres Seq. ID no. 15177477
  misc_feature (70)..(268): Homolog of NCBI NO: 11281196 NR Description: hypothetical protein T8B10.250 - Arabidopsis
  misc_feature (202)..(322): Homolog of NCBI NO: 26450751 NR Description: unknown protein [Arabidopsis thaliana]
  misc_feature (75)..(322): Homolog of NCBI NO: 21592953 NR Description: unknown [Arabidopsis thaliana]
  misc_feature (75)..(322): Homolog of NCBI NO: 18424658 NR Description: expressed protein [Arabidopsis thaliana]
  misc_feature (75)..(322): Homolog of NCBI NO: 9758304 NR Description: emb|CAB81845.1~gene_id:MJH22.10~similar to
  misc_feature (75)..(326): Homolog of NCBI NO: 34910348 NR Description: P0684B02.8 [Oryza sativa (japonica
  misc_feature (1)..(328): Homolog of NCBI NO: 25405928 NR Description: protein T1N15.7 [imported] - Arabidopsis thaliana
  misc_feature (1)..(328): Homolog of NCBI NO: 15221197 NR Description: expressed protein [Arabidopsis thaliana]
MESKAIWLGFLPPRLQLSSRVSLSRPHGSSTSPKSDVRQTLVWSKPQGGGYLNRGRVLCSSQPDSNVPRAELFRGKSGSVSFNGLTHQLVEESKLVSAPFQEEDKGSLWWVLAPAVLISSLILPQFFLSGAIEATFKNDTVAEIVTSFCFETAFYAGLAIFLSVTDRVQRPYLDFSSKRWGLITGLRGYLMSTFLMMGLKVVVPVFAVYMTWPALGMDALIAVLPFLVGCAVQRGFEAQLERRGSSCWPIVPIVFEVYRLYQVTRAATFVQRLMFMMKDASTTVEITERGVALVGLVVTLQFLAVLCLWSLITFLMRLFPSRPVAENY

SEQ ID NO: 109956 - DNA, 702 bp, Zea mays subsp. mays
  misc_feature (1)..(702): Ceres Seq. ID no. 15175150
atcaccaaaccaaaaaatctctctgagaatccctaaatccacttgaaaaaaatggcagaaaccgcggaaacaatcaacaccaccgtctcaccgccgcattccgaatcggagggctccaccacattgcccgcgacgacgccagatcagacatcggatgaaacctcaaaagccgcagatctgaagaaggaagagtccgtcccagagacgaagccaggaggaggcaactcgctccgcatttggcctccgactcagaaaactcgcgacgccgtcttgaagcgcctgatcgagacgctctccaccgaatccatcctctccaagaggtacggcacgctcaactccgacgaggcttccgccgtcgccaaatccatcgaggaggaagcctacggcgtcgcgtccaacgctgtgtctgacgacgacgatgggatcaagatccttgaggtttactccaaggagattagcaagaggatgcttgagacggtgaaggatcgatctgcagccgccgccaacaaggaagcggttgaggaagctgcgaaagacgatgaagctcctgagtcggagaagagtgaggcgtaactcgttcttgatccttaccttatctattagggtttcgctagattcgtatgagtttctcagagtttatgacgacagatctcttcttgtggatttggtatttgcctatttcgaagatgcttccttcttcct

SEQ ID NO: 109957 - protein, 173 aa, Zea mays subsp. mays
  misc_feature (1)..(173): Ceres Seq. ID no. 15175151
  misc_feature (59)..(173): Homolog of NCBI NO: 7546725 NR Description: MFP1 attachment factor 1 [Lycopersicon esculentum]
  misc_feature (17)..(169): Homolog of NCBI NO: 21618109 NR Description: MFP1 attachment factor 1 [Arabidopsis thaliana]
  misc_feature (17)..(169): Homolog of NCBI NO: 15239170 NR Description: expressed protein [Arabidopsis thaliana]
  misc_feature (1)..(173): Homolog of NCBI NO: 21553809 NR Description: unknown [Arabidopsis thaliana]
  misc_feature (1)..(173): Homolog of NCBI NO: 18401618 NR Description: expressed protein [Arabidopsis thaliana]
MAETAETINTTVSPPHSESEGSTTLPATTPDQTSDETSKAADLKKEESVPETKPGGGNSLRIWPPTQKTRDAVLKRLIETLSTESILSKRYGTLNSDEASAVAKSIEEEAYGVASNAVSDDDDGIKILEVYSKEISKRMLETVKDRSAAAANKEAVEEAAKDDEAPESEKSEA

SEQ ID NO: 109958 - DNA, 1006 bp, Zea mays subsp. mays
  misc_feature (1)..(1006): Ceres Seq. ID no. 15179305
cttttagttctcccatgaatcccgagaagattcatattaaacacctcttcttctgattcacatatcggagactcagatctgcaatcgaagttcttggcaggggatccaatttgtttcaatttgacaagagaagaagaagcatggacacctttacggcggaggatctctcgacgatcggcggaatcgccaccgtgtcgctcctccattcgttcattccaacgcactggctacctttctcaatcgtcggacgcgcgcagaaatggactctttccagaacgctcttcgtcactgcatttggagcagttctgcatgtcatatccacttctcttcttggtataacagcgatcactatggcgaataccatcgccggtgaagagactgttcacaagcttgcttcccttttgcttgtgattctcggtggaagctatgtcttgctgtttctggctggtaaaggaggccacactcattctcataaccaacccatggagaaaatggctgttgctgggcttgtccttgttcctgcattatctccatgtgcaacaactcttcctgtttttctcgctgttggaaactcaaagcccatgatggttctcgccatcatagttctgctgatcagcaccgtattggtgatgacatcgctggtggctctatcgttctatggtgctagccagctgaagtttcactgggtggagcgatacgacaagctactggttggttcggtcctgtgtctggtaggtatcttaacccttttcttccatgatcatgaccaccatggtcatgaagctcatcagctccccaggaaaatcattactctttagagtccgctctcgaatctctgttttgtctgtttgttatagagcgccttaagggctttcccgttgtatgtctataactagttctaacgctctctattgcacgtgaagaaacatatgtatgtgtttttttttttttgatcgaacaacattagttgtgaatgtgattttcataagcagtacatcaaatccct

SEQ ID NO: 109959 - protein, 225 aa, Zea mays subsp. mays
  misc_feature (1)..(225): Ceres Seq. ID no. 15179306
  misc_feature (18)..(204): Homolog of NCBI NO: 16124575 NR Description: hypothetical protein [Caulobacter crescentus
  misc_feature (115)..(215): Homolog of NCBI NO: 15209177 NR Description: hypothetical protein [Solanum demissum]
  misc_feature (4)..(225): Homolog of NCBI NO: 34903290 NR Description: unnamed protein product [Oryza sativa (japonica
  misc_feature (1)..(225): Homolog of NCBI NO: 21593186 NR Description: unknown [Arabidopsis thaliana]
  misc_feature (1)..(225): Homolog of NCBI NO: 15242149 NR Description: expressed protein [Arabidopsis thaliana]
MDTFTAEDLSTIGGIATVSLLHSFIPTHWLPFSIVGRAQKWTLSRTLFVTAFGAVLHVISTSLLGITAITMANTIAGEETVHKLASLLLVILGGSYVLLFLAGKGGHTHSHNQPMEKMAVAGLVLVPALSPCATTLPVFLAVGNSKPMMVLAIIVLLISTVLVMTSLVALSFYGASQLKFHWVERYDKLLVGSVLCLVGILTLFFHDHDHHGHEAHQLPRKIITL

SEQ ID NO: 109960 - protein, 155 aa, Zea mays subsp. mays
  misc_feature (1)..(155): Ceres Seq. ID no. 15179307
  misc_feature (1)..(134): Homolog of NCBI NO: 16124575 NR Description: hypothetical protein [Caulobacter crescentus
  misc_feature (45)..(145): Homolog of NCBI NO: 15209177 NR Description: hypothetical protein [Solanum demissum]
  misc_feature (1)..(155): Homolog of NCBI NO: 34903290 NR Description: unnamed protein product [Oryza sativa (japonica
  misc_feature (1)..(155): Homolog of NCBI NO: 21593186 NR Description: unknown [Arabidopsis thaliana]
  misc_feature (1)..(155): Homolog of NCBI NO: 15242149 NR Description: expressed protein [Arabidopsis thaliana]
MANTIAGEETVHKLASLLLVILGGSYVLLFLAGKGGHTHSHNQPMEKMAVAGLVLVPALSPCATTLPVFLAVGNSKPMMVLAIIVLLISTVLVMTSLVALSFYGASQLKFHWVERYDKLLVGSVLCLVGILTLFFHDHDHHGHEAHQLPRKIITL

SEQ ID NO: 109961 - DNA, 686 bp, Zea mays subsp. mays
  misc_feature (1)..(686): Ceres Seq. ID no. 15179376
acattctcacaactcttctgcatctctctctgtaaaaatctgaacaaaactctttccaacttcgatcaagaaaaccaagaacgatgcctaaagacaggaagatcggaatcgcgatggatttatcagagagcagcaagaacgcactcaaatgggccatcgagaacttagctgacaaaggagacacactttacatcatccacacactaccaacctctgaagctgaatctcgtaacgccctctggctcgaatccggttctcctctcataccgttggttgagtttagggaaccgaagatcatggagaactacggtgtcaagatcgacatcgcatgtcttgacatgctcgacactggttcaaggaagaaagaggtgcatgtagtgacaaaactatactggggagatgcaagagagaagctcgttgatgctgttaaagaactcaaacttgattctattgtcatgggaagcagaggactcagtgcccttcaaaggataataatgggaagcgtgagcagctttgtgatcgaccacgcgccttgccctgtcaccattgtcaaggataactaaaaagagatggctttatctcatatgttctgccaaaaataatgtcgcaatttatgtttttaataaaagaaccttttttcttggttgtgtttgttctatttaaaataatatcaatatatgaaatcc

SEQ ID NO: 109962 - protein, 159 aa, Zea mays subsp. mays
  misc_feature (1)..(159): Ceres Seq. ID no. 15179377
  misc_feature (4)..(157): Pfam Name: Universal stress protein family Pfam Description: Universal stress protein family
  misc_feature (5)..(157): Homolog of NCBI NO: 18401345 NR Description: expressed protein [Arabidopsis thaliana]
  misc_feature (1)..(149): Homolog of NCBI NO: 18396497 NR Description: expressed protein [Arabidopsis thaliana]
  misc_feature (4)..(157): Homolog of NCBI NO: 20160561 NR Description: P0414E03.3 [Oryza sativa (japonica
  misc_feature (1)..(98): Homolog of NCBI NO: 21555070 NR Description: unknown [Arabidopsis thaliana]
  misc_feature (1)..(159): Homolog of NCBI NO: 30678807 NR Description: expressed protein [Arabidopsis thaliana]
  misc_feature (4)..(157): Homolog of NCBI NO: 32352136 NR Description: hypothetical protein [Oryza sativa (japonica
  misc_feature (1)..(158): Homolog of NCBI NO: 11602749 NR Description: early nodulin ENOD18 [Vicia faba]
  misc_feature (1)..(158): Homolog of NCBI NO: 11602747 NR Description: early nodulin ENOD18 [Vicia faba]
  misc_feature (3)..(158): Homolog of NCBI NO: 11602751 NR Description: ENOD18 protein [Vicia faba]
  misc_feature (1)..(159): Homolog of NCBI NO: 30693971 NR Description: expressed protein [Arabidopsis thaliana]
MPKDRKIGIAMDLSESSKNALKWAIENLADKGDTLYIIHTLPTSEAESRNALWLESGSPLIPLVEFREPKIMENYGVKIDIACLDMLDTGSRKKEVHVVTKLYWGDAREKLVDAVKELKLDSIVMGSRGLSALQRIIMGSVSSFVIDHAPCPVTIVKDN

SEQ ID NO: 109963 - protein, 149 aa, Zea mays subsp. mays
  misc_feature (1)..(149): Ceres Seq. ID no. 15179378
  misc_feature (1)..(147): Pfam Name: Universal stress protein family Pfam Description: Universal stress protein family
  misc_feature (1)..(147): Homolog of NCBI NO: 18401345 NR Description: expressed protein [Arabidopsis thaliana]
  misc_feature (1)..(139): Homolog of NCBI NO: 18396497 NR Description: expressed protein [Arabidopsis thaliana]
  misc_feature (1)..(147): Homolog of NCBI NO: 20160561 NR Description: P0414E03.3 [Oryza sativa (japonica
  misc_feature (1)..(88): Homolog of NCBI NO: 21555070 NR Description: unknown [Arabidopsis thaliana]
  misc_feature (1)..(149): Homolog of NCBI NO: 30678807 NR Description: expressed protein [Arabidopsis thaliana]
  misc_feature (1)..(147): Homolog of NCBI NO: 32352136 NR Description: hypothetical protein [Oryza sativa (japonica
  misc_feature (1)..(148): Homolog of NCBI NO: 11602749 NR Description: early nodulin ENOD18 [Vicia faba]
  misc_feature (1)..(148): Homolog of NCBI NO: 11602747 NR Description: early nodulin ENOD18 [Vicia faba]
  misc_feature (1)..(148): Homolog of NCBI NO: 11602751 NR Description: ENOD18 protein [Vicia faba]
  misc_feature (1)..(149): Homolog of NCBI NO: 30693971 NR Description: expressed protein [Arabidopsis thaliana]
MDLSESSKNALKWAIENLADKGDTLYIIHTLPTSEAESRNALWLESGSPLIPLVEFREPKIMENYGVKIDIACLDMLDTGSRKKEVHVVTKLYWGDAREKLVDAVKELKLDSIVMGSRGLSALQRIIMGSVSSFVIDHAPCPVTIVKDN

SEQ ID NO: 109964 - protein, 88 aa, Zea mays subsp. mays
  misc_feature (1)..(88): Ceres Seq. ID no. 15179379
  misc_feature (1)..(86): Pfam Name: Universal stress protein family Pfam Description: Universal stress protein family
  misc_feature (1)..(78): Homolog of NCBI NO: 18396497 NR Description: expressed protein [Arabidopsis thaliana]
  misc_feature (1)..(86): Homolog of NCBI NO: 20160561 NR Description: P0414E03.3 [Oryza sativa (japonica
  misc_feature (1)..(27): Homolog of NCBI NO: 21555070 NR Description: unknown [Arabidopsis thaliana]
  misc_feature (1)..(88): Homolog of NCBI NO: 30678807 NR Description: expressed protein [Arabidopsis thaliana]
  misc_feature (1)..(86): Homolog of NCBI NO: 32352136 NR Description: hypothetical protein [Oryza sativa (japonica
  misc_feature (1)..(86): Homolog of NCBI NO: 18401345 NR Description: expressed protein [Arabidopsis thaliana]
  misc_feature (1)..(87): Homolog of NCBI NO: 11602749 NR Description: early nodulin ENOD18 [Vicia faba]
  misc_feature (1)..(87): Homolog of NCBI NO: 11602747 NR Description: early nodulin ENOD18 [Vicia faba]
  misc_feature (1)..(87): Homolog of NCBI NO: 11602751 NR Description: ENOD18 protein [Vicia faba]
  misc_feature (1)..(88): Homolog of NCBI NO: 30693971 NR Description: expressed protein [Arabidopsis thaliana]
MENYGVKIDIACLDMLDTGSRKKEVHVVTKLYWGDAREKLVDAVKELKLDSIVMGSRGLSALQRIIMGSVSSFVIDHAPCPVTIVKDN

SEQ ID NO: 109965 - DNA, 1118 bp, Zea mays subsp. mays
  misc_feature (1)..(1118): Ceres Seq. ID no. 15174376
ttctttcgtttcgcctttgatctatagcccctttcgcttttaacttttctctcgatcagctaagtttcgatccattcttgttctcgcttttcaatatcttctcctccttcgcttgattccttctgttctcagatctattcttcgtttgatttcagatctagatctagggtttgttcgaataaaaattgggggaatttgaaaaaagaaggaatgattacagattctctatgagctactcagttcttcttcgtcgtattcgcatagtacactctttctccgtcgtttatctctactacacctacgtcttctcatgaactaatcgtctccgatctcatctcaaataaaacatttctgagttttttttttctttctatacaatctaaccgattctttgatagattagagagcggggaatttaagatctgtgggtaatttatagggatttagaaaaaaaaattatattatttaattttggtgaggaaaaagtcaaaaagtcaacggaaatggggtcgaaaagtcctgattccgacaacgatccgaggtacgcttccgtcacggacgagaggaagaggaagagaatgatctccaacagagagtccgctcggagatcaaggatgaggaagcagaagcagctcggcgatctcatcaacgaggtcactgtgctcaagaacgataacgctaagatcactgagcaggttgatgcggctacgaggaggtacgtggagatggagtccaagaacgatgtcttgagagcgcaagaggtggagctgaaggagaggttgaggtcgttgaactctgtgctggagatggttgaggagattagtggtcaggctttggatattcctgagattcagaacccttggcagattccttgtccgatcatgcaaaccaatcatggtttctgctgatatgtttgaatgcattgtcttgtctgttagagttttgtaacaactagtgtcattggtgtgtgtcgtctttatacaacttcagtctcttgtttttcagttatttcagtttgtgtggtcttgcggttgtcttttattcttatgtcggcttattacataagataaggttgtcatgtatttgtgtttcttaatcaattcaagctttgtgttgtt

SEQ ID NO: 109966 - protein, 134 aa, Zea mays subsp. mays
  misc_feature (1)..(134): Ceres Seq. ID no. 15174377
  misc_feature (17)..(81): Pfam Name: bZIP transcription factor Pfam Description: bZIP transcription factor
  misc_feature (2)..(125): Homolog of NCBI NO: 40019253 NR Description: ocs-element binding factor 1 [Secale cereale]
  misc_feature (1)..(126): Homolog of NCBI NO: 5901747 NR Description: bZIP DNA-binding protein [Lycopersicon esculentum]
  misc_feature (4)..(126): Homolog of NCBI NO: 7489298 NR Description: DNA-binding protein bZIP-2 - garden snapdragon
  misc_feature (1)..(126): Homolog of NCBI NO: 3986151 NR Description: rdLIP [Raphanus sativus]
  misc_feature (1)..(126): Homolog of NCBI NO: 7489118 NR Description: DNA-binding protein tbz17 - common tobacco
  misc_feature (5)..(126): Homolog of NCBI NO: 16580132 NR Description: bZIP transcription factor BZI-3 [Nicotiana
  misc_feature (5)..(126): Homolog of NCBI NO: 10241920 NR Description: TBZF [Nicotiana tabacum]
  misc_feature (19)..(126): Homolog of NCBI NO: 7489297 NR Description: DNA-binding protein bZIP-1 - garden snapdragon
  misc_feature (5)..(125): Homolog of NCBI NO: 9650826 NR Description: common plant regulatory factor 6 [Petroselinum
  misc_feature (5)..(126): Homolog of NCBI NO: 15228754 NR Description: bZIP family transcription factor [Arabidopsis
MGSKSPDSDNDPRYASVTDERKRKRMISNRESARRSRMRKQKQLGDLINEVTVLKNDNAKITEQVDAATRRYVEMESKNDVLRAQEVELKERLRSLNSVLEMVEEISGQALDIPEIQNPWQIPCPIMQTNHGFC

SEQ ID NO: 109967 - protein, 109 aa, Zea mays subsp. mays
  misc_feature (1)..(109): Ceres Seq. ID no. 15174378
  misc_feature (1)..(56): Pfam Name: bZIP transcription factor Pfam Description: bZIP transcription factor
  misc_feature (1)..(100): Homolog of NCBI NO: 40019253 NR Description: ocs-element binding factor 1 [Secale cereale]
  misc_feature (1)..(101): Homolog of NCBI NO: 5901747 NR Description: bZIP DNA-binding protein [Lycopersicon esculentum]
  misc_feature (1)..(101): Homolog of NCBI NO: 7489298 NR Description: DNA-binding protein bZIP-2 - garden snapdragon
  misc_feature (1)..(101): Homolog of NCBI NO: 3986151 NR Description: rdLIP [Raphanus sativus]
  misc_feature (1)..(101): Homolog of NCBI NO: 7489118 NR Description: DNA-binding protein tbz17 - common tobacco
  misc_feature (1)..(101): Homolog of NCBI NO: 16580132 NR Description: bZIP transcription factor BZI-3 [Nicotiana
  misc_feature (1)..(101): Homolog of NCBI NO: 10241920 NR Description: TBZF [Nicotiana tabacum]
  misc_feature (1)..(101): Homolog of NCBI NO: 7489297 NR Description: DNA-binding protein bZIP-1 - garden snapdragon
  misc_feature (1)..(100): Homolog of NCBI NO: 9650826 NR Description: common plant regulatory factor 6 [Petroselinum
  misc_feature (1)..(101): Homolog of NCBI NO: 15228754 NR Description: bZIP family transcription factor [Arabidopsis
MISNRESARRSRMRKQKQLGDLINEVTVLKNDNAKITEQVDAATRRYVEMESKNDVLRAQEVELKERLRSLNSVLEMVEEISGQALDIPEIQNPWQIPCPIMQTNHGFC

SEQ ID NO: 109968 - protein, 97 aa, Zea mays subsp. mays
  misc_feature (1)..(97): Ceres Seq. ID no. 15174379
  misc_feature (1)..(88): Homolog of NCBI NO: 40019253 NR Description: ocs-element binding factor 1 [Secale cereale]
  misc_feature (1)..(89): Homolog of NCBI NO: 5901747 NR Description: bZIP DNA-binding protein [Lycopersicon esculentum]
  misc_feature (1)..(89): Homolog of NCBI NO: 7489298 NR Description: DNA-binding protein bZIP-2 - garden snapdragon
  misc_feature (1)..(89): Homolog of NCBI NO: 3986151 NR Description: rdLIP [Raphanus sativus]
  misc_feature (1)..(89): Homolog of NCBI NO: 7489118 NR Description: DNA-binding protein tbz17 - common tobacco
  misc_feature (1)..(89): Homolog of NCBI NO: 16580132 NR Description: bZIP transcription factor BZI-3 [Nicotiana
  misc_feature (1)..(89): Homolog of NCBI NO: 10241920 NR Description: TBZF [Nicotiana tabacum]
  misc_feature (1)..(89): Homolog of NCBI NO: 7489297 NR Description: DNA-binding protein bZIP-1 - garden snapdragon
  misc_feature (1)..(88): Homolog of NCBI NO: 9650826 NR Description: common plant regulatory factor 6 [Petroselinum
  misc_feature (1)..(89): Homolog of NCBI NO: 15228754 NR Description: bZIP family transcription factor [Arabidopsis
MRKQKQLGDLINEVTVLKNDNAKITEQVDAATRRYVEMESKNDVLRAQEVELKERLRSLNSVLEMVEEISGQALDIPEIQNPWQIPCPIMQTNHGFC

SEQ ID NO: 109969 - DNA, 956 bp, Zea mays subsp. mays
  misc_feature (1)..(956): Ceres Seq. ID no. 15179191
  misc_feature: MA Experiment ID: 108527 Result: Down-regulated in Transcription
  misc_feature: MA Experiment 108527 PARAMETER Experiment Name: Zm_5mM_NO_P Parameter: Age (day) Value: 8
  misc_feature: MA Experiment 108527 PARAMETER Experiment Name: Zm_5mM_NO_P Parameter: Organism Value: Zea mays
  misc_feature: MA Experiment 108527 PARAMETER Experiment Name: Zm_5mM_NO_P Parameter: Plant Line Value: 35A19
  misc_feature: MA Experiment 108527 PARAMETER Experiment Name: Zm_5mM_NO_P Parameter: Timepoint (hr) Value: 6
  misc_feature: MA Experiment 108527 PARAMETER Experiment Name: Zm_5mM_NO_P Parameter: Tissue Value: Aerial
  misc_feature: MA Experiment 108527 PARAMETER Experiment Name: Zm_5mM_NO_P Parameter: Treatment Value: 5mM NO vs. No Treatment
  misc_feature: MA Experiment ID: 108528 Result: Up-regulated in Transcription
  misc_feature: MA Experiment 108528 PARAMETER Experiment Name: Zm_Imbibed_Seeds_P Parameter: Age (day) Value: 5 vs. 2
  misc_feature: MA Experiment 108528 PARAMETER Experiment Name: Zm_Imbibed_Seeds_P Parameter: Organism Value: Zea mays
  misc_feature: MA Experiment 108528 PARAMETER Experiment Name: Zm_Imbibed_Seeds_P Parameter: Plant Line Value: 35A19
  misc_feature: MA Experiment 108528 PARAMETER Experiment Name: Zm_Imbibed_Seeds_P Parameter: Tissue Value: Aerial vs. Embryo
  misc_feature: MA Experiment ID: 108529 Result: Down-regulated in Transcription
  misc_feature: MA Experiment 108529 PARAMETER Experiment Name: Zm_Imbibed_Seeds_P Parameter: Age (day) Value: 5 vs. 2
  misc_feature: MA Experiment 108529 PARAMETER Experiment Name: Zm_Imbibed_Seeds_P Parameter: Organism Value: Zea mays
  misc_feature: MA Experiment 108529 PARAMETER Experiment Name: Zm_Imbibed_Seeds_P Parameter: Plant Line Value: 35A19
  misc_feature: MA Experiment 108529 PARAMETER Experiment Name: Zm_Imbibed_Seeds_P Parameter: Tissue Value: Roots vs. Embryo
  misc_feature: MA Experiment ID: 108530 Result: Up-regulated in Transcription
  misc_feature: MA Experiment 108530 PARAMETER Experiment Name: Zm_Imbibed_Seeds_P Parameter: Age (day) Value: 6 vs. 2
  misc_feature: MA Experiment 108530 PARAMETER Experiment Name: Zm_Imbibed_Seeds_P Parameter: Organism Value: Zea mays
  misc_feature: MA Experiment 108530 PARAMETER Experiment Name: Zm_Imbibed_Seeds_P Parameter: Plant Line Value: 35A19
  misc_feature: MA Experiment 108530 PARAMETER Experiment Name: Zm_Imbibed_Seeds_P Parameter: Tissue Value: Aerial vs. Embryo
  misc_feature: MA Experiment ID: 108536 Result: Down-regulated in Transcription
  misc_feature: MA Experiment 108536 PARAMETER Experiment Name: Zm_Meristem_P Parameter: Age (day) Value: 8
  misc_feature: MA Experiment 108536 PARAMETER Experiment Name: Zm_Meristem_P Parameter: Organism Value: Zea mays
  misc_feature: MA Experiment 108536 PARAMETER Experiment Name: Zm_Meristem_P Parameter: Plant Line Value: 35A19
  misc_feature: MA Experiment 108536 PARAMETER Experiment Name: Zm_Meristem_P Parameter: Tissue Value: Shoot Meristem vs. Above Shoot Meristem
  misc_feature: MA Experiment ID: 108543 Result: Up-regulated in Transcription
  misc_feature: MA Experiment ID: 108545 Result: Up-regulated in Transcription
  misc_feature: MA Experiment 108545 PARAMETER Experiment Name: Zm_Imbibed_Seeds_P Parameter: Age (day) Value: 3 vs. 2
  misc_feature: MA Experiment 108545 PARAMETER Experiment Name: Zm_Imbibed_Seeds_P Parameter: Organism Value: Zea mays
  misc_feature: MA Experiment 108545 PARAMETER Experiment Name: Zm_Imbibed_Seeds_P Parameter: Plant Line Value: 35A19
  misc_feature: MA Experiment 108545 PARAMETER Experiment Name: Zm_Imbibed_Seeds_P Parameter: Tissue Value: Aerial vs. Embryo
  misc_feature: MA Experiment ID: 108546 Result: Down-regulated in Transcription
  misc_feature: MA Experiment 108546 PARAMETER Experiment Name: Zm_Imbibed_Seeds_P Parameter: Age (day) Value: 3 vs. 2
  misc_feature: MA Experiment 108546 PARAMETER Experiment Name: Zm_Imbibed_Seeds_P Parameter: Organism Value: Zea mays
  misc_feature: MA Experiment 108546 PARAMETER Experiment Name: Zm_Imbibed_Seeds_P Parameter: Plant Line Value: 35A19
  misc_feature: MA Experiment 108546 PARAMETER Experiment Name: Zm_Imbibed_Seeds_P Parameter: Tissue Value: Roots vs. Embryo
  misc_feature: MA Experiment ID: 108687 Result: Down-regulated in Transcription
  misc_feature: MA Experiment 108687 PARAMETER Experiment Name: Zm_Embryos-Flowers__P Parameter: Tissue Value: Embryo vs. Aerial+
  misc_feature: MA Experiment ID: 20000480 Result: Down-regulated in Transcription
  misc_feature: MA Experiment 20000480 PARAMETER Experiment Name: Zm_Drought_P Parameter: Age (day) Value: 11
  misc_feature: MA Experiment 20000480 PARAMETER Experiment Name: Zm_Drought_P Parameter: Organism Value: Zea mays
  misc_feature: MA Experiment 20000480 PARAMETER Experiment Name: Zm_Drought_P Parameter: Plant Line Value: 35A19
  misc_feature: MA Experiment 20000480 PARAMETER Experiment Name: Zm_Drought_P Parameter: Timepoint (hr) Value: 72
  misc_feature: MA Experiment 20000480 PARAMETER Experiment Name: Zm_Drought_P Parameter: Tissue Value: Aerial
  misc_feature: MA Experiment 20000480 PARAMETER Experiment Name: Zm_Drought_P Parameter: Treatment Value: Drought vs. No Drought
  misc_feature: MA Experiment ID: 20000488 Result: Up-regulated in Transcription
  misc_feature: MA Experiment 20000488 PARAMETER Experiment Name: Zm_50mM_NH4NO3_L_to_H_P Parameter: Organism Value: Zea mays
  misc_feature: MA Experiment 20000488 PARAMETER Experiment Name: Zm_50mM_NH4NO3_L_to_H_P Parameter: Timepoint (hr) Value: 8
  misc_feature: MA Experiment 20000488 PARAMETER Experiment Name: Zm_50mM_NH4NO3_L_to_H_P Parameter: Tissue Value: Leaves
  misc_feature: MA Experiment 20000488 PARAMETER Experiment Name: Zm_50mM_NH4NO3_L_to_H_P Parameter: Treatment Value: 50mM NH4NO3 vs. 100mM Mannitol
  misc_feature: MA Experiment ID: 20000535 Result: Down-regulated in Transcription
  misc_feature: MA Experiment 20000535 PARAMETER Experiment Name: Zm_Hybrid_Seed_Dev_P Parameter: DAP Value: 30 vs. 12
  misc_feature: MA Experiment 20000535 PARAMETER Experiment Name: Zm_Hybrid_Seed_Dev_P Parameter: Organism Value: Zea mays
  misc_feature: MA Experiment 20000535 PARAMETER Experiment Name: Zm_Hybrid_Seed_Dev_P Parameter: Plant Line Value: 35A19
  misc_feature: MA Experiment 20000535 PARAMETER Experiment Name: Zm_Hybrid_Seed_Dev_P Parameter: Tissue Value: Embryo vs. Unfert Floret
  misc_feature: MA Experiment ID: 20000626 Result: Down-regulated in Transcription
  misc_feature: MA Experiment 20000626 PARAMETER Experiment Name: Zm_Herbicide-Treatments_P Parameter: Timepoint (hr) Value: 12
  misc_feature: MA Experiment 20000626 PARAMETER Experiment Name: Zm_Herbicide-Treatments_P Parameter: Tissue Value: Aerial
  misc_feature: MA Experiment 20000626 PARAMETER Experiment Name: Zm_Herbicide-Treatments_P Parameter: Treatment Value: Roundup vs. No Treatment
  misc_feature: MA Experiment ID: 20001606 Result: Up-regulated in Transcription
  misc_feature: MA Experiment 20001606 PARAMETER Experiment Name: Zm_50ppm_KNO3_L-to-H_P Parameter: Age (day) Value: 19
  misc_feature: MA Experiment 20001606 PARAMETER Experiment Name: Zm_50ppm_KNO3_L-to-H_P Parameter: Organism Value: Zea mays
  misc_feature: MA Experiment 20001606 PARAMETER Experiment Name: Zm_50ppm_KNO3_L-to-H_P Parameter: Plant Line Value: 35A19
  misc_feature: MA Experiment 20001606 PARAMETER Experiment Name: Zm_50ppm_KNO3_L-to-H_P Parameter: Timepoint (hr) Value: 8
  misc_feature: MA Experiment 20001606 PARAMETER Experiment Name: Zm_50ppm_KNO3_L-to-H_P Parameter: Tissue Value: Shoots
  misc_feature: MA Experiment 20001606 PARAMETER Experiment Name: Zm_50ppm_KNO3_L-to-H_P Parameter: Treatment Value: 50ppm KNO3 vs. 50ppm KCl
  misc_feature: MA Experiment ID: 20001608 Result: Up-regulated in Transcription
  misc_feature: MA Experiment 20001608 PARAMETER Experiment Name: Zm_50ppm_KNO3_L-to-H_P Parameter: Age (day) Value: 21
  misc_feature: MA Experiment 20001608 PARAMETER Experiment Name: Zm_50ppm_KNO3_L-to-H_P Parameter: Organism Value: Zea mays
  misc_feature: MA Experiment 20001608 PARAMETER Experiment Name: Zm_50ppm_KNO3_L-to-H_P Parameter: Plant Line Value: 35A19
  misc_feature: MA Experiment 20001608 PARAMETER Experiment Name: Zm_50ppm_KNO3_L-to-H_P Parameter: Timepoint (hr) Value: 48
  misc_feature: MA Experiment 20001608 PARAMETER Experiment Name: Zm_50ppm_KNO3_L-to-H_P Parameter: Tissue Value: Shoots
  misc_feature: MA Experiment 20001608 PARAMETER Experiment Name: Zm_50ppm_KNO3_L-to-H_P Parameter: Treatment Value: 50ppm KNO3 vs. 50ppm KCl
agcaaagcaagtctgtttggttttggctcatccactgaaacattgagtcgtgaagaagacatggcaattctcagcaacgtctcgttttcccgcagcaacgtctatctaaaaccatctctctctcatctccctagctctccttcttctcgtcatcattgtctcattcgctgctcactggaagggaaagaagtggtgagtccattggtctggtcattaggagaggaggtttcaaagagaagcttacttgcacttgtctctgcttctctcttcgttgttgatcctgcccttgcttttaagggtggaggtccctatggacaaggagtcaccaggggacaagacttatcaggcaaagattttagtggccagactctgatcaggcaggacttcaagacgtccatccttaggcaagccaacttcaagggtgctaagttgttaggtgctagcttctttgatgcagacctaacaggtgctgatttatccgaaactgatctccgaggtgcagatttctccttggctaacgtaacaaaggtgaatttaacaaacgctaacttggaaggagcaactgctactggaaacacatcattcaagggatcaaacattacaggcgcagatttcactgatgttcttctaagagatgaccaacgagaatacctttgcaaaatcgctgatggggttaatgcgaccactgggaatgccacacgggacacattgctctgcaactaaactgtcaagtgtaaacctttgtcttcttcatctgagtttttgtacaagtttttttgtgtgtgaatgatgttgcagagtgagtgtgtatataaatatgcttactatactcaaatttgacattgagagattatgtatgctactttactttcggcctacaaaacaatatataaagtttggaactgtacttgtaaaatcacttgtttatttttttcaaccaactttcagtttttctt

SEQ ID NO: 109970 - protein, 240 aa, Zea mays subsp. mays
  misc_feature (1)..(240): Ceres Seq. ID no. 15179192
  misc_feature (172)..(212): Pfam Name: Pentapeptide repeats (8 copies) Pfam Description: Pentapeptide repeats (8 copies)
  misc_feature (110)..(240): Homolog of NCBI NO: 23043019 NR Description: hypothetical protein [Trichodesmium erythraeum
  misc_feature (110)..(212): Homolog of NCBI NO: 37523071 NR Description: hypothetical protein glr3502 [Gloeobacter
  misc_feature (110)..(239): Homolog of NCBI NO: 16331083 NR Description: unknown protein [Synechocystis sp. PCC 6803]
  misc_feature (81)..(239): Homolog of NCBI NO: 33865584 NR Description: conserved hypothetical protein [Synechococcus sp.
  misc_feature (118)..(239): Homolog of NCBI NO: 23128511 NR Description: hypothetical protein [Nostoc punctiforme]
  misc_feature (139)..(240): Homolog of NCBI NO: 7486947 NR Description: hypothetical protein At2g44920 [imported] -
  misc_feature (21)..(183): Homolog of NCBI NO: 7486947 NR Description: hypothetical protein At2g44920 [imported] -
  misc_feature (71)..(239): Homolog of NCBI NO: 34895746 NR Description: P0024G09.19 [Oryza sativa (japonica
  misc_feature (21)..(203): Homolog of NCBI NO: 18406663 NR Description: thylakoid lumen pentapeptide repeat family
  misc_feature (21)..(240): Homolog of NCBI NO: 18406661 NR Description: thylakoid lumen pentapeptide repeat family
SKASLFGFGSSTETLSREEDMAILSNVSFSRSNVYLKPSLSHLPSSPSSRHHCLIRCSLEGKEVVSPLVWSLGEEVSKRSLLALVSASLFVVDPALAFKGGGPYGQGVTRGQDLSGKDFSGQTLIRQDFKTSILRQANFKGAKLLGASFFDADLTGADLSETDLRGADFSLANVTKVNLTNANLEGATATGNTSFKGSNITGADFTDVLLRDDQREYLCKIADGVNATTGNATRDTLLCN

SEQ ID NO: 109971 - protein, 220 aa, Zea mays subsp. mays
  misc_feature (1)..(220): Ceres Seq. ID no. 15179193
  misc_feature (152)..(192): Pfam Name: Pentapeptide repeats (8 copies) Pfam Description: Pentapeptide repeats (8 copies)
  misc_feature (90)..(220): Homolog of NCBI NO: 23043019 NR Description: hypothetical protein [Trichodesmium erythraeum
  misc_feature (90)..(192): Homolog of NCBI NO: 37523071 NR Description: hypothetical protein glr3502 [Gloeobacter
  misc_feature (90)..(219): Homolog of NCBI NO: 16331083 NR Description: unknown protein [Synechocystis sp. PCC 6803]
  misc_feature (61)..(219): Homolog of NCBI NO: 33865584 NR Description: conserved hypothetical protein [Synechococcus sp.
  misc_feature (98)..(219): Homolog of NCBI NO: 23128511 NR Description: hypothetical protein [Nostoc punctiforme]
  misc_feature (119)..(220): Homolog of NCBI NO: 7486947 NR Description: hypothetical protein At2g44920 [imported] -
  misc_feature (1)..(163): Homolog of NCBI NO: 7486947 NR Description: hypothetical protein At2g44920 [imported] -
  misc_feature (51)..(219): Homolog of NCBI NO: 34895746 NR Description: P0024G09.19 [Oryza sativa (japonica
  misc_feature (1)..(183): Homolog of NCBI NO: 18406663 NR Description: thylakoid lumen pentapeptide repeat family
  misc_feature (1)..(220): Homolog of NCBI NO: 18406661 NR Description: thylakoid lumen pentapeptide repeat family
MAILSNVSFSRSNVYLKPSLSHLPSSPSSRHHCLIRCSLEGKEVVSPLVWSLGEEVSKRSLLALVSASLFVVDPALAFKGGGPYGQGVTRGQDLSGKDFSGQTLIRQDFKTSILRQANFKGAKLLGASFFDADLTGADLSETDLRGADFSLANVTKVNLTNANLEGATATGNTSFKGSNITGADFTDVLLRDDQREYLCKIADGVNATTGNATRDTLLCN

SEQ ID NO: 109972 - DNA, 736 bp, Zea mays subsp. mays
  misc_feature (1)..(736): Ceres Seq. ID no. 15179194
aagagaaaagagaaaaagaagaagaagaagagaagaactagtacgtaatggcttcctctatgctctcctctgccaccgtggttagctcaccggctcaagcggccatggttgctccattcacaggcttgaagtcatccgctgcattcccagtcactcgcaagaccgacactgacattacttccatggcaagcaatggaggaagagttaactgcatgaaggtgtggccaccagtcgggaagaagaagtttgagactctctcttaccttcctgatcttactgacgtcgaattgtctaaggaagttgactatcttcttcgcaacaagtggattccttgtgttgaattcgaattggaacatggatttgtataccgtgaacacggaaacacacccggatactatgacggacgttactggacaatgtggaaacttcctttgttcggatgcactgactctgctcaagtgttgaaggaagtgcaagagtgcaagaaggaatatcctaacgctttcattagaatcatcggattcgacaacaaccgtcaagtccagtgcatcagtttcatcgcctacaagccaccaagcttcaccggtgcttaatttcgttgtctaaaacattcatataataattttcactcatttcgtttccaattatctgtcctttttgctttttgaatttttgttgctgagacattctctatcggattgtcacaatgtctgatttatgaatatgtaacttctac

SEQ ID NO: 109973 - protein, 181 aa, Zea mays subsp. mays
  misc_feature (1)..(181): Ceres Seq. ID no. 15179195
  misc_feature (56)..(175): Pfam Name: Ribulose bisphosphate carboxylase, small chain Pfam Description: Ribulose bisphosphate carboxylase, small chain
  misc_feature (1)..(181): Homolog of NCBI NO: 68064 NR Description: ribulose-bisphosphate carboxylase (EC 4.1.1.39)
  misc_feature (1)..(180): Homolog of NCBI NO: 68063 NR Description: ribulose-bisphosphate carboxylase (EC 4.1.1.39)
  misc_feature (1)..(180): Homolog of NCBI NO: 15219826 NR Description: ribulose-bisphosphate carboxylase small unit
  misc_feature (1)..(181): Homolog of NCBI NO: 15240912 NR Description: ribulose bisphosphate carboxylase small chain 1b
  misc_feature (1)..(181): Homolog of NCBI NO: 68060 NR Description: ribulose-bisphosphate carboxylase (EC 4.1.1.39)
  misc_feature (1)..(181): Homolog of NCBI NO: 132154 NR Description: Ribulose bisphosphate carboxylase small chain,
  misc_feature (1)..(181): Homolog of NCBI NO: 15240901 NR Description: ribulose bisphosphate carboxylase small chain 3b
  misc_feature (1)..(181): Homolog of NCBI NO: 266891 NR Description: Ribulose bisphosphate carboxylase small chain,
  misc_feature (1)..(181): Homolog of NCBI NO: 132091 NR Description: Ribulose bisphosphate carboxylase small chain F1,
  misc_feature (1)..(181): Homolog of NCBI NO: 480983 NR Description: ribulose-bisphosphate carboxylase (EC 4.1.1.39)
MASSMLSSATVVSSPAQAAMVAPFTGLKSSAAFPVTRKTDTDITSMASNGGRVNCMKVWPPVGKKKFETLSYLPDLTDVELSKEVDYLLRNKWIPCVEFELEHGFVYREHGNTPGYYDGRYWTMWKLPLFGCTDSAQVLKEVQECKKEYPNAFIRIIGFDNNRQVQCISFIAYKPPSFTGA

SEQ ID NO: 109974 - protein, 177 aa, Zea mays subsp. mays
  misc_feature (1)..(177): Ceres Seq. ID no. 15179196
  misc_feature (52)..(171): Pfam Name: Ribulose bisphosphate carboxylase, small chain Pfam Description: Ribulose bisphosphate carboxylase, small chain
  misc_feature (1)..(177): Homolog of NCBI NO: 68064 NR Description: ribulose-bisphosphate carboxylase (EC 4.1.1.39)
  misc_feature (1)..(176): Homolog of NCBI NO: 68063 NR Description: ribulose-bisphosphate carboxylase (EC 4.1.1.39)
  misc_feature (1)..(176): Homolog of NCBI NO: 15219826 NR Description: ribulose-bisphosphate carboxylase small unit
  misc_feature (1)..(177): Homolog of NCBI NO: 15240912 NR Description: ribulose bisphosphate carboxylase small chain 1b
  misc_feature (1)..(177): Homolog of NCBI NO: 68060 NR Description: ribulose-bisphosphate carboxylase (EC 4.1.1.39)
  misc_feature (1)..(177): Homolog of NCBI NO: 132154 NR Description: Ribulose bisphosphate carboxylase small chain,
  misc_feature (1)..(177): Homolog of NCBI NO: 15240901 NR Description: ribulose bisphosphate carboxylase small chain 3b
  misc_feature (1)..(177): Homolog of NCBI NO: 266891 NR Description: Ribulose bisphosphate carboxylase small chain,
  misc_feature (1)..(177): Homolog of NCBI NO: 132091 NR Description: Ribulose bisphosphate carboxylase small chain F1,
  misc_feature (1)..(177): Homolog of NCBI NO: 480983 NR Description: ribulose-bisphosphate carboxylase (EC 4.1.1.39)
MLSSATVVSSPAQAAMVAPFTGLKSSAAFPVTRKTDTDITSMASNGGRVNCMKVWPPVGKKKFETLSYLPDLTDVELSKEVDYLLRNKWIPCVEFELEHGFVYREHGNTPGYYDGRYWTMWKLPLFGCTDSAQVLKEVQECKKEYPNAFIRIIGFDNNRQVQCISFIAYKPPSFTGA

SEQ ID NO: 109975 - protein, 162 aa, Zea mays subsp. mays
  misc_feature (1)..(162): Ceres Seq. ID no. 15179197
  misc_feature (37)..(156): Pfam Name: Ribulose bisphosphate carboxylase, small chain Pfam Description: Ribulose bisphosphate carboxylase, small chain
  misc_feature (1)..(161): Homolog of NCBI NO: 15219826 NR Description: ribulose-bisphosphate carboxylase small unit
  misc_feature (1)..(162): Homolog of NCBI NO: 15240912 NR Description: ribulose bisphosphate carboxylase small chain 1b
  misc_feature (1)..(162): Homolog of NCBI NO: 68060 NR Description: ribulose-bisphosphate carboxylase (EC 4.1.1.39)
  misc_feature (1)..(162): Homolog of NCBI NO: 132154 NR Description: Ribulose bisphosphate carboxylase small chain,
  misc_feature (1)..(162): Homolog of NCBI NO: 68064 NR Description: ribulose-bisphosphate carboxylase (EC 4.1.1.39)
  misc_feature (1)..(161): Homolog of NCBI NO: 68063 NR Description: ribulose-bisphosphate carboxylase (EC 4.1.1.39)
  misc_feature (1)..(162): Homolog of NCBI NO: 15240901 NR Description: ribulose bisphosphate carboxylase small chain 3b
  misc_feature (1)..(162): Homolog of NCBI NO: 266891 NR Description: Ribulose bisphosphate carboxylase small chain,
  misc_feature (1)..(162): Homolog of NCBI NO: 132091 NR Description: Ribulose bisphosphate carboxylase small chain F1,
  misc_feature (1)..(162): Homolog of NCBI NO: 480983 NR Description: ribulose-bisphosphate carboxylase (EC 4.1.1.39)
MVAPFTGLKSSAAFPVTRKTDTDITSMASNGGRVNCMKVWPPVGKKKFETLSYLPDLTDVELSKEVDYLLRNKWIPCVEFELEHGFVYREHGNTPGYYDGRYWTMWKLPLFGCTDSAQVLKEVQECKKEYPNAFIRIIGFDNNRQVQCISFIAYKPPSFTGA

SEQ ID NO: 109976 - DNA, 763 bp, Zea mays subsp. mays
  misc_feature (1)..(763): Ceres Seq. ID no. 15179171
actgtgagaaaggagagaagaaaaataaataggcgaaagctttggacattaaggaagacactggagagtagtaataatgccttctcattctggagatgacaatgttcttcaagttctcatcaagaacttcgatgttcttgctcttccattggttgctctcgtctaccctctatatgcatcagtgaaagcaatagagacaaaatcattagcagaagacgagcaatggctcacctattgggttctctacgcaatcatctccctcttcgaactcattttctccaaactcctcgaatggttcccgatatggccgttcttgaagctggtggggatatgctggctagtgctaccacagtttaatggagcagaacacgtctacagacatttcatcaggccattctacatgaatcctcaaagagcttccaccaatatttggtacgttcctcagaaaaagttcaacttctttcccaaacgtgacgacgacgatatcctcactgctgccgagaaatacatggaaaaacacggcaccgacgcatttgagcgaatgatcgtcaggaaggatagttatgaaagagggaggagaggaggaggtggaggaagcaataactacatgatctttgatgatgattataggtactaagtttaccaagttcttgtcgttttgatcggtcactgatctgatcttaaacctgtttggctacattattaagtttgtaagctggttgtctgacttttgtttatctctatgacttttataattgccagg

SEQ ID NO: 109977 - protein, 186 aa, Zea mays subsp. mays
  misc_feature (1)..(186): Ceres Seq. ID no. 15179172
  misc_feature (11)..(108): Pfam Name: TB2/DP1, HVA22 family Pfam Description: TB2/DP1, HVA22 family
  misc_feature (25)..(109): Homolog of NCBI NO: 182403 NR Description: TB2
  misc_feature (28)..(105): Homolog of NCBI NO: 7484787 NR Description: abscisic acid-induced protein homolog F13M23.100
  misc_feature (28)..(105): Homolog of NCBI NO: 8777395 NR Description: gene_id:MFB16.12~pir||T05517~similar to unknown
  misc_feature (24)..(133): Homolog of NCBI NO: 18416458 NR Description: abscisic acid-induced - like protein [Arabidopsis
  misc_feature (21)..(105): Homolog of NCBI NO: 18423191 NR Description: expressed protein [Arabidopsis thaliana]
  misc_feature (36)..(157): Homolog of NCBI NO: 34910810 NR Description: P0042A10.34 [Oryza sativa (japonica
  misc_feature (5)..(158): Homolog of NCBI NO: 15241840 NR Description: AtHVA22b-related protein [Arabidopsis thaliana]
  misc_feature (5)..(158): Homolog of NCBI NO: 4884934 NR Description: AtHVA22b [Arabidopsis thaliana]
  misc_feature (5)..(165): Homolog of NCBI NO: 15221266 NR Description: AtHVA22a [Arabidopsis thaliana]
  misc_feature (1)..(186): Homolog of NCBI NO: 15222421 NR Description: AtHVA22c [Arabidopsis thaliana]
MPSHSGDDNVLQVLIKNFDVLALPLVALVYPLYASVKAIETKSLAEDEQWLTYWVLYAIISLFELIFSKLLEWFPIWPFLKLVGICWLVLPQFNGAEHVYRHFIRPFYMNPQRASTNIWYVPQKKFNFFPKRDDDDILTAAEKYMEKHGTDAFERMIVRKDSYERGRRGGGGGSNNYMIFDDDYRY

SEQ ID NO: 109978 - DNA, 1069 bp, Zea mays subsp. mays
  misc_feature (1)..(1069): Ceres Seq. ID no. 15179988
gtcaggatctcagatttgtcacactctcggtgatcatccggcgacaatgagctctccgggaataacgagtatgttcacaaatttcactaagctctgcaaaggacttgctcttgtgcttgtggtgggacacctcctagttcagttcgttcccgccaccgtcccttacctcgctctcattccggcgaggactattccttttggctggaacctgattactagcggctactttgaactctctgtacatggggttgtcatcagcacggtttctctcctctttatggggaagtttctggagcctgtctggggttccaaggagtttcttaagttcatctttgtggtgaacttccttacgtatctctgtgttttcgtcacagccattgctttgtactacattacaaggctcgaaatctacctatatatgccctttgcaggttttcatggtgtcttggcaggccttcttgtcgggattaagcagataatacctgaccaggaggtgttgctcgtaaagatcaaagcaaagtggttgccctctattacgctagttttgtcaatagcctcaagcttcttcacactaaattcagcagcgtaccttcccactttgatattcggtacatatatgggctggttatacctcagatactttcagaggagaacagagacaaagctcagaggtgatccgagtgatgactttgccttctctactttctttcctgaacttctcagaccgataattgaccctatagcctcaatctttcaccggatgctttgtggacgatcaaatgccaccagcgaggaccatggttatactaccagcggtgctccattacccggttctgactctgctgaagcatctaggaggagagaaagaggagcaagggctctagaggagagacttgcaactgaaaggttggttcctccaaggaacaaagaagagttacagagtgatgctttggatagcgtttaagtggagactgcaactagtgtattgaagaagctgtgtgagggttcttacttgtttcaggtggacagtgtttattttttgttaattaaattggctttatacagaacc

SEQ ID NO: 109979 - protein, 320 aa, Zea mays subsp. mays
  misc_feature (1)..(320): Ceres Seq. ID no. 15179989
  misc_feature (33)..(287): Homolog of NCBI NO: 31197821 NR Description: ENSANGP00000018642 [Anopheles gambiae]
  misc_feature (26)..(297): Homolog of NCBI NO: 32413290 NR Description: hypothetical protein [Neurospora crassa]
  misc_feature (21)..(301): Homolog of NCBI NO: 19920824 NR Description: CG9536-PA [Drosophila melanogaster]
  misc_feature (33)..(298): Homolog of NCBI NO: 34865897 NR Description: similar to PL6 protein [Rattus norvegicus]
  misc_feature (33)..(298): Homolog of NCBI NO: 9790165 NR Description: PL6 protein; PL-6; placental protein 6 [Mus
  misc_feature (56)..(319): Homolog of NCBI NO: 5902022 NR Description: PL6 protein [Homo sapiens]
  misc_feature (10)..(301): Homolog of NCBI NO: 21741573 NR Description: OSJNBa0094O15.3 [Oryza sativa (japonica
  misc_feature (13)..(320): Homolog of NCBI NO: 34395257 NR Description: putative placental protein 6
  misc_feature (22)..(320): Homolog of NCBI NO: 6648207 NR Description: unknown protein [Arabidopsis thaliana]
  misc_feature (16)..(320): Homolog of NCBI NO: 18398108 NR Description: expressed protein [Arabidopsis thaliana]
SGSQICHTLGDHPATMSSPGITSMFTNFTKLCKGLALVLVVGHLLVQFVPATVPYLALIPARTIPFGWNLITSGYFELSVHGVVISTVSLLFMGKFLEPVWGSKEFLKFIFVVNFLTYLCVFVTAIALYYITRLEIYLYMPFAGFHGVLAGLLVGIKQIIPDQEVLLVKIKAKWLPSITLVLSIASSFFTLNSAAYLPTLIFGTYMGWLYLRYFQRRTETKLRGDPSDDFAFSTFFPELLRPIIDPIASIFHRMLCGRSNATSEDHGYTTSGAPLPGSDSAEASRRRERGARALEERLATERLVPPRNKEELQSDALDSV

SEQ ID NO: 109980 - protein, 305 aa, Zea mays subsp. mays
  misc_feature (1)..(305): Ceres Seq. ID no. 15179990
  misc_feature (18)..(272): Homolog of NCBI NO: 31197821 NR Description: ENSANGP00000018642 [Anopheles gambiae]
  misc_feature (11)..(282): Homolog of NCBI NO: 32413290 NR Description: hypothetical protein [Neurospora crassa]
  misc_feature (6)..(286): Homolog of NCBI NO: 19920824 NR Description: CG9536-PA [Drosophila melanogaster]
  misc_feature (18)..(283): Homolog of NCBI NO: 34865897 NR Description: similar to PL6 protein [Rattus norvegicus]
  misc_feature (18)..(283): Homolog of NCBI NO: 9790165 NR Description: PL6 protein; PL-6; placental protein 6 [Mus
  misc_feature (41)..(304): Homolog of NCBI NO: 5902022 NR Description: PL6 protein [Homo sapiens]
  misc_feature (1)..(286): Homolog of NCBI NO: 21741573 NR Description: OSJNBa0094O15.3 [Oryza sativa (japonica
  misc_feature (1)..(305): Homolog of NCBI NO: 34395257 NR Description: putative placental protein 6
  misc_feature (7)..(305): Homolog of NCBI NO: 6648207 NR Description: unknown protein [Arabidopsis thaliana]
  misc_feature (1)..(305): Homolog of NCBI NO: 18398108 NR Description: expressed protein [Arabidopsis thaliana]
MSSPGITSMFTNFTKLCKGLALVLVVGHLLVQFVPATVPYLALIPARTIPFGWNLITSGYFELSVHGVVISTVSLLFMGKFLEPVWGSKEFLKFIFVVNFLTYLCVFVTAIALYYITRLEIYLYMPFAGFHGVLAGLLVGIKQIIPDQEVLLVKIKAKWLPSITLVLSIASSFFTLNSAAYLPTLIFGTYMGWLYLRYFQRRTETKLRGDPSDDFAFSTFFPELLRPIIDPIASIFHRMLCGRSNATSEDHGYTTSGAPLPGSDSAEASRRRERGARALEERLATERLVPPRNKEELQSDALDSV

SEQ ID NO: 109981 - protein, 297 aa, Zea mays subsp. mays
  misc_feature (1)..(297): Ceres Seq. ID no. 15179991
  misc_feature (10)..(264): Homolog of NCBI NO: 31197821 NR Description: ENSANGP00000018642 [Anopheles gambiae]
  misc_feature (3)..(274): Homolog of NCBI NO: 32413290 NR Description: hypothetical protein [Neurospora crassa]
  misc_feature (1)..(278): Homolog of NCBI NO: 19920824 NR Description: CG9536-PA [Drosophila melanogaster]
  misc_feature (10)..(275): Homolog of NCBI NO: 34865897 NR Description: similar to PL6 protein [Rattus norvegicus]
  misc_feature (10)..(275): Homolog of NCBI NO: 9790165 NR Description: PL6 protein; PL-6; placental protein 6 [Mus
  misc_feature (33)..(296): Homolog of NCBI NO: 5902022 NR Description: PL6 protein [Homo sapiens]
  misc_feature (1)..(278): Homolog of NCBI NO: 21741573 NR Description: OSJNBa0094O15.3 [Oryza sativa (japonica
  misc_feature (1)..(297): Homolog of NCBI NO: 34395257 NR Description: putative placental protein 6
  misc_feature (1)..(297): Homolog of NCBI NO: 6648207 NR Description: unknown protein [Arabidopsis thaliana]
  misc_feature (1)..(297): Homolog of NCBI NO: 18398108 NR Description: expressed protein [Arabidopsis thaliana]
MFTNFTKLCKGLALVLVVGHLLVQFVPATVPYLALIPARTIPFGWNLITSGYFELSVHGVVISTVSLLFMGKFLEPVWGSKEFLKFIFVVNFLTYLCVFVTAIALYYITRLEIYLYMPFAGFHGVLAGLLVGIKQIIPDQEVLLVKIKAKWLPSITLVLSIASSFFTLNSAAYLPTLIFGTYMGWLYLRYFQRRTETKLRGDPSDDFAFSTFFPELLRPIIDPIASIFHRMLCGRSNATSEDHGYTTSGAPLPGSDSAEASRRRERGARALEERLATERLVPPRNKEELQSDALDSV

SEQ ID NO: 109982 - DNA, 811 bp, Zea mays subsp. mays
  misc_feature (1)..(811): Ceres Seq. ID no. 15179986
aaatgcagcaaaaaccttacatctgatagaaaagaagagcttcgttcgctaaaaagatgagtttgatcctcagattcagacaacacttatcaacaaggttatcacaaacctccagatcaccactcgcttctcttctcaacggtcgccggagtttcggacaaccggcgggaaaacaagatgaagaggaagaagaagaaatagatcagaggaagctcccaaccgactacgacgccgcgacattcgatccgacagaacaccgaagtccgccaacggaccgcgtgttccgcctcgtcgacgagatctcgtctctaacgctatcggaaatctcagagctcggcgcgattatactgaagaagagagggatcacggagacaccaaccgtcgccgttatgaagcccggagctgtcgctgccggcgggatcgctcagggcggaggcggtggcggagcgagtgaagaagcgaaagtggagaagacagtgtttgagataaagcttgagggttttgaagcgtctgggaagatcaagattattaaggaggtgaggagctttactgatctgggacttaaggaagcgaaggagttggtggagaagactccttcggttttgaaagctggtgtttctaaagaggaaggtgagaagattgttgacaagcttaaggctcttggtgctaaagttgttcttgagtgagtttcttgatcttcgattttctttttctttggttccattttaataggagctaataatgtaatagatttacacttaagcagctttgtctcattgctataattggtggaagtacatcaatgtttggg

SEQ ID NO: 109983 - protein, 209 aa, Zea mays subsp. mays
  misc_feature (1)..(209): Ceres Seq. ID no. 15179987
  misc_feature (142)..(209): Pfam Name: Ribosomal protein L7/L12 C-terminal domain Pfam Description: Ribosomal protein L7/L12 C-terminal domain
  misc_feature (78)..(208): Homolog of NCBI NO: 730573 NR Description: 50S ribosomal protein L7/L12
  misc_feature (53)..(209): Homolog of NCBI NO: 6321369 NR Description: Protein required for cell viability; Ygl068wp
  misc_feature (69)..(209): Homolog of NCBI NO: 40745733 NR Description: hypothetical protein AN2057.2 [Aspergillus
  misc_feature (72)..(209): Homolog of NCBI NO: 15235649 NR Description: ribosomal - like protein [Arabidopsis thaliana]
  misc_feature (122)..(209): Homolog of NCBI NO: 15227539 NR Description: 50S ribosomal protein L7/L12 [Arabidopsis
  misc_feature (44)..(209): Homolog of NCBI NO: 15230614 NR Description: expressed protein [Arabidopsis thaliana]
  misc_feature (51)..(209): Homolog of NCBI NO: 34913132 NR Description: contains EST AU058363(E50673)~ribosomal-like
  misc_feature (61)..(209): Homolog of NCBI NO: 15234393 NR Description: ribosomal protein [Arabidopsis thaliana]
  misc_feature (83)..(209): Homolog of NCBI NO: 15209174 NR Description: hypothetical protein [Solanum demissum]
  misc_feature (1)..(209): Homolog of NCBI NO: 18409467 NR Description: expressed protein [Arabidopsis thaliana]
MSLILRFRQHLSTRLSQTSRSPLASLLNGRRSFGQPAGKQDEEEEEEIDQRKLPTDYDAATFDPTEHRSPPTDRVFRLVDEISSLTLSEISELGAIILKKRGITETPTVAVMKPGAVAAGGIAQGGGGGGASEEAKVEKTVFEIKLEGFEASGKIKIIKEVRSFTDLGLKEAKELVEKTPSVLKAGVSKEEGEKIVDKLKALGAKVVLE

SEQ ID NO: 109984 - DNA, 1131 bp, Zea mays subsp. mays
  misc_feature (1)..(1131): Ceres Seq. ID no. 15175169
aaaaaaaagcaaattttgatttcttagagagagataggagacggagggaagatcggtaaggaggagagaggaagatgatcaccggcgggagctacacgactatcgacgcccagaaagtctctggatctgtaccttctgttccagatccaggccacaccaccgtcaaattcgcagagtcaaatcttcaaacctttcctccgtctgctactcagggcaagatctctggtggtagtaatcctcctcgagatgctgacgatacattttctgggaatggtaatagtagtacagatgagcctcagtctggtggctggctccataaattcactgtcggtgcttacaagcctttctttgatgtcgacacttctgatgttgtggagaggctcaaagaatctctcttcccgttccgtggaacttttacggagaagactgccgataagcctgacttgtatggtccattttggatatgcacgactttgatattcgtggcggcatcgatcggcacgtttgtcacatacgtggcacacaaatggaagaaacaagaatggaactacgatatcaatcttgtgacttggtccgcaggagtgttctacggttatgtcacgcttgttcctctcgcgttatatgtcgttctcaagtacttctctgcaccttcgggactagtccagctcttctgtctctacggctattctctattcgtgtttatccccgcattgtgcctctcggtcgtgccagtggagatcttcagatgggttattgcgggtgtagcagggttcatgtctgcaacctttgtggctctcaacctcaaagcgcatatcaattctgctggggagagatcgatcctgataatcgcaagcatctttcttttgcagctcgggcttgcggttgtgctgaagctttatctattcactgtcaccgtatgatccatttagacctttgttcttcctataacctgaaaaggtaatgtgagtttctgataatttgtagatccatccataacgttttctcctcaaattttatccaaatttttgtacggcttggatgctctatgattccatttcatttagttacttgaaccttcccatggtatacttgtagaaaatattgtaataaaaatatatcgatttgtttgcg

SEQ ID NO: 109985 - protein, 281 aa, Zea mays subsp. mays
  misc_feature (1)..(281): Ceres Seq. ID no. 15175170
  misc_feature (92)..(257): Pfam Name: Yip1 domain Pfam Description: Yip1 domain
  misc_feature (57)..(277): Homolog of NCBI NO: 21704084 NR Description: RIKEN cDNA C030002N13 [Mus musculus]
  misc_feature (24)..(277): Homolog of NCBI NO: 10092643 NR Description: hypothetical protein DJ167A19.1 [Homo sapiens]
  misc_feature (24)..(277): Homolog of NCBI NO: 40740298 NR Description: hypothetical protein AN4017.2 [Aspergillus
  misc_feature (24)..(277): Homolog of NCBI NO: 32408303 NR Description: hypothetical protein [Neurospora crassa]
  misc_feature (6)..(277): Homolog of NCBI NO: 30688039 NR Description: expressed protein [Arabidopsis thaliana]
  misc_feature (1)..(281): Homolog of NCBI NO: 34912560 NR Description: P0410E03.18 [Oryza sativa (japonica
  misc_feature (1)..(281): Homolog of NCBI NO: 38564308 NR Description: At5g27490 [Arabidopsis thaliana]
  misc_feature (1)..(281): Homolog of NCBI NO: 30690667 NR Description: expressed protein [Arabidopsis thaliana]
  misc_feature (2)..(281): Homolog of NCBI NO: 6729038 NR Description: unknown protein [Arabidopsis thaliana]
  misc_feature (1)..(281): Homolog of NCBI NO: 30679454 NR Description: expressed protein [Arabidopsis thaliana]
MITGGSYTTIDAQKVSGSVPSVPDPGHTTVKFAESNLQTFPPSATQGKISGGSNPPRDADDTFSGNGNSSTDEPQSGGWLHKFTVGAYKPFFDVDTSDVVERLKESLFPFRGTFTEKTADKPDLYGPFWICTTLIFVAASIGTFVTYVAHKWKKQEWNYDINLVTWSAGVFYGYVTLVPLALYVVLKYFSAPSGLVQLFCLYGYSLFVFIPALCLSVVPVEIFRWVIAGVAGFMSATFVALNLKAHINSAGERSILIIASIFLLQLGLAVVLKLYLFTVTV

SEQ ID NO: 109986 - protein, 165 aa, Zea mays subsp. mays
  misc_feature (1)..(165): Ceres Seq. ID no. 15175171
MHDFDIRGGIDRHVCHIRGTQMEETRMELRYQSCDLVRRSVLRLCHACSSRVICRSQVLLCTFGTSPALLSLRLFSIRVYPRIVPLGRASGDLQMGYCGCSRVHVCNLCGSQPQSAYQFCWGEIDPDNRKHLSFAARACGCAEALSIHCHRMIHLDLCSSYNLKR

SEQ ID NO: 109987 - protein, 144 aa, Zea mays subsp. mays
  misc_feature (1)..(144): Ceres Seq. ID no. 15175172
MEETRMELRYQSCDLVRRSVLRLCHACSSRVICRSQVLLCTFGTSPALLSLRLFSIRVYPRIVPLGRASGDLQMGYCGCSRVHVCNLCGSQPQSAYQFCWGEIDPDNRKHLSFAARACGCAEALSIHCHRMIHLDLCSSYNLKR

SEQ ID NO: 109988 - DNA, 1414 bp, Zea mays subsp. mays
  misc_feature (1)..(1414): Ceres Seq. ID no. 15179340
attatttttaacattttaatataaaaaccatcaaatgatctccaaaagttgattagctctctcttcgtttctgaataccaaacttttgttttgagctttaacccaaaccctaattttcgttttcttttctctcaagattatctttgaaaataattaagccatcgatgcttgaagttggagcaatggatatgactcctaaatctcctgaacccgaatccgaaacaccaacccggatccaaccagctaaaccgatctccttcagcaacggaatcatcaaacgccaccaccacatccaccaccacacagtcaccgtcacatacaaagaatgcctcaagaaccacgctgccgcgattggaggtcacgcgctagacggttgcggcgagttcatgccttctccttcctccacgccttccgatccaacttccctcaagtgtgccgcctgcggttgccaccgtaacttccaccgccgtgaccccgatgactcttccctcatttccgccgtgcctccaccgtctctccctccatcctccactaccgccgcaatcgagtaccagcctcaccaccgtcaccaccctcccccaccggctcctcctctccctcgcagccctacttcctcctctccgccgcctatctcctcttcttacatgctcctcgctctctccggtaacaataaacccggcggaaacagcttaccgttctcagatctcaacttcgcggccaacaacctctccactcaccaccaccacaaccacaatactccaggctcccggaagcggttcaggactaagttcagccaaacccagaaagacaagatgcacgagttcgccgaccgtatcggctggaagattcagaagcgcgacgaggacgaggtgcgcgacttctgccgcgaggtcggtgttgataaaggcgtgctcaaggtctggatgcacaataacaaaaacaccttcaacacccgccgcgaccagccgttctccggcgacaccaccgtccagaagatcgacaacggcgtcgctgtttctggcggcgagaatattaataataataataataataataacaacgcggtggatgttggcgttcacggtggaaacggtttaaaacacgacctgcacggcggcgatggtgggaggttcgagagtgatagcggcggagctgcggctaacgggtcgtcgtctacgtcgtgaagatgagaaactgtttttgttttgcagggaaagagcaataaagaagcttaagcttctgtttagcttagatcgtagagtaagaagcactgctattatcatcgttaatacgtttattaatattaattaaactcctttttagctcttttgtttctttttttattattagtttgttttccgacattaccatgaacttgtctcaaggaggtaataatataacacgttcaggagtt

SEQ ID NO: 109989 - protein, 339 aa, Zea mays subsp. mays
  misc_feature (1)..(339): Ceres Seq. ID no. 15179341
  misc_feature (50)..(108): Pfam Name: ZF-HD protein dimerisation region Pfam Description: ZF-HD protein dimerisation region
  misc_feature (16)..(293): Homolog of NCBI NO: 20148768 NR Description: hypothetical protein At2g02540/T822.16
  misc_feature (16)..(298): Homolog of NCBI NO: 15226993 NR Description: expressed protein [Arabidopsis thaliana]
  misc_feature (13)..(183): Homolog of NCBI NO: 15242243 NR Description: expressed protein [Arabidopsis thaliana]
  misc_feature (16)..(144): Homolog of NCBI NO: 13277216 NR Description: ZF-HD homeobox protein [Flaveria trinervia]
  misc_feature (133)..(287): Homolog of NCBI NO: 13277216 NR Description: ZF-HD homeobox protein [Flaveria trinervia]
  misc_feature (74)..(339): Homolog of NCBI NO: 13277222 NR Description: ZF-HD homeobox protein [Flaveria bidentis]
  misc_feature (10)..(311): Homolog of NCBI NO: 13277220 NR Description: ZF-HD homeobox protein [Flaveria bidentis]
  misc_feature (10)..(338): Homolog of NCBI NO: 21592512 NR Description: unknown [Arabidopsis thaliana]
  misc_feature (1)..(282): Homolog of NCBI NO: 15228530 NR Description: expressed protein [Arabidopsis thaliana]
  misc_feature (10)..(338): Homolog of NCBI NO: 18421904 NR Description: expressed protein [Arabidopsis thaliana]
MLEVGAMDMTPKSPEPESETPTRIQPAKPISFSNGIIKRHHHIHHHTVTVTYKECLKNHAAAIGGHALDGCGEFMPSPSSTPSDPTSLKCAACGCHRNFHRRDPDDSSLISAVPPPSLPPSSTTAAIEYQPHHRHHPPPPAPPLPRSPTSSSPPPISSSYMLLALSGNNKPGGNSLPFSDLNFAANNLSTHHHHNHNTPGSRKRFRTKFSQTQKDKMHEFADRIGWKIQKRDEDEVRDFCREVGVDKGVLKVWMHNNKNTFNTRRDQPFSGDTTVQKIDNGVAVSGGENINNNNNNNNNAVDVGVHGGNGLKHDLHGGDGGRFESDSGGAAANGSSSTS

SEQ ID NO: 109990 - protein, 333 aa, Zea mays subsp. mays
  misc_feature (1)..(333): Ceres Seq. ID no. 15179342
  misc_feature (44)..(102): Pfam Name: ZF-HD protein dimerisation region Pfam Description: ZF-HD protein dimerisation region
  misc_feature (10)..(292): Homolog of NCBI NO: 15226993 NR Description: expressed protein [Arabidopsis thaliana]
  misc_feature (7)..(177): Homolog of NCBI NO: 15242243 NR Description: expressed protein [Arabidopsis thaliana]
  misc_feature (10)..(138): Homolog of NCBI NO: 13277216 NR Description: ZF-HD homeobox protein [Flaveria trinervia]
  misc_feature (127)..(281): Homolog of NCBI NO: 13277216 NR Description: ZF-HD homeobox protein [Flaveria trinervia]
  misc_feature (68)..(333): Homolog of NCBI NO: 13277222 NR Description: ZF-HD homeobox protein [Flaveria bidentis]
  misc_feature (10)..(287): Homolog of NCBI NO: 20148768 NR Description: hypothetical protein At2g02540/T822.16
  misc_feature (4)..(305): Homolog of NCBI NO: 13277220 NR Description: ZF-HD homeobox protein [Flaveria bidentis]
  misc_feature (4)..(332): Homolog of NCBI NO: 21592512 NR Description: unknown [Arabidopsis thaliana]
  misc_feature (1)..(276): Homolog of NCBI NO: 15228530 NR Description: expressed protein [Arabidopsis thaliana]
  misc_feature (4)..(332): Homolog of NCBI NO: 18421904 NR Description: expressed protein [Arabidopsis thaliana]
MDMTPKSPEPESETPTRIQPAKPISFSNGIIKRHHHIHHHTVTVTYKECLKNHAAAIGGHALDGCGEFMPSPSSTPSDPTSLKCAACGCHRNFHRRDPDDSSLISAVPPPSLPPSSTTAAIEYQPHHRHHPPPPAPPLPRSPTSSSPPPISSSYMLLALSGNNKPGGNSLPFSDLNFAANNLSTHHHHNHNTPGSRKRFRTKFSQTQKDKMHEFADRIGWKIQKRDEDEVRDFCREVGVDKGVLKVWMHNNKNTFNTRRDQPFSGDTTVQKIDNGVAVSGGENINNNNNNNNNAVDVGVHGGNGLKHDLHGGDGGRFESDSGGAAANGSSSTS

SEQ ID NO: 109991 - protein, 331 aa, Zea mays subsp. mays
  misc_feature (1)..(331): Ceres Seq. ID no. 15179343
  misc_feature (42)..(100): Pfam Name: ZF-HD protein dimerisation region Pfam Description: ZF-HD protein dimerisation region
  misc_feature (8)..(285): Homolog of NCBI NO: 20148768 NR Description: hypothetical protein At2g02540/T822.16
  misc_feature (8)..(290): Homolog of NCBI NO: 15226993 NR Description: expressed protein [Arabidopsis thaliana]
  misc_feature (5)..(175): Homolog of NCBI NO: 15242243 NR Description: expressed protein [Arabidopsis thaliana]
  misc_feature (8)..(136): Homolog of NCBI NO: 13277216 NR Description: ZF-HD homeobox protein [Flaveria trinervia]
  misc_feature (125)..(279): Homolog of NCBI NO: 13277216 NR Description: ZF-HD homeobox protein [Flaveria trinervia]
  misc_feature (66)..(331): Homolog of NCBI NO: 13277222 NR Description: ZF-HD homeobox protein [Flaveria bidentis]
  misc_feature (2)..(303): Homolog of NCBI NO: 13277220 NR Description: ZF-HD homeobox protein [Flaveria bidentis]
  misc_feature (2)..(330): Homolog of NCBI NO: 21592512 NR Description: unknown [Arabidopsis thaliana]
  misc_feature (1)..(274): Homolog of NCBI NO: 15228530 NR Description: expressed protein [Arabidopsis thaliana]
  misc_feature (2)..(330): Homolog of NCBI NO: 18421904 NR Description: expressed protein [Arabidopsis thaliana]
MTPKSPEPESETPTRIQPAKPISFSNGIIKRHHHIHHHTVTVTYKECLKNHAAAIGGHALDGCGEFMPSPSSTPSDPTSLKCAACGCHRNFHRRDPDDSSLISAVPPPSLPPSSTTAAIEYQPHHRHHPPPPAPPLPRSPTSSSPPPISSSYMLLALSGNNKPGGNSLPFSDLNFAANNLSTHHHHNHNTPGSRKRFRTKFSQTQKDKMHEFADRIGWKIQKRDEDEVRDFCREVGVDKGVLKVWMHNNKNTFNTRRDQPFSGDTTVQKIDNGVAVSGGENINNNNNNNNNAVDVGVHGGNGLKHDLHGGDGGRFESDSGGAAANGSSSTS

SEQ ID NO: 109992 - DNA, 1077 bp, Zea mays subsp. mays
  misc_feature (1)..(1077): Ceres Seq. ID no. 15179351
agaccaatcactacacaaataaaccataactctctctctctcaaaacattttaacttcaaaccaattaattctcaccgatcatgccgatcagaaacatcgccatcggcggagtccaaggagaagtgactcaccccagcgcacttagggcggcactcgctgagtttatctccactttgatctttgtcttcgccggctcaggatccggaatcgctttcaacaagctcactgacaatggtgcgaccactccttcaggcctcgtcgccgctgctttagctcatgctttcggtctcttcgtcgctgtttccgtcggtgctaacatctctggtggtcacgttaacccagccgttaccttcggtgctttcgtcggtggaaacatcactctcctccgtggtatcctctattggattgctcagcttcttggctcagtcgtcgcttgtctcctccttaaattcgccaccggtggcttggcagttccagcttttggtctctctgctggagttgaatccttaaacggtttcgtcttcgagatcgtgatgaccttcgggctcgtctacaccgtctacgccacagccgttgaccccaagaacggtagtctcggaacaatcgcaccaatcgccataggtttcatcgttggagctaacatcctcgccggtggagctttcagcggagcctccatgaacccagccgtggcttttggaccagccgtcgtgagctggacgtggaccaaccactggatctactgggctggtcctcttgtcggtggtggactcgctggactcatctacgagtttgtcttcatcaaccaaaacggccacgagcaattgcccaccactgattactgtctactgaagactgccaaaactcaatatgatttgatttgtttttatttcgcatcgtaatggggtcgttggatcttttttagatgaatcgttgtatgttgattttattgtgtatttgggtttgtcgttggagttttagttccctggaatgcttttgtgcaattgtattgtacggtacggtacggtactgatgactatgaatgataaaaccagggaatgtgaattacccaagcttcc

SEQ ID NO: 109993 - protein, 272 aa, Zea mays subsp. mays
  misc_feature (1)..(272): Ceres Seq. ID no. 15179352
  misc_feature (14)..(235): Pfam Name: Major intrinsic protein Pfam Description: Major intrinsic protein
  misc_feature (1)..(241): Homolog of NCBI NO: 99747 NR Description: probable membrane channel protein RB7 -
  misc_feature (1)..(253): Homolog of NCBI NO: 21284370 NR Description: tonoplast intrinsic protein bobTIP26-1
  misc_feature (1)..(253): Homolog of NCBI NO: 22858917 NR Description: tonoplast intrinsic protein bobTIP26-2
  misc_feature (1)..(253): Homolog of NCBI NO: 15228041 NR Description: major intrinsic protein (MIP) family [Arabidopsis
  misc_feature (1)..(253): Homolog of NCBI NO: 475048 NR Description: tonoplast intrinsic protein gamma (gamma-TIP)
  misc_feature (1)..(253): Homolog of NCBI NO: 21593151 NR Description: putative aquaporin (tonoplast intrinsic protein
  misc_feature (1)..(253): Homolog of NCBI NO: 11357300 NR Description: gamma tonoplast intrinsic protein 2
  misc_feature (1)..(253): Homolog of NCBI NO: 15231569 NR Description: tonoplast intrinsic protein, putative
  misc_feature (1)..(253): Homolog of NCBI NO: 5081419 NR Description: tonoplast intrinsic protein [Brassica napus]
  misc_feature (1)..(253): Homolog of NCBI NO: 1514977 NR Description: VM23 [Raphanus sativus]
MPIRNIAIGGVQGEVTHPSALRAALAEFISTLIFVFAGSGSGIAFNKLTDNGATTPSGLVAAALAHAFGLFVAVSVGANISGGHVNPAVTFGAFVGGNITLLRGILYWIAQLLGSVVACLLLKFATGGLAVPAFGLSAGVESLNGFVFEIVMTFGLVYTVYATAVDPKNGSLGTIAPIAIGFIVGANILAGGAFSGASMNPAVAFGPAVVSWTWTNHWIYWAGPLVGGGLAGLIYEFVFINQNGHEQLPTTDYCLLKTAKTQYDLICFYFAS

SEQ ID NO: 109994 - DNA, 712 bp, Zea mays subsp. mays
  misc_feature (1)..(712): Ceres Seq. ID no. 15179357
attcctcgttatctccaaagctccgttaatctaattatcaccaatcttgatcaaatccaatggatcaaaggcctctgggattgctaacgatccacgtcaaaagagggattaatctcgccattcgcgaccatcgaagcagcgatccttatgttgttatcaccgtcgccgaccagacattgaagacgcgtgtggtgaagaaaaactgcaatcctgtatggaatgaagaaatgaccgttgctatcaaagatcccaatgtccctatccgcttgacagtgtttgactgggacaagttcactggagatgacaagatgggagatgcaaacttagacattcagccctacttagagtctctcaaaatgggaatggagcttttgaggctccctaatggatgcgctatcaaaagggttcagccctccaggcacaactgtttatctgacgaaagcagcatcgtgtggaacaatggtaaaatcacgcaagacatgatccttaggctaaacaatgtcgagtgcggcgagattgaggtcatgcttgaatggcatgaaggtgctggttgcagaggtatcacttccaaaggagtaggtggaggctcttcctctacctaaaataatatggttgttcttcttgtcgtatacctgtttgaatgaaattgatctattgactattgttgttgttgtttccatatgtcgtagaatttttgtatctctttcttccg

SEQ ID NO: 109995 - protein, 180 aa, Zea mays subsp. mays
  misc_feature (1)..(180): Ceres Seq. ID no. 15179358
  misc_feature (9)..(88): Pfam Name: C2 domain Pfam Description: C2 domain
  misc_feature (6)..(164): Homolog of NCBI NO: 18408493 NR Description: C2 domain-containing protein [Arabidopsis
  misc_feature (1)..(168): Homolog of NCBI NO: 30684739 NR Description: C2 domain-containing protein [Arabidopsis
  misc_feature (6)..(168): Homolog of NCBI NO: 15223248 NR Description: hypothetical protein [Arabidopsis thaliana]
  misc_feature (6)..(168): Homolog of NCBI NO: 25405940 NR Description: protein T1N15.21 [imported] - Arabidopsis
  misc_feature (6)..(168): Homolog of NCBI NO: 15221907 NR Description: C2 domain-containing protein [Arabidopsis
  misc_feature (6)..(168): Homolog of NCBI NO: 15240322 NR Description: C2 domain-containing protein [Arabidopsis
  misc_feature (6)..(168): Homolog of NCBI NO: 13430460 NR Description: unknown protein [Arabidopsis thaliana]
  misc_feature (6)..(168): Homolog of NCBI NO: 18409682 NR Description: C2 domain-containing protein [Arabidopsis
  misc_feature (1)..(172): Homolog of NCBI NO: 18409675 NR Description: C2 domain-containing protein [Arabidopsis
  misc_feature (1)..(180): Homolog of NCBI NO: 15226306 NR Description: C2 domain-containing protein [Arabidopsis
MDQRPLGLLTIHVKRGINLAIRDHRSSDPYVVITVADQTLKTRVVKKNCNPVWNEEMTVAIKDPNVPIRLTVFDWDKFTGDDKMGDANLDIQPYLESLKMGMELLRLPNGCAIKRVQPSRHNCLSDESSIVWNNGKITQDMILRLNNVECGEIEVMLEWHEGAGCRGITSKGVGGGSSST

SEQ ID NO: 109996 - protein, 124 aa, Zea mays subsp. mays
  misc_feature (1)..(124): Ceres Seq. ID no. 15179359
  misc_feature (1)..(108): Homolog of NCBI NO: 18408493 NR Description: C2 domain-containing protein [Arabidopsis
  misc_feature (1)..(112): Homolog of NCBI NO: 30684739 NR Description: C2 domain-containing protein [Arabidopsis
  misc_feature (1)..(112): Homolog of NCBI NO: 15223248 NR Description: hypothetical protein [Arabidopsis thaliana]
  misc_feature (1)..(112): Homolog of NCBI NO: 25405940 NR Description: protein T1N15.21 [imported] - Arabidopsis
  misc_feature (1)..(112): Homolog of NCBI NO: 15221907 NR Description: C2 domain-containing protein [Arabidopsis
  misc_feature (1)..(112): Homolog of NCBI NO: 15240322 NR Description: C2 domain-containing protein [Arabidopsis
  misc_feature (1)..(112): Homolog of NCBI NO: 13430460 NR Description: unknown protein [Arabidopsis thaliana]
  misc_feature (1)..(112): Homolog of NCBI NO: 18409682 NR Description: C2 domain-containing protein [Arabidopsis
  misc_feature (1)..(116): Homolog of NCBI NO: 18409675 NR Description: C2 domain-containing protein [Arabidopsis
  misc_feature (1)..(124): Homolog of NCBI NO: 15226306 NR Description: C2 domain-containing protein [Arabidopsis
MTVAIKDPNVPIRLTVFDWDKFTGDDKMGDANLDIQPYLESLKMGMELLRLPNGCAIKRVQPSRHNCLSDESSIVWNNGKITQDMILRLNNVECGEIEVMLEWHEGAGCRGITSKGVGGGSSST

SEQ ID NO: 109997 - protein, 97 aa, Zea mays subsp. mays
  misc_feature (1)..(97): Ceres Seq. ID no. 15179360
  misc_feature (1)..(81): Homolog of NCBI NO: 18408493 NR Description: C2 domain-containing protein [Arabidopsis
  misc_feature (1)..(85): Homolog of NCBI NO: 30684739 NR Description: C2 domain-containing protein [Arabidopsis
  misc_feature (1)..(85): Homolog of NCBI NO: 15223248 NR Description: hypothetical protein [Arabidopsis thaliana]
  misc_feature (1)..(85): Homolog of NCBI NO: 25405940 NR Description: protein T1N15.21 [imported] - Arabidopsis
  misc_feature (1)..(85): Homolog of NCBI NO: 15221907 NR Description: C2 domain-containing protein [Arabidopsis
  misc_feature (1)..(85): Homolog of NCBI NO: 15240322 NR Description: C2 domain-containing protein [Arabidopsis
  misc_feature (1)..(85): Homolog of NCBI NO: 13430460 NR Description: unknown protein [Arabidopsis thaliana]
  misc_feature (1)..(85): Homolog of NCBI NO: 18409682 NR Description: C2 domain-containing protein [Arabidopsis
  misc_feature (1)..(89): Homolog of NCBI NO: 18409675 NR Description: C2 domain-containing protein [Arabidopsis
  misc_feature (1)..(97): Homolog of NCBI NO: 15226306 NR Description: C2 domain-containing protein [Arabidopsis
MGDANLDIQPYLESLKMGMELLRLPNGCAIKRVQPSRHNCLSDESSIVWNNGKITQDMILRLNNVECGEIEVMLEWHEGAGCRGITSKGVGGGSSST

SEQ ID NO: 109998 - DNA, 831 bp, Zea mays subsp. mays
  misc_feature (1)..(831): Ceres Seq. ID no. 15177889
acaccaaacaacacactaacatacacatcatctcctctctcttctcttatcttctccgctatgaagctagccactagcctcaactccaagttcctccgcctcagccctaaacgtatcttccgctccaagtccaagtcctcctccgtctccagatccgaaccttcgtccttcagctccggtgcttcttccgacggctcctacagcgacctcaagccaggtcccgccgccactcccatcagtgtcctccccggagaccacgatggtttttactccgagctgatccaagcgtttaagctcatagaccgcgacgacgacggcgtggtttcaagaagagacctagccgcgctccttagcaggctgagtcctgaaccgccgagtcaagaagaggttactctaatgcttcaagaagtcgatggaggaggagacggttgtatcagtctcgaggagcttgctagccgcgtggcgggaacctcctctgactctgatgaaggctccgtcgagatgagagaggtgtttgagttttttgacgtggatcacgacgggaggatatcggcggaggagttgcatagagtttttggagttatcggagacgagcggtgcacgttagaggagtgtgtgcgtatgattgcgaccgttgatgggaacggtgacggttttgtttgctttgatgacttttgccgcatgatggaagcatcaggctccagcgatgaatgatcatcattgagtcatgtttgtatggttgatgataatgacatcgttatgctctcccacattattttatattattgtaatttatatattccggtgggtataattttgtctcgggaaaac

SEQ ID NO: 109999 - protein, 237 aa, Zea mays subsp. mays
  misc_feature (1)..(237): Ceres Seq. ID no. 15177890
  misc_feature (204)..(229): Pfam Name: EF hand Pfam Description: EF hand
  misc_feature (97)..(237): Homolog of NCBI NO: 13397927 NR Description: putative calmodulin-related protein [Medicago
  misc_feature (66)..(234): Homolog of NCBI NO: 19386815 NR Description: B1147A04.10 [Oryza sativa (japonica
  misc_feature (88)..(235): Homolog of NCBI NO: 18408502 NR Description: calmodulin-related protein, putative [Arabidopsis
  misc_feature (13)..(235): Homolog of NCBI NO: 28301674 NR Description: calcium-binding protein [Lotus corniculatus var.
  misc_feature (88)..(235): Homolog of NCBI NO: 21618074 NR Description: calmodulin-related protein [Arabidopsis thaliana]
  misc_feature (78)..(237): Homolog of NCBI NO: 34895640 NR Description: OSJNBa0083M16.33 [Oryza sativa (japonica
  misc_feature (30)..(230): Homolog of NCBI NO: 15228219 NR Description: calmodulin, putative [Arabidopsis thaliana]
  misc_feature (21)..(229): Homolog of NCBI NO: 322474 NR Description: calmodulin-related protein (clone PM129) -
  misc_feature (21)..(229): Homolog of NCBI NO: 21536925 NR Description: calmodulin-like protein [Arabidopsis thaliana]
  misc_feature (21)..(229): Homolog of NCBI NO: 15227349 NR Description: calmodulin, putative [Arabidopsis thaliana]
TPNNTLTYTSSPLSSLIFSAMKLATSLNSKFLRLSPKRIFRSKSKSSSVSRSEPSSFSSGASSDGSYSDLKPGPAATPISVLPGDHDGFYSELIQAFKLIDRDDDGVVSRRDLAALLSRLSPEPPSQEEVTLMLQEVDGGGDGCISLEELASRVAGTSSDSDEGSVEMREVFEFFDVDHDGRISAEELHRVFGVIGDERCTLEECVRMIATVDGNGDGFVCFDDFCRMMEASGSSDE

SEQ ID NO: 110000 - protein, 217 aa, Zea mays subsp. mays
  misc_feature (1)..(217): Ceres Seq. ID no. 15177891
  misc_feature (184)..(209): Pfam Name: EF hand Pfam Description: EF hand
  misc_feature (77)..(217): Homolog of NCBI NO: 13397927 NR Description: putative calmodulin-related protein [Medicago
  misc_feature (46)..(214): Homolog of NCBI NO: 19386815 NR Description: B1147A04.10 [Oryza sativa (japonica
  misc_feature (68)..(215): Homolog of NCBI NO: 18408502 NR Description: calmodulin-related protein, putative [Arabidopsis
  misc_feature (1)..(215): Homolog of NCBI NO: 28301674 NR Description: calcium-binding protein [Lotus corniculatus var.
  misc_feature (68)..(215): Homolog of NCBI NO: 21618074 NR Description: calmodulin-related protein [Arabidopsis thaliana]
  misc_feature (58)..(217): Homolog of NCBI NO: 34895640 NR Description: OSJNBa0083M16.33 [Oryza sativa (japonica
  misc_feature (10)..(210): Homolog of NCBI NO: 15228219 NR Description: calmodulin, putative [Arabidopsis thaliana]
  misc_feature (1)..(209): Homolog of NCBI NO: 322474 NR Description: calmodulin-related protein (clone PM129) -
  misc_feature (1)..(209): Homolog of NCBI NO: 21536925 NR Description: calmodulin-like protein [Arabidopsis thaliana]
  misc_feature (1)..(209): Homolog of NCBI NO: 15227349 NR Description: calmodulin, putative [Arabidopsis thaliana]
MKLATSLNSKFLRLSPKRIFRSKSKSSSVSRSEPSSFSSGASSDGSYSDLKPGPAATPISVLPGDHDGFYSELIQAFKLIDRDDDGVVSRRDLAALLSRLSPEPPSQEEVTLMLQEVDGGGDGCISLEELASRVAGTSSDSDEGSVEMREVFEFFDVDHDGRISAEELHRVFGVIGDERCTLEECVRMIATVDGNGDGFVCFDDFCRMMEASGSSDE

SEQ ID NO: 110001 - DNA, 1036 bp, Zea mays subsp. mays
  misc_feature (1)..(1036): Ceres Seq. ID no. 15178108
ttctttcgattcccctttgatctatagcctttttgattttcgttttctctctcgatctaataatctctttctcgcttttcaaaatcatctcctccttcgtttgattctgttctctgttgattttagatctaagatctagtaatgattctatgagctgctcaattctgtttcgtcggattcgcattgtacactctttctccgtcgtttacctctactactcttacgtcttctcatgaacttctaatcgtctccgatctgattttgtttagctctctctcgaataaaagtttttttttttcgtttccttcgatctaactgattctttgctagtttagaggaatctagaagaaatataattttaaatatttgtgagaataaaaaaaagtcaatggggtcgttgcaaagacagacaagtcctgattccgacaacgatccgaggtacgctgccgtcacggacgagaggaagaggaagaggatgatctccaacagagagtccgctcggagatcgaggatgaggaagcagaagcagctcggagatctcatcaacgaggtgactgttctcaagaacgataacgccaagatcaccgagcaggtcgatgcagccacgaggaagtacgtggagatggagtcaaggaacgacgtgttgagagcacaggcctcggagttgacggagaggttgaggtcgttgaactctgtgcttgagatggttgaagagattagtggtcaggctttggatattcctgagattaatccttggcaggtttcttgtccgatgcaaccgattagggcttctgctgatatgtttgattgctgaggatttgcttatttgtctttgtccttgtgttgtggtggttcgagttttgttgaatggtgtgtgtgtcatctttataatatattgtttgtctggttggtgttgttgtgtaatcctctagtgtcgtctattgcataagataagtttgttatgtaatttgttttttttttgtgtttcttaatgtattcaagctttgtgttatatgatttctttataaatcttccc

SEQ ID NO: 110002 - protein, 141 aa, Zea mays subsp. mays
  misc_feature (1)..(141): Ceres Seq. ID no. 15178109
  misc_feature (21)..(85): Pfam Name: bZIP transcription factor Pfam Description: bZIP transcription factor
  misc_feature (6)..(136): Homolog of NCBI NO: 40019253 NR Description: ocs-element binding factor 1 [Secale cereale]
  misc_feature (1)..(138): Homolog of NCBI NO: 3986151 NR Description: rdLIP [Raphanus sativus]
  misc_feature (7)..(139): Homolog of NCBI NO: 7489298 NR Description: DNA-binding protein bZIP-2 - garden snapdragon
  misc_feature (1)..(141): Homolog of NCBI NO: 7489297 NR Description: DNA-binding protein bZIP-1 - garden snapdragon
  misc_feature (1)..(139): Homolog of NCBI NO: 5901747 NR Description: bZIP DNA-binding protein [Lycopersicon esculentum]
  misc_feature (1)..(138): Homolog of NCBI NO: 7489118 NR Description: DNA-binding protein tbz17 - common tobacco
  misc_feature (1)..(139): Homolog of NCBI NO: 16580132 NR Description: bZIP transcription factor BZI-3 [Nicotiana
  misc_feature (1)..(139): Homolog of NCBI NO: 10241920 NR Description: TBZF [Nicotiana tabacum]
  misc_feature (5)..(139): Homolog of NCBI NO: 9650826 NR Description: common plant regulatory factor 6 [Petroselinum
  misc_feature (1)..(141): Homolog of NCBI NO: 15228754 NR Description: bZIP family transcription factor [Arabidopsis
MGSLQRQTSPDSDNDPRYAAVTDERKRKRMISNRESARRSRMRKQKQLGDLINEVTVLKNDNAKITEQVDAATRKYVEMESRNDVLRAQASELTERLRSLNSVLEMVEEISGQALDIPEINPWQVSCPMQPIRASADMFDC

SEQ ID NO: 110003 - protein, 112 aa, Zea mays subsp. mays
  misc_feature (1)..(112): Ceres Seq. ID no. 15178110
  misc_feature (1)..(56): Pfam Name: bZIP transcription factor Pfam Description: bZIP transcription factor
  misc_feature (1)..(110): Homolog of NCBI NO: 10241920 NR Description: TBZF [Nicotiana tabacum]
  misc_feature (1)..(110): Homolog of NCBI NO: 9650826 NR Description: common plant regulatory factor 6 [Petroselinum
  misc_feature (1)..(109): Homolog of NCBI NO: 3986151 NR Description: rdLIP [Raphanus sativus]
  misc_feature (1)..(112): Homolog of NCBI NO: 7489297 NR Description: DNA-binding protein bZIP-1 - garden snapdragon
  misc_feature (1)..(109): Homolog of NCBI NO: 7489118 NR Description: DNA-binding protein tbz17 - common tobacco
  misc_feature (1)..(110): Homolog of NCBI NO: 16580132 NR Description: bZIP transcription factor BZI-3 [Nicotiana
  misc_feature (1)..(110): Homolog of NCBI NO: 5901747 NR Description: bZIP DNA-binding protein [Lycopersicon esculentum]
  misc_feature (1)..(110): Homolog of NCBI NO: 7489298 NR Description: DNA-binding protein bZIP-2 - garden snapdragon
  misc_feature (1)..(107): Homolog of NCBI NO: 40019253 NR Description: ocs-element binding factor 1 [Secale cereale]
  misc_feature (1)..(112): Homolog of NCBI NO: 15228754 NR Description: bZIP family transcription factor [Arabidopsis
MISNRESARRSRMRKQKQLGDLINEVTVLKNDNAKITEQVDAATRKYVEMESRNDVLRAQASELTERLRSLNSVLEMVEEISGQALDIPEINPWQVSCPMQPIRASADMFDC

SEQ ID NO: 110004 - protein, 100 aa, Zea mays subsp. mays
  misc_feature (1)..(100): Ceres Seq. ID no. 15178111
  misc_feature (1)..(95): Homolog of NCBI NO: 40019253 NR Description: ocs-element binding factor 1 [Secale cereale]
  misc_feature (1)..(97): Homolog of NCBI NO: 3986151 NR Description: rdLIP [Raphanus sativus]
  misc_feature (1)..(98): Homolog of NCBI NO: 7489298 NR Description: DNA-binding protein bZIP-2 - garden snapdragon
  misc_feature (1)..(100): Homolog of NCBI NO: 7489297 NR Description: DNA-binding protein bZIP-1 - garden snapdragon
  misc_feature (1)..(98): Homolog of NCBI NO: 5901747 NR Description: bZIP DNA-binding protein [Lycopersicon esculentum]
  misc_feature (1)..(97): Homolog of NCBI NO: 7489118 NR Description: DNA-binding protein tbz17 - common tobacco
  misc_feature (1)..(98): Homolog of NCBI NO: 16580132 NR Description: bZIP transcription factor BZI-3 [Nicotiana
  misc_feature (1)..(98): Homolog of NCBI NO: 10241920 NR Description: TBZF [Nicotiana tabacum]
  misc_feature (1)..(98): Homolog of NCBI NO: 9650826 NR Description: common plant regulatory factor 6 [Petroselinum
  misc_feature (1)..(100): Homolog of NCBI NO: 15228754 NR Description: bZIP family transcription factor [Arabidopsis
MRKQKQLGDLINEVTVLKNDNAKITEQVDAATRKYVEMESRNDVLRAQASELTERLRSLNSVLEMVEEISGQALDIPEINPWQVSCPMQPIRASADMFDC

SEQ ID NO: 110005 - DNA, 1620 bp, Zea mays subsp. mays
  misc_feature (1)..(1620): Ceres Seq. ID no. 15179055
gtttaactgccgtaaattatctggaacttgcaccaactaggtcaccataacgtcttgatcacgtggcggaatcccccagcaaaacgctgaaacatggagagactttcaaggaacctccgatgtttacagagcaaaagcaagctccagcgttgttggtacacaaaagatcgagtcacttatacagaaacggaagcccaagtttgacactaacaagttgcagcaagtagcaacggatgataaaggattgtggattgctgtcgtggggttggtgctgatgtcatcatgacttcagagtcttgcagaaatggtactgagctgtgcagcgaagcaatagaaaatctggagaagaagtatgatgtggtccttaacattcaaggagatgaacaactcattgagcctgtgattatagacagtattgtcaaagcacttcaggtagcacctgatgcagtatttagcacagcggtgacgtcattaaaaccagaagacggagatgatcctaaccgagtcaaatgtgtggtggacaaccgtggctatactgtctatatctccaggggtttggttccgtataacacgagtggtaacgtcaatccagatttccttacatgcttcatcttgaaatacagctacgacatctaattggacggagctttttgtttcacattttctctatctcaggccattcgtgaagatggcatgtataatcttccccggaagatgtgttcagtcaggtcacgcttcccataagcttctgagactgcttactggaatttttggagaaaacaaggaggttaaaatggattttaatcccaaactatctcatctttctttcaccctggcttggttacttaggctcagagggtggtccccctttctcgcgtaaaagcgatcctggaccattcagcctctctcaaccaagtatccccttcccttattaaataaagtagctaatgaaatgaggcaggttgtgctagaagtctgttccaaagagcttggctcttagtaggcaagacggtctttgttttttgttactatatccatgagaatactaatgtttaatggatcaggaagtttactcttttgtgtttgttgataggatggtagcacatgcgatggagttatggacagctgtaagcgatgaaggagaagttcttgcacatgttcttgcacatgagggagcagcgacatttgggtggagtcaacatggaagatctacatagacttgactatgctcaagtctttcttcttatgctctgactctgaagatctcaggaatacataactggaaacatggaggaaaggttcggggattttttggcttcagcaagtctgggattagcgctgtctcaaagtgactgcttaacagctgcttgattctgttggaaagccattgtctgataaaaatcttacggtcctccaggccatatttgaaacatatttcattatgtgcatccttcttcatactttgacattgtctaacgggaaggcctggtggagctgttgggttccgaattgcagatctttggctgtcttgattttcttcacaaatattaatcatttatatcttctgttttctttgctaatgactttggttctataaatatatgtcctgaaattagagcc

SEQ ID NO: 110006 - protein, 117 aa, Zea mays subsp. mays
  misc_feature (1)..(117): Ceres Seq. ID no. 15179056
  misc_feature (1)..(105): Pfam Name: Cytidylyltransferase Pfam Description: Cytidylyltransferase
  misc_feature (1)..(104): Homolog of NCBI NO: 34541435 NR Description: 3-deoxy-D-manno-octulosonate cytidylyltransferase
  misc_feature (1)..(104): Homolog of NCBI NO: 28897758 NR Description: 3-deoxy-manno-octulosonate cytidylyltransferase
  misc_feature (1)..(102): Homolog of NCBI NO: 19704142 NR Description: 3-deoxy-manno-octulosonate cytidylyltransferase
  misc_feature (1)..(96): Homolog of NCBI NO: 14194887 NR Description: 3-DEOXY-MANNO-OCTULOSONATE CYTIDYLYLTRANSFERASE
  misc_feature (1)..(96): Homolog of NCBI NO: 1361311 NR Description: CMP-2-keto-3-deoxyoctulosonic acid synthetase
  misc_feature (1)..(96): Homolog of NCBI NO: 15604902 NR Description: CMP-2-keto-3-deoxyoctulosonic acid synthetase
  misc_feature (1)..(96): Homolog of NCBI NO: 15602723 NR Description: KdsB [Pasteurella multocida]
  misc_feature (1)..(105): Homolog of NCBI NO: 7688437 NR Description: CMP-KDO synthetase [Zea mays]
  misc_feature (1)..(105): Homolog of NCBI NO: 7688435 NR Description: CMP-KDO synthetase [Zea mays]
  misc_feature (1)..(105): Homolog of NCBI NO: 30695393 NR Description: CMP-KDO synthetase -related [Arabidopsis
MTSESCRNGTELCSEAIENLEKKYDVVLNIQGDEQLIEPVIIDSIVKALQVAPDAVFSTAVTSLKPEDGDDPNRVKCVVDNRGYTVYISRGLVPYNTSGNVNPDFLTCFILKYSYDI

SEQ ID NO: 110007 - protein, 63 aa, Zea mays subsp. mays
  misc_feature (1)..(63): Ceres Seq. ID no. 15179057
  misc_feature (1)..(34): Homolog of NCBI NO: 34909454 NR Description: OSJNBa0014K08.23 [Oryza sativa (japonica
  misc_feature (1)..(33): Homolog of NCBI NO: 7452449 NR Description: hypothetical protein F26P21.30 - Arabidopsis
  misc_feature (1)..(34): Homolog of NCBI NO: 18418112 NR Description: expressed protein [Arabidopsis thaliana]
  misc_feature (1)..(34): Homolog of NCBI NO: 13605599 NR Description: AT4g32910/F26P21_30 [Arabidopsis thaliana]
MACIIFPGRCVQSGHASHKLLRLLTGIFGENKEVKMDFNPKLSHLSFTLAWLLRLRGWSPFLA

SEQ ID NO: 110008 - DNA, 754 bp, Zea mays subsp. mays
  misc_feature (1)..(754): Ceres Seq. ID no. 15179090
gagctgagatgctgaagctacaagtaagcgggaaggcgatcttgtccactgttcgctgtcggagacaggcaagagtaagcgggaaagtaatcttttcgagcgttcgttgtcggagagagatgtcgacttcttcttccttcgtgtttgggccttacaagatcgatccgcgtgaagtgttctacgcaactcctctctcttacgccatggttaatctccgaccccttcttcctggtcatgttcttgtctgcccgagacgccttgtgccgcgctttactgatctcacagctgatgagaccagtgacctttggcttactgctcagaaggttggctctcggattgagaccttccataatgcaacttctctcacgttagctatccaagatgggcctcaggcgggacagagtgttcctcatgtgcacattcacgtcttgcctcgtaaaggcggcgactttgagaagaatgatgagatttacgatgcaattgatgagaaggagaaggaacttaagcagaagcttgatcttgacaaagatcgtgttgataggagcattgaggagatggctaacgaggcttcacagtaccggtctcttttcgattgctagttatgagcaaaagctatccattggcttccaagccttttcaataagaccaagcgaccctcaagttgaagttgatgttagagacttcaattcaaacttgtaatctctttcttatgccaccaaaactgagaatcatcgaaatgttttagttctggttg

SEQ ID NO: 110009 - protein, 198 aa, Zea mays subsp. mays
  misc_feature (1)..(198): Ceres Seq. ID no. 15179091
  misc_feature (45)..(196): Homolog of NCBI NO: 15215093 NR Description: Fhit protein [Mus musculus]
  misc_feature (45)..(196): Homolog of NCBI NO: 11120730 NR Description: fragile histidine triad protein [Rattus
  misc_feature (45)..(196): Homolog of NCBI NO: 4503719 NR Description: fragile histidine triad gene
  misc_feature (48)..(189): Homolog of NCBI NO: 40738785 NR Description: hypothetical protein AN6189.2 [Aspergillus
  misc_feature (48)..(197): Homolog of NCBI NO: 28828402 NR Description: similar to diadenosine tetraphosphatase
  misc_feature (44)..(196): Homolog of NCBI NO: 37589828 NR Description: Unknown (protein for MGC:73176) [Danio rerio]
  misc_feature (44)..(196): Homolog of NCBI NO: 27542770 NR Description: ATPase-like protein [Sorghum bicolor]
  misc_feature (41)..(198): Homolog of NCBI NO: 8777325 NR Description: bis(5'-adenosyl)-triphosphatase-like protein
  misc_feature (24)..(198): Homolog of NCBI NO: 30697031 NR Description: bis(5'-adenosyl)-triphosphatase-related
  misc_feature (24)..(198): Homolog of NCBI NO: 27808510 NR Description: At5g58240 [Arabidopsis thaliana]
AEMLKLQVSGKAILSTVRCRRQARVSGKVIFSSVRCRREMSTSSSFVFGPYKIDPREVFYATPLSYAMVNLRPLLPGHVLVCPRRLVPRFTDLTADETSDLWLTAQKVGSRIETFHNATSLTLAIQDGPQAGQSVPHVHIHVLPRKGGDFEKNDEIYDAIDEKEKELKQKLDLDKDRVDRSIEEMANEASQYRSLFDC

SEQ ID NO: 110010 - protein, 196 aa, Zea mays subsp. mays
  misc_feature (1)..(196): Ceres Seq. ID no. 15179092
  misc_feature (43)..(194): Homolog of NCBI NO: 15215093 NR Description: Fhit protein [Mus musculus]
  misc_feature (43)..(194): Homolog of NCBI NO: 11120730 NR Description: fragile histidine triad protein [Rattus
  misc_feature (43)..(194): Homolog of NCBI NO: 4503719 NR Description: fragile histidine triad gene
  misc_feature (46)..(187): Homolog of NCBI NO: 40738785 NR Description: hypothetical protein AN6189.2 [Aspergillus
  misc_feature (46)..(195): Homolog of NCBI NO: 28828402 NR Description: similar to diadenosine tetraphosphatase
  misc_feature (42)..(194): Homolog of NCBI NO: 37589828 NR Description: Unknown (protein for MGC:73176) [Danio rerio]
  misc_feature (42)..(194): Homolog of NCBI NO: 27542770 NR Description: ATPase-like protein [Sorghum bicolor]
  misc_feature (39)..(196): Homolog of NCBI NO: 8777325 NR Description: bis(5'-adenosyl)-triphosphatase-like protein
  misc_feature (22)..(196): Homolog of NCBI NO: 30697031 NR Description: bis(5'-adenosyl)-triphosphatase-related
  misc_feature (22)..(196): Homolog of NCBI NO: 27808510 NR Description: At5g58240 [Arabidopsis thaliana]
MLKLQVSGKAILSTVRCRRQARVSGKVIFSSVRCRREMSTSSSFVFGPYKIDPREVFYATPLSYAMVNLRPLLPGHVLVCPRRLVPRFTDLTADETSDLWLTAQKVGSRIETFHNATSLTLAIQDGPQAGQSVPHVHIHVLPRKGGDFEKNDEIYDAIDEKEKELKQKLDLDKDRVDRSIEEMANEASQYRSLFDC

SEQ ID NO: 110011 - protein, 159 aa, Zea mays subsp. mays
  misc_feature (1)..(159): Ceres Seq. ID no. 15179093
  misc_feature (6)..(157): Homolog of NCBI NO: 15215093 NR Description: Fhit protein [Mus musculus]
  misc_feature (6)..(157): Homolog of NCBI NO: 11120730 NR Description: fragile histidine triad protein [Rattus
  misc_feature (6)..(157): Homolog of NCBI NO: 4503719 NR Description: fragile histidine triad gene
  misc_feature (9)..(150): Homolog of NCBI NO: 40738785 NR Description: hypothetical protein AN6189.2 [Aspergillus
  misc_feature (9)..(158): Homolog of NCBI NO: 28828402 NR Description: similar to diadenosine tetraphosphatase
  misc_feature (5)..(157): Homolog of NCBI NO: 37589828 NR Description: Unknown (protein for MGC:73176) [Danio rerio]
  misc_feature (5)..(157): Homolog of NCBI NO: 27542770 NR Description: ATPase-like protein [Sorghum bicolor]
  misc_feature (2)..(159): Homolog of NCBI NO: 8777325 NR Description: bis(5'-adenosyl)-triphosphatase-like protein
  misc_feature (1)..(159): Homolog of NCBI NO: 30697031 NR Description: bis(5'-adenosyl)-triphosphatase-related
  misc_feature (1)..(159): Homolog of NCBI NO: 27808510 NR Description: At5g58240 [Arabidopsis thaliana]
MSTSSSFVFGPYKIDPREVFYATPLSYAMVNLRPLLPGHVLVCPRRLVPRFTDLTADETSDLWLTAQKVGSRIETFHNATSLTLAIQDGPQAGQSVPHVHIHVLPRKGGDFEKNDEIYDAIDEKEKELKQKLDLDKDRVDRSIEEMANEASQYRSLFDC

SEQ ID NO: 110012 - DNA, 1086 bp, Zea mays subsp. mays
  misc_feature (1)..(1086): Ceres Seq. ID no. 15179068
aagaaaaacaataaatcagaacagagtgatgaatcaagagaaacccacttcttgttgctgtgttcttgatgcttccacttatgtgggtttctggattctcaagaaattgctcaccagaggctactctgttcgtgcagccatccgtaaaaatggggagagtatactcgaggagaaaatcaggaacatgcaagccacagaggagagattagttgtttacgatgtggatgtgttggattaccagagcatccttgtttctctcaacaactgtaacgctgtgttctgttgcttggacaatcctgaagggtacgatgagatggaagttgatttggaggtgagaggagcgattaatgtggtggaagcatgtgcaagaacagagaatatagacaagattgtcttctcttcttcactaactgctgcaatttggacagataacattggaactcaaaaagatgttgatgagaagtcttggagtgatctagacttttgtctcaaaaagaagctatggcatgcgctggccaagacacaatctgagaaggcggcttgggcactagccatggaccgtatggtcaacatggtctcagttaacccagggctcattgttggaccctcagtgactcaacacaaccctagacccaccatgtctttcctgaagggggctgcgcagatgtatgagaacggtgtgttagcctacgtagacgtagagtttgtagcagatgttcacattcgagttttcgaggatacttcggcttgtggtagatacttttgcttcaaccaaattgtaaataccgaagaagaagctctcaaacttgtggagattctatctcctttgattcctatgccaccaaggtatgagaaagagatgcaaggaagtgaagtttatgaagagaggttgagaaacaataaactcaacaagctggtggaagctggctctgcttgttaattacatggagatagtacaatgttctatatataaactcaagagaaccaaacgatacataatatgtttatcataagcatagtttattttctctcttttgtcttttgcttgtaatctcaattcagtataaataatattttcttttgtcc

SEQ ID NO: 110013 - protein, 312 aa, Zea mays subsp. mays
  misc_feature (1)..(312): Ceres Seq. ID no. 15179069
  misc_feature (20)..(312): Homolog of NCBI NO: 34911590 NR Description: putative cinnamoyl CoA reductase
  misc_feature (20)..(305): Homolog of NCBI NO: 3341511 NR Description: cinnamoyl-CoA reductase [Saccharum officinarum]
  misc_feature (20)..(305): Homolog of NCBI NO: 25140432 NR Description: cinnamoyl CoA reductase [Hordeum vulgare]
  misc_feature (20)..(305): Homolog of NCBI NO: 9964087 NR Description: cinnamoyl CoA reductase [Lolium perenne]
  misc_feature (8)..(306): Homolog of NCBI NO: 37537132 NR Description: putative cinnamoyl-CoA reductase
  misc_feature (10)..(312): Homolog of NCBI NO: 21553548 NR Description: cinnamoyl-CoA reductase-like protein [Arabidopsis
  misc_feature (10)..(312): Homolog of NCBI NO: 15234751 NR Description: cinnamoyl-CoA reductase-related [Arabidopsis
  misc_feature (10)..(312): Homolog of NCBI NO: 21553382 NR Description: putative cinnamoyl CoA reductase [Arabidopsis
  misc_feature (10)..(312): Homolog of NCBI NO: 18400407 NR Description: cinnamoyl-CoA reductase-related [Arabidopsis
  misc_feature (10)..(312): Homolog of NCBI NO: 25412171 NR Description: probable cinnamoyl CoA reductase [imported] -
RKTINQNRVMNQEKPTSCCCVLDASTYVGFWILKKLLTRGYSVRAAIRKNGESILEEKIRNMQATEERLVVYDVDVLDYQSILVSLNNCNAVFCCLDNPEGYDEMEVDLEVRGAINVVEACARTENIDKIVFSSSLTAAIWTDNIGTQKDVDEKSWSDLDFCLKKKLWHALAKTQSEKAAWALAMDRMVNMVSVNPGLIVGPSVTQHNPRPTMSFLKGAAQMYENGVLAYVDVEFVADVHIRVFEDTSACGRYFCFNQIVNTEEEALKLVEILSPLIPMPPRYEKEMQGSEVYEERLRNNKLNKLVEAGSAC

SEQ ID NO: 110014 - protein, 303 aa, Zea mays subsp. mays
  misc_feature (1)..(303): Ceres Seq. ID no. 15179070
  misc_feature (11)..(303): Homolog of NCBI NO: 34911590 NR Description: putative cinnamoyl CoA reductase
  misc_feature (11)..(296): Homolog of NCBI NO: 3341511 NR Description: cinnamoyl-CoA reductase [Saccharum officinarum]
  misc_feature (11)..(296): Homolog of NCBI NO: 25140432 NR Description: cinnamoyl CoA reductase [Hordeum vulgare]
  misc_feature (11)..(296): Homolog of NCBI NO: 9964087 NR Description: cinnamoyl CoA reductase [Lolium perenne]
  misc_feature (1)..(297): Homolog of NCBI NO: 37537132 NR Description: putative cinnamoyl-CoA reductase
  misc_feature (1)..(303): Homolog of NCBI NO: 21553548 NR Description: cinnamoyl-CoA reductase-like protein [Arabidopsis
  misc_feature (1)..(303): Homolog of NCBI NO: 15234751 NR Description: cinnamoyl-CoA reductase-related [Arabidopsis
  misc_feature (1)..(303): Homolog of NCBI NO: 21553382 NR Description: putative cinnamoyl CoA reductase [Arabidopsis
  misc_feature (1)..(303): Homolog of NCBI NO: 18400407 NR Description: cinnamoyl-CoA reductase-related [Arabidopsis
  misc_feature (1)..(303): Homolog of NCBI NO: 25412171 NR Description: probable cinnamoyl CoA reductase [imported] -
MNQEKPTSCCCVLDASTYVGFWILKKLLTRGYSVRAAIRKNGESILEEKIRNMQATEERLVVYDVDVLDYQSILVSLNNCNAVFCCLDNPEGYDEMEVDLEVRGAINVVEACARTENIDKIVFSSSLTAAIWTDNIGTQKDVDEKSWSDLDFCLKKKLWHALAKTQSEKAAWALAMDRMVNMVSVNPGLIVGPSVTQHNPRPTMSFLKGAAQMYENGVLAYVDVEFVADVHIRVFEDTSACGRYFCFNQIVNTEEEALKLVEILSPLIPMPPRYEKEMQGSEVYEERLRNNKLNKLVEAGSAC

SEQ ID NO: 110015 - protein, 251 aa, Zea mays subsp. mays
  misc_feature (1)..(251): Ceres Seq. ID no. 15179071
  misc_feature (1)..(251): Homolog of NCBI NO: 34911590 NR Description: putative cinnamoyl CoA reductase
  misc_feature (1)..(244): Homolog of NCBI NO: 3341511 NR Description: cinnamoyl-CoA reductase [Saccharum officinarum]
  misc_feature (1)..(244): Homolog of NCBI NO: 25140432 NR Description: cinnamoyl CoA reductase [Hordeum vulgare]
  misc_feature (1)..(244): Homolog of NCBI NO: 9964087 NR Description: cinnamoyl CoA reductase [Lolium perenne]
  misc_feature (1)..(245): Homolog of NCBI NO: 37537132 NR Description: putative cinnamoyl-CoA reductase
  misc_feature (1)..(251): Homolog of NCBI NO: 21553548 NR Description: cinnamoyl-CoA reductase-like protein [Arabidopsis
  misc_feature (1)..(251): Homolog of NCBI NO: 15234751 NR Description: cinnamoyl-CoA reductase-related [Arabidopsis
  misc_feature (1)..(251): Homolog of NCBI NO: 21553382 NR Description: putative cinnamoyl CoA reductase [Arabidopsis
  misc_feature (1)..(251): Homolog of NCBI NO: 18400407 NR Description: cinnamoyl-CoA reductase-related [Arabidopsis
  misc_feature (1)..(251): Homolog of NCBI NO: 25412171 NR Description: probable cinnamoyl CoA reductase [imported] -
MQATEERLVVYDVDVLDYQSILVSLNNCNAVFCCLDNPEGYDEMEVDLEVRGAINVVEACARTENIDKIVFSSSLTAAIWTDNIGTQKDVDEKSWSDLDFCLKKKLWHALAKTQSEKAAWALAMDRMVNMVSVNPGLIVGPSVTQHNPRPTMSFLKGAAQMYENGVLAYVDVEFVADVHIRVFEDTSACGRYFCFNQIVNTEEEALKLVEILSPLIPMPPRYEKEMQGSEVYEERLRNNKLNKLVEAGSAC

SEQ ID NO: 110016 - DNA, 710 bp, Zea mays subsp. mays
  misc_feature (1)..(710): Ceres Seq. ID no. 15179033
aaaagtgtatagcgagcgcaacaattcaaatctattagatggcaatctccggtaacgccgtggcatacctccggcgacggctcctcccaactacgctaatccacgtcacggctcttgacggcatcgtgaacgtcaattccctcttctcgctcgctcttttcctcggcctcaccacaagcggaaacatcaccttcccggtttcctcctccgccgccgccggaaaccaacatcttcgccgatgtattgccgcaaaaggcccagtattagcggaaaggctagtctcaagccacgtttactctttcagcttctttctcttctccagcctcatcgctatgtctctcaagcaagcaatccggacaacgaccaacgggagcatcgttgaggaggaggcgcgggtgctaaacgcgggaatggggcgcgtgaatttggcggctttgagagttggaatcgtggcttcgtgtgttggatctgttttgggatgtgggttcttgacgatggctttagtagatcttgttcaggtcaagcttgggcctttagaatgtacgaaaagctttaacacgcttgcagctattgttcctcttgttgtgcttgttccttctgcacttcttatctatgtcttacttgttctctacgctttcatttattaacactttattgatatttctacaacacttcttattaaagatttgagttagatcacttcctgagat

SEQ ID NO: 110017 - protein, 202 aa, Zea mays subsp. mays
  misc_feature (1)..(202): Ceres Seq. ID no. 15179034
  misc_feature (16)..(192): Homolog of NCBI NO: 18397969 NR Description: expressed protein [Arabidopsis thaliana]
  misc_feature (16)..(192): Homolog of NCBI NO: 6041846 NR Description: unknown protein [Arabidopsis thaliana]
  misc_feature (30)..(200): Homolog of NCBI NO: 18397969 NR Description: expressed protein [Arabidopsis thaliana]
  misc_feature (30)..(200): Homolog of NCBI NO: 6041846 NR Description: unknown protein [Arabidopsis thaliana]
  misc_feature (18)..(202): Homolog of NCBI NO: 37531676 NR Description: hypothetical protein [Oryza sativa (japonica
  misc_feature (19)..(200): Homolog of NCBI NO: 34900646 NR Description: hypothetical protein~similar to Arabidopsis
  misc_feature (19)..(200): Homolog of NCBI NO: 34395171 NR Description: unknown protein [Oryza sativa (japonica
  misc_feature (18)..(200): Homolog of NCBI NO: 15239293 NR Description: expressed protein [Arabidopsis thaliana]
  misc_feature (1)..(202): Homolog of NCBI NO: 15232676 NR Description: expressed protein [Arabidopsis thaliana]
MAISGNAVAYLRRRLLPTTLIHVTALDGIVNVNSLFSLALFLGLTTSGNITFPVSSSAAAGNQHLRRCIAAKGPVLAERLVSSHVYSFSFFLFSSLIAMSLKQAIRTTTNGSIVEEEARVLNAGMGRVNLAALRVGIVASCVGSVLGCGFLTMALVDLVQVKLGPLECTKSFNTLAAIVPLVVLVPSALLIYVLLVLYAFIY

SEQ ID NO: 110018 - protein, 104 aa, Zea mays subsp. mays
  misc_feature (1)..(104): Ceres Seq. ID no. 15179035
  misc_feature (1)..(104): Homolog of NCBI NO: 15232676 NR Description: expressed protein [Arabidopsis thaliana]
  misc_feature (1)..(94): Homolog of NCBI NO: 18397969 NR Description: expressed protein [Arabidopsis thaliana]
  misc_feature (1)..(94): Homolog of NCBI NO: 6041846 NR Description: unknown protein [Arabidopsis thaliana]
  misc_feature (1)..(102): Homolog of NCBI NO: 18397969 NR Description: expressed protein [Arabidopsis thaliana]
  misc_feature (1)..(102): Homolog of NCBI NO: 6041846 NR Description: unknown protein [Arabidopsis thaliana]
  misc_feature (1)..(104): Homolog of NCBI NO: 37531676 NR Description: hypothetical protein [Oryza sativa (japonica
  misc_feature (1)..(102): Homolog of NCBI NO: 34900646 NR Description: hypothetical protein~similar to Arabidopsis
  misc_feature (1)..(102): Homolog of NCBI NO: 34395171 NR Description: unknown protein [Oryza sativa (japonica
  misc_feature (1)..(102): Homolog of NCBI NO: 15239293 NR Description: expressed protein [Arabidopsis thaliana]
MSLKQAIRTTTNGSIVEEEARVLNAGMGRVNLAALRVGIVASCVGSVLGCGFLTMALVDLVQVKLGPLECTKSFNTLAAIVPLVVLVPSALLIYVLLVLYAFIY

SEQ ID NO: 110019 - DNA, 1459 bp, Zea mays subsp. mays
  misc_feature (1)..(1459): Ceres Seq. ID no. 15176161
aaaaagcctctctctaactaaaatggtggaagctcaatcatggaccacgcggcggatgagcaacccgaggttcgacgccgccgccaccaccacaccaacagtcatcgacatccccggaacacctccacactcctccgcctcctccaatggaaaacccttcttcctctcctcccccacagtatctccctccgtcctcacggcggcgattatcgctgcctggttcggttccaacataggagtcctcctcctgaacaagtacctcctcttctactacggcttccgctatccaatcttcttgaccatgacgcacatgctctcctgcgccgcctacagctccgccgtcatcaacatcgccggtatcgtgccgcgtcagcacatcctctcccgccgtcagtttctgaagattcttgcactctcggcgatcttttgcctatccgtagtgtgcggcaacacttctctccgttacatccctgtttcttttaatcaggcgatcggagccaccacgccgttcttcaccgccgtcttctctttcctcattacctgtaaaacagagtccaccgaagtttacttggttttgcttcccgtcgtttccggcatagttctcgcttctaactccgagccttcgtttcatctctttggtttcctcatttgcgtcgcttccaccgccggtagagctcttaaatccgtcgtccaggggattattctgacgtcagaatcagagaagctacattcaatgaatcttctgctctacatggctccaatggcggcttgtatcttactaccatttacgctatacatcgaaggaaacgtactaaggatcctaattgaaaaggcgaggaccgatccattgatcatcttcttgctcgcagggaatgcgacagtggcatatttagtaaatttgacgaacttcttggtgacaaagcacacaagtgctctcaccttgcaggttttaggtaacggaaaagccgcggtggctgccggagtctcggttttgatatttaggaatccggtgacggtgatgggtgttgctggatttggcgtcacgattatgggagtggttctctacagcgaagctaggaagagatccaagttgcttaaccagaagtgaaatgtgaaagtggggaaagaaactggatttaaaccggtgaagtaatttcttattttatggtatttttcggttaaagtatcttgattctttgaaattctgctattgttttgaaccggtttgagagggggaaatgtaactgtaaatggttgagattgattgggggaaaatataaaattaaaaagggtaatatatatataacaaaagtggaaaagtagggggcagaattaaaagaaaacacattgtatcgttcttttatttttctttaaattcttctcttgtattattatttcgttttatagtttgtaatttattaccaaaattatcgaaacataaggggaaaaagttaaaaat

SEQ ID NO: 110020 - protein, 368 aa, Zea mays subsp. mays
  misc_feature (1)..(368): Ceres Seq. ID no. 15176162
  misc_feature (80)..(203): Pfam Name: Integral membrane protein DUF6 Pfam Description: Integral membrane protein DUF6
  misc_feature (70)..(359): Homolog of NCBI NO: 18411611 NR Description: glucose-6-phosphate/phosphate
  misc_feature (66)..(314): Homolog of NCBI NO: 15229717 NR Description: phosphate translocator-related [Arabidopsis
  misc_feature (177)..(363): Homolog of NCBI NO: 15229717 NR Description: phosphate translocator-related [Arabidopsis
  misc_feature (55)..(361): Homolog of NCBI NO: 15228248 NR Description: phosphate translocator-related [Arabidopsis
  misc_feature (55)..(361): Homolog of NCBI NO: 17064798 NR Description: phosphate/phosphoenolpyruvate translocator-like
  misc_feature (55)..(361): Homolog of NCBI NO: 15237644 NR Description: phosphate translocator-related [Arabidopsis
  misc_feature (66)..(363): Homolog of NCBI NO: 30681126 NR Description: phosphate translocator-related [Arabidopsis
  misc_feature (66)..(363): Homolog of NCBI NO: 9759107 NR Description: phosphate/phosphoenolpyruvate translocator
  misc_feature (66)..(363): Homolog of NCBI NO: 27476065 NR Description: Putative phosphate/phosphoenolpyruvate
  misc_feature (8)..(368): Homolog of NCBI NO: 15221371 NR Description: phosphate translocator-related [Arabidopsis
KSLSLTKMVEAQSWTTRRMSNPRFDAAATTTPTVIDIPGTPPHSSASSNGKPFFLSSPTVSPSVLTAAIIAAWFGSNIGVLLLNKYLLFYYGFRYPIFLTMTHMLSCAAYSSAVINIAGIVPRQHILSRRQFLKILALSAIFCLSVVCGNTSLRYIPVSFNQAIGATTPFFTAVFSFLITCKTESTEVYLVLLPVVSGIVLASNSEPSFHLFGFLICVASTAGRALKSVVQGIILTSESEKLHSMNLLLYMAPMAACILLPFTLYIEGNVLRILIEKARTDPLIIFLLAGNATVAYLVNLTNFLVTKHTSALTLQVLGNGKAAVAAGVSVLIFRNPVTVMGVAGFGVTIMGVVLYSEARKRSKLLNQK

SEQ ID NO: 110021 - protein, 361 aa, Zea mays subsp. mays
  misc_feature (1)..(361): Ceres Seq. ID no. 15176163
  misc_feature (73)..(196): Pfam Name: Integral membrane protein DUF6 Pfam Description: Integral membrane protein DUF6
  misc_feature (63)..(352): Homolog of NCBI NO: 18411611 NR Description: glucose-6-phosphate/phosphate
  misc_feature (59)..(307): Homolog of NCBI NO: 15229717 NR Description: phosphate translocator-related [Arabidopsis
  misc_feature (170)..(356): Homolog of NCBI NO: 15229717 NR Description: phosphate translocator-related [Arabidopsis
  misc_feature (48)..(354): Homolog of NCBI NO: 15228248 NR Description: phosphate translocator-related [Arabidopsis
  misc_feature (48)..(354): Homolog of NCBI NO: 17064798 NR Description: phosphate/phosphoenolpyruvate translocator-like
  misc_feature (48)..(354): Homolog of NCBI NO: 15237644 NR Description: phosphate translocator-related [Arabidopsis
  misc_feature (59)..(356): Homolog of NCBI NO: 30681126 NR Description: phosphate translocator-related [Arabidopsis
  misc_feature (59)..(356): Homolog of NCBI NO: 9759107 NR Description: phosphate/phosphoenolpyruvate translocator
  misc_feature (59)..(356): Homolog of NCBI NO: 27476065 NR Description: Putative phosphate/phosphoenolpyruvate
  misc_feature (1)..(361): Homolog of NCBI NO: 15221371 NR Description: phosphate translocator-related [Arabidopsis
MVEAQSWTTRRMSNPRFDAAATTTPTVIDIPGTPPHSSASSNGKPFFLSSPTVSPSVLTAAIIAAWFGSNIGVLLLNKYLLFYYGFRYPIFLTMTHMLSCAAYSSAVINIAGIVPRQHILSRRQFLKILALSAIFCLSVVCGNTSLRYIPVSFNQAIGATTPFFTAVFSFLITCKTESTEVYLVLLPVVSGIVLASNSEPSFHLFGFLICVASTAGRALKSVVQGIILTSESEKLHSMNLLLYMAPMAACILLPFTLYIEGNVLRILIEKARTDPLIIFLLAGNATVAYLVNLTNFLVTKHTSALTLQVLGNGKAAVAAGVSVLIFRNPVTVMGVAGFGVTIMGVVLYSEARKRSKLLNQK

SEQ ID NO: 110022 - protein, 350 aa, Zea mays subsp. mays
  misc_feature (1)..(350): Ceres Seq. ID no. 15176164
  misc_feature (62)..(185): Pfam Name: Integral membrane protein DUF6 Pfam Description: Integral membrane protein DUF6
  misc_feature (52)..(341): Homolog of NCBI NO: 18411611 NR Description: glucose-6-phosphate/phosphate
  misc_feature (48)..(296): Homolog of NCBI NO: 15229717 NR Description: phosphate translocator-related [Arabidopsis
  misc_feature (159)..(345): Homolog of NCBI NO: 15229717 NR Description: phosphate translocator-related [Arabidopsis
  misc_feature (37)..(343): Homolog of NCBI NO: 15228248 NR Description: phosphate translocator-related [Arabidopsis
  misc_feature (37)..(343): Homolog of NCBI NO: 17064798 NR Description: phosphate/phosphoenolpyruvate translocator-like
  misc_feature (37)..(343): Homolog of NCBI NO: 15237644 NR Description: phosphate translocator-related [Arabidopsis
  misc_feature (48)..(345): Homolog of NCBI NO: 30681126 NR Description: phosphate translocator-related [Arabidopsis
  misc_feature (48)..(345): Homolog of NCBI NO: 9759107 NR Description: phosphate/phosphoenolpyruvate translocator
  misc_feature (48)..(345): Homolog of NCBI NO: 27476065 NR Description: Putative phosphate/phosphoenolpyruvate
  misc_feature (1)..(350): Homolog of NCBI NO: 15221371 NR Description: phosphate translocator-related [Arabidopsis
MSNPRFDAAATTTPTVIDIPGTPPHSSASSNGKPFFLSSPTVSPSVLTAAIIAAWFGSNIGVLLLNKYLLFYYGFRYPIFLTMTHMLSCAAYSSAVINIAGIVPRQHILSRRQFLKILALSAIFCLSVVCGNTSLRYIPVSFNQAIGATTPFFTAVFSFLITCKTESTEVYLVLLPVVSGIVLASNSEPSFHLFGFLICVASTAGRALKSVVQGIILTSESEKLHSMNLLLYMAPMAACILLPFTLYIEGNVLRILIEKARTDPLIIFLLAGNATVAYLVNLTNFLVTKHTSALTLQVLGNGKAAVAAGVSVLIFRNPVTVMGVAGFGVTIMGVVLYSEARKRSKLLNQK

SEQ ID NO: 110023 - DNA, 1409 bp, Zea mays subsp. mays
  misc_feature (1)..(1409): Ceres Seq. ID no. 15177522
gacttcgacagtcttcttcttcaatcgatcttgatatctgtcttttttcctcccaaaatggcccttcaagctgcttctttggtctcctctgctttttctgtccgaaaagatggaaaactgaatgcttcttcatcatccttcaaggaatcgagtctttttggtgcctccattacagaacatggctctttctcatttagattcaagagagaacatagctcgaggaatgtgctcgcagttcgtgcccaaacagccgcaacttcaagcccctcggtcacaaaatcttcatctggcggcaagaaaacgttgaggaaaggtaccgtggtggtcacgggagcctcgtcagggttaggtttagccacggctaaagctcttgcggagacaggtaaatggcacgtgataatggcgtgcagggactttcttaaagccgagagagccgctaaatccgcagggatgcctaaagacagctacacggtgatgcatttggacttagcctcgttggacagcgtgagacagttcgttgatagcttcaggagatcggagatgcctctcgatgttttggtctgcaacgctgcggtttatttccctacagctaaagaacctacttacagtgcagaagggtttgagcttagtgttgccacgaatcacttgggacattttcttctctcgaggttgttgcttgatgacttgaagaagtctgattacccttcaaagcgtctcattatcgtcggttccattaccgggaacaccaatacattggctggtaatgttccaccgaaggcgaatctaggcgatctgagaggtttagcgggtggattgaacggattaaacagctcggcgatgattgatggtggagattttgacggtgcaaaggcttacaaagacagcaaagtgtgcaacatgttgacgatgcaagagtttcacaggcgttaccatgaagaaactggagtcacattcgcttcgctttaccctggttgcattgcctctacgggtctattcagagagcacattccgctgttccgtacactcttccctccgtttcagaagtacatcactaaaggttatgtctccgagacagagtctggcaaaagacttgctcaggtggtgagtgatccgagcttgacgaagtcaggggtttactggagctggaacaaggcttcggcgtctttcgagaacgagttatcagaagaagcaagcgatgttgagaaggctcgtaaagtgtgggagatcagtgagaagctcgttgggttggcttaatgacacttggaatctcttctttctgatgagatcatgttgtgccaaatgatgaaatacctagaggatgttctagatttttagatgtctgattctgttgagtgtagatctgtttggcttgtagccccataataaagaaataaaagttggccagcatc

SEQ ID NO: 110024 - protein, 417 aa, Zea mays subsp. mays
  misc_feature (1)..(417): Ceres Seq. ID no. 15177523
  misc_feature (20)..(417): Homolog of NCBI NO: 9587209 NR Description: NADPH-protochlorophyllide oxidoreductase [Vigna
  misc_feature (20)..(417): Homolog of NCBI NO: 10720220 NR Description: Protochlorophyllide reductase, chloroplast
  misc_feature (20)..(417): Homolog of NCBI NO: 21068893 NR Description: NADPH:protochlorophyllide oxidoreductase
  misc_feature (20)..(417): Homolog of NCBI NO: 266742 NR Description: Protochlorophyllide reductase, chloroplast
  misc_feature (20)..(417): Homolog of NCBI NO: 81946 NR Description: protochlorophyllide reductase (EC 1.3.1.33)
  misc_feature (20)..(417): Homolog of NCBI NO: 10720233 NR Description: Protochlorophyllide reductase, chloroplast
  misc_feature (20)..(417): Homolog of NCBI NO: 968975 NR Description: NADPH:protochlorophyllide oxidoreductase A
  misc_feature (20)..(417): Homolog of NCBI NO: 15239574 NR Description: protochlorophyllide reductase A (PCR A/POR A)
  misc_feature (20)..(417): Homolog of NCBI NO: 21593167 NR Description: protochlorophyllide reductase precursor
  misc_feature (20)..(417): Homolog of NCBI NO: 15234129 NR Description: protochlorophyllide reductase B (PCR B/POR B)
DFDSLLLQSILISVFFPPKMALQAASLVSSAFSVRKDGKLNASSSSFKESSLFGASITEHGSFSFRFKREHSSRNVLAVRAQTAATSSPSVTKSSSGGKKTLRKGTVVVTGASSGLGLATAKALAETGKWHVIMACRDFLKAERAAKSAGMPKDSYTVMHLDLASLDSVRQFVDSFRRSEMPLDVLVCNAAVYFPTAKEPTYSAEGFELSVATNHLGHFLLSRLLLDDLKKSDYPSKRLIIVGSITGNTNTLAGNVPPKANLGDLRGLAGGLNGLNSSAMIDGGDFDGAKAYKDSKVCNMLTMQEFHRRYHEETGVTFASLYPGCIASTGLFREHIPLFRTLFPPFQKYITKGYVSETESGKRLAQVVSDPSLTKSGVYWSWNKASASFENELSEEASDVEKARKVWEISEKLVGLA

SEQ ID NO: 110025 - protein, 398 aa, Zea mays subsp. mays
  misc_feature (1)..(398): Ceres Seq. ID no. 15177524
  misc_feature (1)..(398): Homolog of NCBI NO: 9587209 NR Description: NADPH-protochlorophyllide oxidoreductase [Vigna
  misc_feature (1)..(398): Homolog of NCBI NO: 10720220 NR Description: Protochlorophyllide reductase, chloroplast
  misc_feature (1)..(398): Homolog of NCBI NO: 21068893 NR Description: NADPH:protochlorophyllide oxidoreductase
  misc_feature (1)..(398): Homolog of NCBI NO: 266742 NR Description: Protochlorophyllide reductase, chloroplast
  misc_feature (1)..(398): Homolog of NCBI NO: 81946 NR Description: protochlorophyllide reductase (EC 1.3.1.33)
  misc_feature (1)..(398): Homolog of NCBI NO: 10720233 NR Description: Protochlorophyllide reductase, chloroplast
  misc_feature (1)..(398): Homolog of NCBI NO: 968975 NR Description: NADPH:protochlorophyllide oxidoreductase A
  misc_feature (1)..(398): Homolog of NCBI NO: 15239574 NR Description: protochlorophyllide reductase A (PCR A/POR A)
  misc_feature (1)..(398): Homolog of NCBI NO: 21593167 NR Description: protochlorophyllide reductase precursor
  misc_feature (1)..(398): Homolog of NCBI NO: 15234129 NR Description: protochlorophyllide reductase B (PCR B/POR B)
MALQAASLVSSAFSVRKDGKLNASSSSFKESSLFGASITEHGSFSFRFKREHSSRNVLAVRAQTAATSSPSVTKSSSGGKKTLRKGTVVVTGASSGLGLATAKALAETGKWHVIMACRDFLKAERAAKSAGMPKDSYTVMHLDLASLDSVRQFVDSFRRSEMPLDVLVCNAAVYFPTAKEPTYSAEGFELSVATNHLGHFLLSRLLLDDLKKSDYPSKRLIIVGSITGNTNTLAGNVPPKANLGDLRGLAGGLNGLNSSAMIDGGDFDGAKAYKDSKVCNMLTMQEFHRRYHEETGVTFASLYPGCIASTGLFREHIPLFRTLFPPFQKYITKGYVSETESGKRLAQVVSDPSLTKSGVYWSWNKASASFENELSEEASDVEKARKVWEISEKLVGLA

SEQ ID NO: 110026 - protein, 284 aa, Zea mays subsp. mays
  misc_feature (1)..(284): Ceres Seq. ID no. 15177525
  misc_feature (1)..(284): Homolog of NCBI NO: 9587209 NR Description: NADPH-protochlorophyllide oxidoreductase [Vigna
  misc_feature (1)..(284): Homolog of NCBI NO: 10720220 NR Description: Protochlorophyllide reductase, chloroplast
  misc_feature (1)..(284): Homolog of NCBI NO: 21068893 NR Description: NADPH:protochlorophyllide oxidoreductase
  misc_feature (1)..(284): Homolog of NCBI NO: 266742 NR Description: Protochlorophyllide reductase, chloroplast
  misc_feature (1)..(284): Homolog of NCBI NO: 81946 NR Description: protochlorophyllide reductase (EC 1.3.1.33)
  misc_feature (1)..(284): Homolog of NCBI NO: 10720233 NR Description: Protochlorophyllide reductase, chloroplast
  misc_feature (1)..(284): Homolog of NCBI NO: 968975 NR Description: NADPH:protochlorophyllide oxidoreductase A
  misc_feature (1)..(284): Homolog of NCBI NO: 15239574 NR Description: protochlorophyllide reductase A (PCR A/POR A)
  misc_feature (1)..(284): Homolog of NCBI NO: 21593167 NR Description: protochlorophyllide reductase precursor
  misc_feature (1)..(284): Homolog of NCBI NO: 15234129 NR Description: protochlorophyllide reductase B (PCR B/POR B)
MACRDFLKAERAAKSAGMPKDSYTVMHLDLASLDSVRQFVDSFRRSEMPLDVLVCNAAVYFPTAKEPTYSAEGFELSVATNHLGHFLLSRLLLDDLKKSDYPSKRLIIVGSITGNTNTLAGNVPPKANLGDLRGLAGGLNGLNSSAMIDGGDFDGAKAYKDSKVCNMLTMQEFHRRYHEETGVTFASLYPGCIASTGLFREHIPLFRTLFPPFQKYITKGYVSETESGKRLAQVVSDPSLTKSGVYWSWNKASASFENELSEEASDVEKARKVWEISEKLVGLA

SEQ ID NO: 110027 - DNA, 826 bp, Zea mays subsp. mays
  misc_feature (1)..(826): Ceres Seq. ID no. 15178880
agcttcttctgccacattgccaaatcctcaaatcttctctcgagagagctaaaccaaaaagaaaatggcagcttcctcttctccatctctccttctaccactaggttcagcatctaggaatggtccaaccatgaagactccaagatgcatatctacaagagccatcacagcttcagaaacaagaaacaaaagctgtagccgtagagacgcaatgctattggttctcggcgtgtcaggactctcaatgagctacttgcctgcggcatatgcagctggtttgcctccagaggataaaccgaggctttgtgaagctgaatgcgagaaagagcttgaaaatgttccaatggtaactacagagtcagggcttcagtataaagatatcaaagttggtaaaggccctagtccccctgttggttatcaggttgctgctaactatgtagctatggttccttcagggcagatttttgacagttctttggagaaaggtctaccgtatctgttccgagttgggtctggccaggtgatcaagggacttgatgaaggactcttgactatgaaagctggtggcaaacgcagactttacattccagggcctttggcgtttccaaagggtctagtctcagctccagggaggccaagagttgcaccgaacagtcctgttgtatttgatgtgagcttagagtacattccagggcttgagtcagatgaagagtgaaactcttttttaaagttcagattataatatgaattacatatacatataacagacttttctgtgatggtgtctcatttatattttcatttcgttgtaaaaacaacctcaact

SEQ ID NO: 110028 - protein, 216 aa, Zea mays subsp. mays
  misc_feature (1)..(216): Ceres Seq. ID no. 15178881
  misc_feature (109)..(206): Pfam Name: FKBP-type peptidyl-prolyl cis-trans isomerase Pfam Description: FKBP-type peptidyl-prolyl cis-trans isomerase
  misc_feature (95)..(205): Homolog of NCBI NO: 39997372 NR Description: FKBP-type peptidyl-prolyl cis-trans isomerase
  misc_feature (50)..(205): Homolog of NCBI NO: 23129112 NR Description: hypothetical protein [Nostoc punctiforme]
  misc_feature (95)..(205): Homolog of NCBI NO: 23053670 NR Description: hypothetical protein [Geobacter metallireducens]
  misc_feature (69)..(205): Homolog of NCBI NO: 22298646 NR Description: FKBP-type peptidyl-prolyl cis-trans isomerase
  misc_feature (51)..(205): Homolog of NCBI NO: 16329650 NR Description: FKBP-type peptidyl-prolyl cis-trans isomerase
  misc_feature (96)..(205): Homolog of NCBI NO: 37520410 NR Description: FKBP-type peptidyl-prolyl cis-trans isomerase
  misc_feature (52)..(216): Homolog of NCBI NO: 18252321 NR Description: putative FKBP type peptidyl-prolyl cis-trans
  misc_feature (34)..(214): Homolog of NCBI NO: 38636681 NR Description: putative immunophilin / FKBP-type peptidyl-prolyl
  misc_feature (50)..(216): Homolog of NCBI NO: 25408885 NR Description: hypothetical protein At2g43560 [imported] -
  misc_feature (3)..(216): Homolog of NCBI NO: 15224305 NR Description: immunophilin / FKBP-type peptidyl-prolyl
MAASSSPSLLLPLGSASRNGPTMKTPRCISTRAITASETRNKSCSRRDAMLLVLGVSGLSMSYLPAAYAAGLPPEDKPRLCEAECEKELENVPMVTTESGLQYKDIKVGKGPSPPVGYQVAANYVAMVPSGQIFDSSLEKGLPYLFRVGSGQVIKGLDEGLLTMKAGGKRRLYIPGPLAFPKGLVSAPGRPRVAPNSPVVFDVSLEYIPGLESDEE

SEQ ID NO: 110029 - protein, 194 aa, Zea mays subsp. mays
  misc_feature (1)..(194): Ceres Seq. ID no. 15178882
  misc_feature (87)..(184): Pfam Name: FKBP-type peptidyl-prolyl cis-trans isomerase Pfam Description: FKBP-type peptidyl-prolyl cis-trans isomerase
  misc_feature (74)..(183): Homolog of NCBI NO: 37520410 NR Description: FKBP-type peptidyl-prolyl cis-trans isomerase
  misc_feature (73)..(183): Homolog of NCBI NO: 39997372 NR Description: FKBP-type peptidyl-prolyl cis-trans isomerase
  misc_feature (28)..(183): Homolog of NCBI NO: 23129112 NR Description: hypothetical protein [Nostoc punctiforme]
  misc_feature (73)..(183): Homolog of NCBI NO: 23053670 NR Description: hypothetical protein [Geobacter metallireducens]
  misc_feature (47)..(183): Homolog of NCBI NO: 22298646 NR Description: FKBP-type peptidyl-prolyl cis-trans isomerase
  misc_feature (29)..(183): Homolog of NCBI NO: 16329650 NR Description: FKBP-type peptidyl-prolyl cis-trans isomerase
  misc_feature (30)..(194): Homolog of NCBI NO: 18252321 NR Description: putative FKBP type peptidyl-prolyl cis-trans
  misc_feature (12)..(192): Homolog of NCBI NO: 38636681 NR Description: putative immunophilin / FKBP-type peptidyl-prolyl
  misc_feature (28)..(194): Homolog of NCBI NO: 25408885 NR Description: hypothetical protein At2g43560 [imported] -
  misc_feature (1)..(194): Homolog of NCBI NO: 15224305 NR Description: immunophilin / FKBP-type peptidyl-prolyl
MKTPRCISTRAITASETRNKSCSRRDAMLLVLGVSGLSMSYLPAAYAAGLPPEDKPRLCEAECEKELENVPMVTTESGLQYKDIKVGKGPSPPVGYQVAANYVAMVPSGQIFDSSLEKGLPYLFRVGSGQVIKGLDEGLLTMKAGGKRRLYIPGPLAFPKGLVSAPGRPRVAPNSPVVFDVSLEYIPGLESDEE

SEQ ID NO: 110030 - protein, 167 aa, Zea mays subsp. mays
  misc_feature (1)..(167): Ceres Seq. ID no. 15178883
  misc_feature (60)..(157): Pfam Name: FKBP-type peptidyl-prolyl cis-trans isomerase Pfam Description: FKBP-type peptidyl-prolyl cis-trans isomerase
  misc_feature (47)..(156): Homolog of NCBI NO: 37520410 NR Description: FKBP-type peptidyl-prolyl cis-trans isomerase
  misc_feature (46)..(156): Homolog of NCBI NO: 39997372 NR Description: FKBP-type peptidyl-prolyl cis-trans isomerase
  misc_feature (1)..(156): Homolog of NCBI NO: 23129112 NR Description: hypothetical protein [Nostoc punctiforme]
  misc_feature (46)..(156): Homolog of NCBI NO: 23053670 NR Description: hypothetical protein [Geobacter metallireducens]
  misc_feature (20)..(156): Homolog of NCBI NO: 22298646 NR Description: FKBP-type peptidyl-prolyl cis-trans isomerase
  misc_feature (2)..(156): Homolog of NCBI NO: 16329650 NR Description: FKBP-type peptidyl-prolyl cis-trans isomerase
  misc_feature (3)..(167): Homolog of NCBI NO: 18252321 NR Description: putative FKBP type peptidyl-prolyl cis-trans
  misc_feature (1)..(165): Homolog of NCBI NO: 38636681 NR Description: putative immunophilin / FKBP-type peptidyl-prolyl
  misc_feature (1)..(167): Homolog of NCBI NO: 25408885 NR Description: hypothetical protein At2g43560 [imported] -
  misc_feature (1)..(167): Homolog of NCBI NO: 15224305 NR Description: immunophilin / FKBP-type peptidyl-prolyl
MLLVLGVSGLSMSYLPAAYAAGLPPEDKPRLCEAECEKELENVPMVTTESGLQYKDIKVGKGPSPPVGYQVAANYVAMVPSGQIFDSSLEKGLPYLFRVGSGQVIKGLDEGLLTMKAGGKRRLYIPGPLAFPKGLVSAPGRPRVAPNSPVVFDVSLEYIPGLESDEE

SEQ ID NO: 110031 - DNA, 926 bp, Zea mays subsp. mays
  misc_feature (1)..(926): Ceres Seq. ID no. 15174351
ctttttattcttcttcatctctttgatcgtcatcacacagatcctccattctcttttcgttcagatcttggaaggtcctcagctcaaggagaggagaagaggaacgtaaagactttgaaggatgtcttcattcacaggaactcagcagaagtgcaaggcttgcgagaagacggtgtaccctgtggagcttctctctgctgatggtgtcagctatcacaagtcttgcttcaaatgctctcactgcaaatccaggcttcagctgagcagatactcatcaatggaaggtgtgctgtactgtaagcctcattatgagcagctcttcaaggagtctggtagcttcaccaagaactttcagtcccctgttaaacctgcggctgagaaatcaagtcctgagctgacaaggacccctagccgagttgccggtatgttctcaggcacacaagaaaaatgcgccacttgcagtaaaactgtctatcctatcgaaaaggtaacagtggagagccagacgtatcacaagtcctgcttcaagtgctcacacggaggctgcccaatctcgccttcaaactacgcagctcttgaaggaatcctctactgcaagcaccatttcgctcagcttttcaaggaaaagggaagctacaaccacttaatcaaatccgcttccatcaaacgctctgtagctgctgcagtcgctgctggtgcacctgcagccgccgttcctgaatcttaataaactcaataatcctctctcttctctagtctaaaattgaaaactcaatgccaaactgattcagtttgttttctcttttgtgtctttatgtgtgagcgtgtgtaatctatctctttgtttacattgttatctcctaaaaagcttgtttgttgtcataactttggtatctatatataaaaaactgagactttcccttttc

SEQ ID NO: 110032 - protein, 201 aa, Zea mays subsp. mays
  misc_feature (1)..(201): Ceres Seq. ID no. 15174352
  misc_feature (110)..(167): Pfam Name: LIM domain Pfam Description: LIM domain
  misc_feature (3)..(175): Homolog of NCBI NO: 6467903 NR Description: pollen specific LIM domain protein 1a [Nicotiana
  misc_feature (3)..(195): Homolog of NCBI NO: 15225897 NR Description: LIM-domain protein -related [Arabidopsis
  misc_feature (3)..(187): Homolog of NCBI NO: 8515104 NR Description: LIM domain protein PLIM-2 [Nicotiana tabacum]
  misc_feature (53)..(201): Homolog of NCBI NO: 13926203 NR Description: transcription factor L2 [Arabidopsis thaliana]
  misc_feature (3)..(191): Homolog of NCBI NO: 17227092 NR Description: LIM domain protein [Gossypium hirsutum]
  misc_feature (4)..(197): Homolog of NCBI NO: 34902012 NR Description: putative LIM-domain protein
  misc_feature (3)..(169): Homolog of NCBI NO: 11282608 NR Description: transcription factor L2 [imported] - Arabidopsis
  misc_feature (3)..(201): Homolog of NCBI NO: 7489184 NR Description: probable transcription factor SF3 - common
  misc_feature (3)..(201): Homolog of NCBI NO: 15225592 NR Description: LIM-domain protein -related [Arabidopsis
  misc_feature (3)..(201): Homolog of NCBI NO: 15228188 NR Description: transcription factor L2 [Arabidopsis thaliana]
MSSFTGTQQKCKACEKTVYPVELLSADGVSYHKSCFKCSHCKSRLQLSRYSSMEGVLYCKPHYEQLFKESGSFTKNFQSPVKPAAEKSSPELTRTPSRVAGMFSGTQEKCATCSKTVYPIEKVTVESQTYHKSCFKCSHGGCPISPSNYAALEGILYCKHHFAQLFKEKGSYNHLIKSASIKRSVAAAVAAGAPAAAVPES

SEQ ID NO: 110033 - protein, 149 aa, Zea mays subsp. mays
  misc_feature (1)..(149): Ceres Seq. ID no. 15174353
  misc_feature (58)..(115): Pfam Name: LIM domain Pfam Description: LIM domain
  misc_feature (1)..(123): Homolog of NCBI NO: 6467903 NR Description: pollen specific LIM domain protein 1a [Nicotiana
  misc_feature (1)..(143): Homolog of NCBI NO: 15225897 NR Description: LIM-domain protein -related [Arabidopsis
  misc_feature (1)..(135): Homolog of NCBI NO: 8515104 NR Description: LIM domain protein PLIM-2 [Nicotiana tabacum]
  misc_feature (1)..(149): Homolog of NCBI NO: 13926203 NR Description: transcription factor L2 [Arabidopsis thaliana]
  misc_feature (1)..(139): Homolog of NCBI NO: 17227092 NR Description: LIM domain protein [Gossypium hirsutum]
  misc_feature (1)..(145): Homolog of NCBI NO: 34902012 NR Description: putative LIM-domain protein
  misc_feature (1)..(117): Homolog of NCBI NO: 11282608 NR Description: transcription factor L2 [imported] - Arabidopsis
  misc_feature (1)..(149): Homolog of NCBI NO: 7489184 NR Description: probable transcription factor SF3 - common
  misc_feature (1)..(149): Homolog of NCBI NO: 15225592 NR Description: LIM-domain protein -related [Arabidopsis
  misc_feature (1)..(149): Homolog of NCBI NO: 15228188 NR Description: transcription factor L2 [Arabidopsis thaliana]
MEGVLYCKPHYEQLFKESGSFTKNFQSPVKPAAEKSSPELTRTPSRVAGMFSGTQEKCATCSKTVYPIEKVTVESQTYHKSCFKCSHGGCPISPSNYAALEGILYCKHHFAQLFKEKGSYNHLIKSASIKRSVAAAVAAGAPAAAVPES

SEQ ID NO: 110034 - protein, 100 aa, Zea mays subsp. mays
  misc_feature (1)..(100): Ceres Seq. ID no. 15174354
  misc_feature (9)..(66): Pfam Name: LIM domain Pfam Description: LIM domain
  misc_feature (1)..(74): Homolog of NCBI NO: 6467903 NR Description: pollen specific LIM domain protein 1a [Nicotiana
  misc_feature (1)..(94): Homolog of NCBI NO: 15225897 NR Description: LIM-domain protein -related [Arabidopsis
  misc_feature (1)..(86): Homolog of NCBI NO: 8515104 NR Description: LIM domain protein PLIM-2 [Nicotiana tabacum]
  misc_feature (1)..(100): Homolog of NCBI NO: 13926203 NR Description: transcription factor L2 [Arabidopsis thaliana]
  misc_feature (1)..(90): Homolog of NCBI NO: 17227092 NR Description: LIM domain protein [Gossypium hirsutum]
  misc_feature (1)..(96): Homolog of NCBI NO: 34902012 NR Description: putative LIM-domain protein
  misc_feature (1)..(68): Homolog of NCBI NO: 11282608 NR Description: transcription factor L2 [imported] - Arabidopsis
  misc_feature (1)..(100): Homolog of NCBI NO: 7489184 NR Description: probable transcription factor SF3 - common
  misc_feature (1)..(100): Homolog of NCBI NO: 15225592 NR Description: LIM-domain protein -related [Arabidopsis
  misc_feature (1)..(100): Homolog of NCBI NO: 15228188 NR Description: transcription factor L2 [Arabidopsis thaliana]
MFSGTQEKCATCSKTVYPIEKVTVESQTYHKSCFKCSHGGCPISPSNYAALEGILYCKHHFAQLFKEKGSYNHLIKSASIKRSVAAAVAAGAPAAAVPES

SEQ ID NO: 110035 - DNA, 845 bp, Zea mays subsp. mays
  misc_feature (1)..(845): Ceres Seq. ID no. 15178843
tctttcgctcagccttatcgccgctgtttcgtcttaaattcttcaagggttaggcgttcttctgtggataaaagtggttcaaagaagatgaatcattgcaaccttcagcagaacgccttcatgtcttcccatgacgagtccagaggatttgttgttcctgtctcttctgttgtttgtcctaagcctcgtcgcgttagcattctctccaataacgttattcatccgttgagatcacattctagtcaaccaggagcagctgatgtatgtgattctcaagccggggcagagcttttggacatccttcgtagaaaggaagaaacattgtctggtgtagcttcatcacctccattcttcctcgggtctcccccaagcagagcatcaaacccgttagctcaagatgcacgatttggagatgagaagctcaaccttctttcaccctcactctcaacattcctcacatctccttctccatcgccatctcgtgtcaaaggagggggctgtggtggtcgagtgaagtacgggcttaaaccggcagctgtcagagttgaagggttcaactgcttaaacagggaccgccaaagctcaaacatatctgccatggcttagaagaagaacaaagaagaaggaacagagattcacaaagtgtaaataaaatcctgaatcaagactatatttatctttgaagatcagtctacatcaccagttaagcctttgaccacagttttctttaactttgaggtcaatatttgtgtatatatatataacggtaacaacaaagatgtgttatattgagtctcgttgtaacatatttttttttttcccgtctggtaaattcattcaaagtg

SEQ ID NO: 110036 - protein, 201 aa, Zea mays subsp. mays
  misc_feature (1)..(201): Ceres Seq. ID no. 15178844
  misc_feature (30)..(201): Homolog of NCBI NO: 15222278 NR Description: expressed protein [Arabidopsis thaliana]
  misc_feature (30)..(201): Homolog of NCBI NO: 18409044 NR Description: expressed protein [Arabidopsis thaliana]
  misc_feature (30)..(201): Homolog of NCBI NO: 11762168 NR Description: AT5g16110 [Arabidopsis thaliana]
  misc_feature (28)..(201): Homolog of NCBI NO: 30685676 NR Description: expressed protein [Arabidopsis thaliana]
  misc_feature (30)..(201): Homolog of NCBI NO: 18396232 NR Description: expressed protein [Arabidopsis thaliana]
SFAQPYRRCFVLNSSRVRRSSVDKSGSKKMNHCNLQQNAFMSSHDESRGFVVPVSSVVCPKPRRVSILSNNVIHPLRSHSSQPGAADVCDSQAGAELLDILRRKEETLSGVASSPPFFLGSPPSRASNPLAQDARFGDEKLNLLSPSLSTFLTSPSPSPSRVKGGGCGGRVKYGLKPAAVRVEGFNCLNRDRQSSNISAMA

SEQ ID NO: 110037 - protein, 172 aa, Zea mays subsp. mays
  misc_feature (1)..(172): Ceres Seq. ID no. 15178845
  misc_feature (1)..(172): Homolog of NCBI NO: 15222278 NR Description: expressed protein [Arabidopsis thaliana]
  misc_feature (1)..(172): Homolog of NCBI NO: 18409044 NR Description: expressed protein [Arabidopsis thaliana]
  misc_feature (1)..(172): Homolog of NCBI NO: 11762168 NR Description: AT5g16110 [Arabidopsis thaliana]
  misc_feature (1)..(172): Homolog of NCBI NO: 30685676 NR Description: expressed protein [Arabidopsis thaliana]
  misc_feature (1)..(172): Homolog of NCBI NO: 18396232 NR Description: expressed protein [Arabidopsis thaliana]
MNHCNLQQNAFMSSHDESRGFVVPVSSVVCPKPRRVSILSNNVIHPLRSHSSQPGAADVCDSQAGAELLDILRRKEETLSGVASSPPFFLGSPPSRASNPLAQDARFGDEKLNLLSPSLSTFLTSPSPSPSRVKGGGCGGRVKYGLKPAAVRVEGFNCLNRDRQSSNISAMA

SEQ ID NO: 110038 - protein, 161 aa, Zea mays subsp. mays
  misc_feature (1)..(161): Ceres Seq. ID no. 15178846
  misc_feature (1)..(161): Homolog of NCBI NO: 15222278 NR Description: expressed protein [Arabidopsis thaliana]
  misc_feature (1)..(161): Homolog of NCBI NO: 18409044 NR Description: expressed protein [Arabidopsis thaliana]
  misc_feature (1)..(161): Homolog of NCBI NO: 11762168 NR Description: AT5g16110 [Arabidopsis thaliana]
  misc_feature (1)..(161): Homolog of NCBI NO: 30685676 NR Description: expressed protein [Arabidopsis thaliana]
  misc_feature (1)..(161): Homolog of NCBI NO: 18396232 NR Description: expressed protein [Arabidopsis thaliana]
MSSHDESRGFVVPVSSVVCPKPRRVSILSNNVIHPLRSHSSQPGAADVCDSQAGAELLDILRRKEETLSGVASSPPFFLGSPPSRASNPLAQDARFGDEKLNLLSPSLSTFLTSPSPSPSRVKGGGCGGRVKYGLKPAAVRVEGFNCLNRDRQSSNISAMA

SEQ ID NO: 110039 - DNA, 864 bp, Zea mays subsp. mays
  misc_feature (1)..(864): Ceres Seq. ID no. 15178824
aattggatcagtttctttcttcctctctaaacaacaagagattctttcttcctctttatcttcaccactttcacgtttcatctttctctccaaacactccagctcaaacaacatgacacgttcctctagattccttggaactgagtcggcgccgccaccgccggaagaaatactagccgccgaaactgacatggttgtgatactctcagctcttctctgcgctctcatatgcgtatccggcttagccgcggtagctcgctgcgcctggatccgccgtctggccggcgtcaactcctccgccgtaggagaatctccacccccgaacaaaggtctcaagaaaaaagctctccagtccctccctaagtcaaccttcaccgccgcagactcgccgagctcctcctccggaaagggagaatcatccaccgagtgcgccatatgcttaatggagttttcagacggagaagagatcaggatattacccttatgcagacacgccttccacgtggcgtgcatagataagtggttgacttctcggtcgtcgtgtccttcttgtcgtagaattttggttccggtgaagtgtgatcggtgtggccaccacgattccacggcggaggctcatggcaaagatcagcctcctcgtcatcaacatccttcacagttcagttccgccaatattcctgcttttcttccttaaaacgttctttttactttctctattttacaaatttgtgaaaaattatcggcaataattaagaaaagtaaagtattaattaactaggggtcttttagttacttcgatttttatcctctgtaagactgtaacactgttctgaatctgaatcagtccgatgcgtgtttacaagt

SEQ ID NO: 110040 - protein, 230 aa, Zea mays subsp. mays
  misc_feature (1)..(230): Ceres Seq. ID no. 15178825
  misc_feature (143)..(184): Pfam Name: Zinc finger, C3HC4 type (RING finger) Pfam Description: Zinc finger, C3HC4 type (RING finger)
  misc_feature (46)..(230): Homolog of NCBI NO: 32487554 NR Description: OSJNBa0013K16.6 [Oryza sativa (japonica
  misc_feature (42)..(106): Homolog of NCBI NO: 37536508 NR Description: putative ring finger protein
  misc_feature (109)..(196): Homolog of NCBI NO: 37536508 NR Description: putative ring finger protein
  misc_feature (35)..(194): Homolog of NCBI NO: 7489432 NR Description: probable ring finger protein - barley
  misc_feature (43)..(197): Homolog of NCBI NO: 21555237 NR Description: putative RING zinc finger protein [Arabidopsis
  misc_feature (9)..(218): Homolog of NCBI NO: 9293902 NR Description: contains similarity to RING zinc finger
  misc_feature (43)..(197): Homolog of NCBI NO: 15223041 NR Description: RING zinc finger protein -related [Arabidopsis
  misc_feature (43)..(230): Homolog of NCBI NO: 15218042 NR Description: RING zinc finger protein -related [Arabidopsis
  misc_feature (38)..(230): Homolog of NCBI NO: 15227839 NR Description: RING zinc finger protein -related [Arabidopsis
  misc_feature (38)..(230): Homolog of NCBI NO: 15237013 NR Description: RING-H2 finger protein RHA3b [Arabidopsis
IGSVSFFLSKQQEILSSSLSSPLSRFIFLSKHSSSNNMTRSSRFLGTESAPPPPEEILAAETDMVVILSALLCALICVSGLAAVARCAWIRRLAGVNSSAVGESPPPNKGLKKKALQSLPKSTFTAADSPSSSSGKGESSTECAICLMEFSDGEEIRILPLCRHAFHVACIDKWLTSRSSCPSCRRILVPVKCDRCGHHDSTAEAHGKDQPPRHQHPSQFSSANIPAFLP

SEQ ID NO: 110041 - protein, 193 aa, Zea mays subsp. mays
  misc_feature (1)..(193): Ceres Seq. ID no. 15178826
  misc_feature (106)..(147): Pfam Name: Zinc finger, C3HC4 type (RING finger) Pfam Description: Zinc finger, C3HC4 type (RING finger)
  misc_feature (1)..(181): Homolog of NCBI NO: 9293902 NR Description: contains similarity to RING zinc finger
  misc_feature (9)..(193): Homolog of NCBI NO: 32487554 NR Description: OSJNBa0013K16.6 [Oryza sativa (japonica
  misc_feature (5)..(69): Homolog of NCBI NO: 37536508 NR Description: putative ring finger protein
  misc_feature (72)..(159): Homolog of NCBI NO: 37536508 NR Description: putative ring finger protein
  misc_feature (1)..(157): Homolog of NCBI NO: 7489432 NR Description: probable ring finger protein - barley
  misc_feature (6)..(160): Homolog of NCBI NO: 21555237 NR Description: putative RING zinc finger protein [Arabidopsis
  misc_feature (6)..(160): Homolog of NCBI NO: 15223041 NR Description: RING zinc finger protein -related [Arabidopsis
  misc_feature (6)..(193): Homolog of NCBI NO: 15218042 NR Description: RING zinc finger protein -related [Arabidopsis
  misc_feature (1)..(193): Homolog of NCBI NO: 15227839 NR Description: RING zinc finger protein -related [Arabidopsis
  misc_feature (1)..(193): Homolog of NCBI NO: 15237013 NR Description: RING-H2 finger protein RHA3b [Arabidopsis
MTRSSRFLGTESAPPPPEEILAAETDMVVILSALLCALICVSGLAAVARCAWIRRLAGVNSSAVGESPPPNKGLKKKALQSLPKSTFTAADSPSSSSGKGESSTECAICLMEFSDGEEIRILPLCRHAFHVACIDKWLTSRSSCPSCRRILVPVKCDRCGHHDSTAEAHGKDQPPRHQHPSQFSSANIPAFLP

SEQ ID NO: 110042 - protein, 167 aa, Zea mays subsp. mays
  misc_feature (1)..(167): Ceres Seq. ID no. 15178827
  misc_feature (80)..(121): Pfam Name: Zinc finger, C3HC4 type (RING finger) Pfam Description: Zinc finger, C3HC4 type (RING finger)
  misc_feature (1)..(155): Homolog of NCBI NO: 9293902 NR Description: contains similarity to RING zinc finger
  misc_feature (1)..(167): Homolog of NCBI NO: 32487554 NR Description: OSJNBa0013K16.6 [Oryza sativa (japonica
  misc_feature (1)..(43): Homolog of NCBI NO: 37536508 NR Description: putative ring finger protein
  misc_feature (46)..(133): Homolog of NCBI NO: 37536508 NR Description: putative ring finger protein
  misc_feature (1)..(131): Homolog of NCBI NO: 7489432 NR Description: probable ring finger protein - barley
  misc_feature (1)..(134): Homolog of NCBI NO: 21555237 NR Description: putative RING zinc finger protein [Arabidopsis
  misc_feature (1)..(134): Homolog of NCBI NO: 15223041 NR Description: RING zinc finger protein -related [Arabidopsis
  misc_feature (1)..(167): Homolog of NCBI NO: 15218042 NR Description: RING zinc finger protein -related [Arabidopsis
  misc_feature (1)..(167): Homolog of NCBI NO: 15227839 NR Description: RING zinc finger protein -related [Arabidopsis
  misc_feature (1)..(167): Homolog of NCBI NO: 15237013 NR Description: RING-H2 finger protein RHA3b [Arabidopsis
MVVILSALLCALICVSGLAAVARCAWIRRLAGVNSSAVGESPPPNKGLKKKALQSLPKSTFTAADSPSSSSGKGESSTECAICLMEFSDGEEIRILPLCRHAFHVACIDKWLTSRSSCPSCRRILVPVKCDRCGHHDSTAEAHGKDQPPRHQHPSQFSSANIPAFLP

SEQ ID NO: 110043 - DNA, 738 bp, Zea mays subsp. mays
  misc_feature (1)..(738): Ceres Seq. ID no. 15178860
attcttttgtaagaaaaaagatcagaaggaaagaagagaagaaaaatgccgcatggaacgcttgaagttgttcttgtcagtgccaaaggtctggaggattctgattttctgaatagcatggatccttatgtgctcctcacttgccggactcaagatcagaagagcaatgttgcctcaggacaaggcacaactcctgagtggaatgagacatttatcttcaatgtctctgaaggaactacagagttaaaagccaaaatatttgacacagatgttggcacagaggatgatccccttggtgaagcaactattccattggaggcggttttcctggaaggagatatcccaccagctgcatacaatgtcgtgaaggatgaggagttcaaaggcgagatctggatcgcactatccttcaaaccttcggaaaaccgaagcaggggtttcgaagaggagtcttatggaggctggaaaaactctgaagcttcttactaaagaggaagaacagtaaatgtgtgttgctctttaatttattgagtcttgggaataaaatgttgagcttcccctcttggaaaggattttgttaagaccgtttcttcttattaatattattgttctgttcggtttgaaattcaaaactcttgagaatttgattcttttgtcaagaatttgtttcagtcttttttttttctttggtaatcaatttgtttcagtcttgttttggtatttaagaaaatattatac

SEQ ID NO: 110044 - protein, 147 aa, Zea mays subsp. mays
  misc_feature (1)..(147): Ceres Seq. ID no. 15178861
  misc_feature (6)..(87): Pfam Name: C2 domain Pfam Description: C2 domain
  misc_feature (4)..(143): Homolog of NCBI NO: 21998841 NR Description: RPP17-1 [Oryza sativa (japonica cultivar-group)]
  misc_feature (1)..(144): Homolog of NCBI NO: 15233278 NR Description: C2 domain-containing protein [Arabidopsis
  misc_feature (4)..(143): Homolog of NCBI NO: 7489474 NR Description: FIERG2 protein - rice
  misc_feature (1)..(147): Homolog of NCBI NO: 3860331 NR Description: hypothetical protein [Cicer arietinum]
  misc_feature (1)..(128): Homolog of NCBI NO: 5565983 NR Description: unknown [Zea mays]
  misc_feature (1)..(140): Homolog of NCBI NO: 38345558 NR Description: OSJNBa0032F06.15 [Oryza sativa (japonica
  misc_feature (1)..(140): Homolog of NCBI NO: 7489756 NR Description: hypothetical protein - maize
  misc_feature (1)..(143): Homolog of NCBI NO: 11358958 NR Description: elicitor-responsive gene 3 [imported] - rice
  misc_feature (1)..(147): Homolog of NCBI NO: 21553977 NR Description: putative elicitor-responsive gene [Arabidopsis
  misc_feature (1)..(147): Homolog of NCBI NO: 15221718 NR Description: C2 domain-containing protein [Arabidopsis
MPHGTLEVVLVSAKGLEDSDFLNSMDPYVLLTCRTQDQKSNVASGQGTTPEWNETFIFNVSEGTTELKAKIFDTDVGTEDDPLGEATIPLEAVFLEGDIPPAAYNVVKDEEFKGEIWIALSFKPSENRSRGFEEESYGGWKNSEASY

SEQ ID NO: 110045 - protein, 123 aa, Zea mays subsp. mays
  misc_feature (1)..(123): Ceres Seq. ID no. 15178862
  misc_feature (1)..(63): Pfam Name: C2 domain Pfam Description: C2 domain
  misc_feature (1)..(119): Homolog of NCBI NO: 21998841 NR Description: RPP17-1 [Oryza sativa (japonica cultivar-group)]
  misc_feature (1)..(120): Homolog of NCBI NO: 15233278 NR Description: C2 domain-containing protein [Arabidopsis
  misc_feature (1)..(119): Homolog of NCBI NO: 7489474 NR Description: FIERG2 protein - rice
  misc_feature (1)..(123): Homolog of NCBI NO: 3860331 NR Description: hypothetical protein [Cicer arietinum]
  misc_feature (1)..(104): Homolog of NCBI NO: 5565983 NR Description: unknown [Zea mays]
  misc_feature (1)..(116): Homolog of NCBI NO: 38345558 NR Description: OSJNBa0032F06.15 [Oryza sativa (japonica
  misc_feature (1)..(116): Homolog of NCBI NO: 7489756 NR Description: hypothetical protein - maize
  misc_feature (1)..(119): Homolog of NCBI NO: 11358958 NR Description: elicitor-responsive gene 3 [imported] - rice
  misc_feature (1)..(123): Homolog of NCBI NO: 21553977 NR Description: putative elicitor-responsive gene [Arabidopsis
  misc_feature (1)..(123): Homolog of NCBI NO: 15221718 NR Description: C2 domain-containing protein [Arabidopsis
MDPYVLLTCRTQDQKSNVASGQGTTPEWNETFIFNVSEGTTELKAKIFDTDVGTEDDPLGEATIPLEAVFLEGDIPPAAYNVVKDEEFKGEIWIALSFKPSENRSRGFEEESYGGWKNSEASY

SEQ ID NO: 110046 - DNA, 870 bp, Zea mays subsp. mays
  misc_feature (1)..(870): Ceres Seq. ID no. 15178805
aaaaacaggttaacaacaacacatacacatctctctctctctctcttcttcgttttatatttccattctttttcttcatttccgccatttctgttttattttggttgccgagaaaacgcaggaactcggtgacctaattatagtctcgtcgattgtctttttcagaattttcgacgaattttattgattaataattaattaatggcggaagaacatccatgtcagacgccggaaggccaccgtctctgcgttaacaactgcggtttcttcggaagctcagccaccatgaatctctgctccaactgctacggcgacctctgcctcaagaaccagcagcaagcttccatgaaatcaaccgtcgagtcctccctctccgccgcatctcctccgtcgtcaccggagatccagtcaatctccacgtcgacgatcgcgcccgtcgtccaaatttacgcggcggagatacagatagagaaacaaatccagcagcaacggcctaatcggtgcaccgtgtgcaggaaacgggtcgggttaaccgggttcatgtgccggtgcgggacgactttctgcgggacccacaggtatccggaggttcacggatgcacgttcgatttcaaatcggctgggcgcgaggagatcgcgaaggctaacccgttggttgtagccgcgaagctccagaagatatgatctgagccgttgcttgcgttgttcaccgtgaaacatacttttatgttacggacatgtgtttacgtaattaatggttgagacagttttcattcaccttttaattattttccttttcttccggaagaattttaaagttttataattgtgtggctttgtgcttgtaaaaaaaaagattttcttttgcgg

SEQ ID NO: 110047 - protein, 160 aa, Zea mays subsp. mays
  misc_feature (1)..(160): Ceres Seq. ID no. 15178806
  misc_feature (101)..(141): Pfam Name: AN1-like Zinc finger Pfam Description: AN1-like Zinc finger
  misc_feature (14)..(159): Homolog of NCBI NO: 15235819 NR Description: zinc finger -related protein [Arabidopsis
  misc_feature (1)..(160): Homolog of NCBI NO: 8778645 NR Description: F5O11.17 [Arabidopsis thaliana]
  misc_feature (3)..(160): Homolog of NCBI NO: 35187687 NR Description: zinc-finger protein [Oryza sativa (indica
  misc_feature (4)..(160): Homolog of NCBI NO: 30908921 NR Description: putative zinc finger transcription factor ZFP33
  misc_feature (1)..(160): Homolog of NCBI NO: 15225894 NR Description: zinc finger protein -related [Arabidopsis
  misc_feature (7)..(160): Homolog of NCBI NO: 25082726 NR Description: expressed protein [Arabidopsis thaliana]
  misc_feature (7)..(160): Homolog of NCBI NO: 18403408 NR Description: expressed protein [Arabidopsis thaliana]
  misc_feature (1)..(160): Homolog of NCBI NO: 14596167 NR Description: zinc finger-like protein [Arabidopsis thaliana]
  misc_feature (1)..(160): Homolog of NCBI NO: 15231686 NR Description: zinc finger - like protein [Arabidopsis thaliana]
  misc_feature (1)..(160): Homolog of NCBI NO: 18404102 NR Description: expressed protein [Arabidopsis thaliana]
MAEEHPCQTPEGHRLCVNNCGFFGSSATMNLCSNCYGDLCLKNQQQASMKSTVESSLSAASPPSSPEIQSISTSTIAPVVQIYAAEIQIEKQIQQQRPNRCTVCRKRVGLTGFMCRCGTTFCGTHRYPEVHGCTFDFKSAGREEIAKANPLVVAAKLQKI

SEQ ID NO: 110048 - protein, 132 aa, Zea mays subsp. mays
  misc_feature (1)..(132): Ceres Seq. ID no. 15178807
  misc_feature (73)..(113): Pfam Name: AN1-like Zinc finger Pfam Description: AN1-like Zinc finger
  misc_feature (1)..(131): Homolog of NCBI NO: 15235819 NR Description: zinc finger -related protein [Arabidopsis
  misc_feature (1)..(132): Homolog of NCBI NO: 8778645 NR Description: F5O11.17 [Arabidopsis thaliana]
  misc_feature (1)..(132): Homolog of NCBI NO: 35187687 NR Description: zinc-finger protein [Oryza sativa (indica
  misc_feature (1)..(132): Homolog of NCBI NO: 30908921 NR Description: putative zinc finger transcription factor ZFP33
  misc_feature (1)..(132): Homolog of NCBI NO: 15225894 NR Description: zinc finger protein -related [Arabidopsis
  misc_feature (1)..(132): Homolog of NCBI NO: 25082726 NR Description: expressed protein [Arabidopsis thaliana]
  misc_feature (1)..(132): Homolog of NCBI NO: 18403408 NR Description: expressed protein [Arabidopsis thaliana]
  misc_feature (1)..(132): Homolog of NCBI NO: 14596167 NR Description: zinc finger-like protein [Arabidopsis thaliana]
  misc_feature (1)..(132): Homolog of NCBI NO: 15231686 NR Description: zinc finger - like protein [Arabidopsis thaliana]
  misc_feature (1)..(132): Homolog of NCBI NO: 18404102 NR Description: expressed protein [Arabidopsis thaliana]
MNLCSNCYGDLCLKNQQQASMKSTVESSLSAASPPSSPEIQSISTSTIAPVVQIYAAEIQIEKQIQQQRPNRCTVCRKRVGLTGFMCRCGTTFCGTHRYPEVHGCTFDFKSAGREEIAKANPLVVAAKLQKI

SEQ ID NO: 110049 - protein, 112 aa, Zea mays subsp. mays
  misc_feature (1)..(112): Ceres Seq. ID no. 15178808
  misc_feature (53)..(93): Pfam Name: AN1-like Zinc finger Pfam Description: AN1-like Zinc finger
  misc_feature (1)..(111): Homolog of NCBI NO: 15235819 NR Description: zinc finger -related protein [Arabidopsis
  misc_feature (1)..(112): Homolog of NCBI NO: 8778645 NR Description: F5O11.17 [Arabidopsis thaliana]
  misc_feature (1)..(112): Homolog of NCBI NO: 35187687 NR Description: zinc-finger protein [Oryza sativa (indica
  misc_feature (1)..(112): Homolog of NCBI NO: 30908921 NR Description: putative zinc finger transcription factor ZFP33
  misc_feature (1)..(112): Homolog of NCBI NO: 15225894 NR Description: zinc finger protein -related [Arabidopsis
  misc_feature (1)..(112): Homolog of NCBI NO: 25082726 NR Description: expressed protein [Arabidopsis thaliana]
  misc_feature (1)..(112): Homolog of NCBI NO: 18403408 NR Description: expressed protein [Arabidopsis thaliana]
  misc_feature (1)..(112): Homolog of NCBI NO: 14596167 NR Description: zinc finger-like protein [Arabidopsis thaliana]
  misc_feature (1)..(112): Homolog of NCBI NO: 15231686 NR Description: zinc finger - like protein [Arabidopsis thaliana]
  misc_feature (1)..(112): Homolog of NCBI NO: 18404102 NR Description: expressed protein [Arabidopsis thaliana]
MKSTVESSLSAASPPSSPEIQSISTSTIAPVVQIYAAEIQIEKQIQQQRPNRCTVCRKRVGLTGFMCRCGTTFCGTHRYPEVHGCTFDFKSAGREEIAKANPLVVAAKLQKI

SEQ ID NO: 110050 - DNA, 1410 bp, Zea mays subsp. mays
  misc_feature (1)..(1410): Ceres Seq. ID no. 15177500
agagatgatcgagcaatggcgacgactttaacgttgactctcttcctccttttttcaacaaaacttccggcgtcagtctccggcaagtgcaccaccaccacatccacaaaaaccttcgagaaatgcatctctcttcccacacaacaagcttcaatcgcgtggacataccatccacacaacgcgaccctcgacctctgcttcttcggaacattcatctcgccttccgggtgggtcgggtgggggatcaacccggatactccctcccagatgaccggctctcgagtcctcatcgcgtttccggatcctaactcgggtcagctcatcctcctcccttacgttcttgactcttctgtcaagctccagaaaggccctctgctttctcgtccccttgacctcctccgtctctcctcctcctccgcttctctgtacggagggaacatggcgactatacgcaacggcgcctccgttcagatttacgcatcggtgaaactctcgtcgaacaacaccaagatccaccatgtttggaacagaggtctttacgttcaaggttactctcccaccattcatcccaccacttccactgatctctcctccttctccaccttcgatgttacttcaggttttgcaacggttaaaagaaacagcggttcgagagctttgaaagtgacacacggagtgatcaacgcggtggcgtggggtttcctcctcccggcgggagcagtaacagctcgataccttcgtcaaatgcagtcaataggaccaacttggttctacatccacgcagccatacagctaaccggtttcctcctcggaacaatcggcttctcactaggattggtgctcggccgaaactcccccggagtgacctacggcttacaccggagcctcgggatagcaacgttcacgctggcggcgctgcaaacgctggctttgctgttcagaccaaagacgactaacaagttcaggagatactggaagtcttaccatcatttcgtcgggtacggttgcgtggtgatgggagtggtgaatgtgttccaagggtttgatgttttgagggaaggaggatcgtacgcaaagcttggttactgtatgtgtctgtccacgctggtcggtgtctgtgtggcgatggaagttaactcgtgggttgtgttttgccgcaaggcgaaagaggagaagatgaagagagagggtttgactgatgatagatgcagcagtgggattcattcatagttagttcttgtgtcctaattataagagagaatgagcaagacacaacaccaatttttatgtatttttgctttggttatatacattgttgaggtgtttacatcactgttcctagaagatcttgattttgtttaaactttcatatactaaagagcagtgttctaaacgaaacaatttttccag

SEQ ID NO: 110051 - protein, 409 aa, Zea mays subsp. mays
  misc_feature (1)..(409): Ceres Seq. ID no. 15177501
  misc_feature (90)..(231): Pfam Name: Protein of unknown function (DUF568) Pfam Description: Protein of unknown function (DUF568)
  misc_feature (14)..(408): Homolog of NCBI NO: 21592781 NR Description: putative membrane protein [Arabidopsis thaliana]
  misc_feature (14)..(408): Homolog of NCBI NO: 18421491 NR Description: auxin-induced protein family [Arabidopsis
  misc_feature (6)..(207): Homolog of NCBI NO: 25411125 NR Description: hypothetical protein At2g04850 [imported] -
  misc_feature (133)..(409): Homolog of NCBI NO: 25411125 NR Description: hypothetical protein At2g04850 [imported] -
  misc_feature (10)..(394): Homolog of NCBI NO: 15235545 NR Description: auxin-induced protein, putative [Arabidopsis
  misc_feature (7)..(394): Homolog of NCBI NO: 18404500 NR Description: auxin-induced protein family [Arabidopsis
  misc_feature (10)..(394): Homolog of NCBI NO: 21593814 NR Description: unknown [Arabidopsis thaliana]
  misc_feature (27)..(400): Homolog of NCBI NO: 24414274 NR Description: Hypothetical protein [Oryza sativa (japonica
  misc_feature (6)..(409): Homolog of NCBI NO: 21536849 NR Description: unknown [Arabidopsis thaliana]
  misc_feature (6)..(409): Homolog of NCBI NO: 18395877 NR Description: auxin-induced protein, putative [Arabidopsis
RDDRAMATTLTLTLFLLFSTKLPASVSGKCTTTTSTKTFEKCISLPTQQASIAWTYHPHNATLDLCFFGTFISPSGWVGWGINPDTPSQMTGSRVLIAFPDPNSGQLILLPYVLDSSVKLQKGPLLSRPLDLLRLSSSSASLYGGNMATIRNGASVQIYASVKLSSNNTKIHHVWNRGLYVQGYSPTIHPTTSTDLSSFSTFDVTSGFATVKRNSGSRALKVTHGVINAVAWGFLLPAGAVTARYLRQMQSIGPTWFYIHAAIQLTGFLLGTIGFSLGLVLGRNSPGVTYGLHRSLGIATFTLAALQTLALLFRPKTTNKFRRYWKSYHHFVGYGCVVMGVVNVFQGFDVLREGGSYAKLGYCMCLSTLVGVCVAMEVNSWVVFCRKAKEEKMKREGLTDDRCSSGIHS

SEQ ID NO: 110052 - protein, 404 aa, Zea mays subsp. mays
  misc_feature (1)..(404): Ceres Seq. ID no. 15177502
  misc_feature (85)..(226): Pfam Name: Protein of unknown function (DUF568) Pfam Description: Protein of unknown function (DUF568)
  misc_feature (5)..(389): Homolog of NCBI NO: 21593814 NR Description: unknown [Arabidopsis thaliana]
  misc_feature (5)..(389): Homolog of NCBI NO: 15235545 NR Description: auxin-induced protein, putative [Arabidopsis
  misc_feature (2)..(389): Homolog of NCBI NO: 18404500 NR Description: auxin-induced protein family [Arabidopsis
  misc_feature (9)..(403): Homolog of NCBI NO: 21592781 NR Description: putative membrane protein [Arabidopsis thaliana]
  misc_feature (9)..(403): Homolog of NCBI NO: 18421491 NR Description: auxin-induced protein family [Arabidopsis
  misc_feature (1)..(202): Homolog of NCBI NO: 25411125 NR Description: hypothetical protein At2g04850 [imported] -
  misc_feature (128)..(404): Homolog of NCBI NO: 25411125 NR Description: hypothetical protein At2g04850 [imported] -
  misc_feature (22)..(395): Homolog of NCBI NO: 24414274 NR Description: Hypothetical protein [Oryza sativa (japonica
  misc_feature (1)..(404): Homolog of NCBI NO: 21536849 NR Description: unknown [Arabidopsis thaliana]
  misc_feature (1)..(404): Homolog of NCBI NO: 18395877 NR Description: auxin-induced protein, putative [Arabidopsis
MATTLTLTLFLLFSTKLPASVSGKCTTTTSTKTFEKCISLPTQQASIAWTYHPHNATLDLCFFGTFISPSGWVGWGINPDTPSQMTGSRVLIAFPDPNSGQLILLPYVLDSSVKLQKGPLLSRPLDLLRLSSSSASLYGGNMATIRNGASVQIYASVKLSSNNTKIHHVWNRGLYVQGYSPTIHPTTSTDLSSFSTFDVTSGFATVKRNSGSRALKVTHGVINAVAWGFLLPAGAVTARYLRQMQSIGPTWFYIHAAIQLTGFLLGTIGFSLGLVLGRNSPGVTYGLHRSLGIATFTLAALQTLALLFRPKTTNKFRRYWKSYHHFVGYGCVVMGVVNVFQGFDVLREGGSYAKLGYCMCLSTLVGVCVAMEVNSWVVFCRKAKEEKMKREGLTDDRCSSGIHS

SEQ ID NO: 110053 - protein, 320 aa, Zea mays subsp. mays
  misc_feature (1)..(320): Ceres Seq. ID no. 15177503
  misc_feature (1)..(142): Pfam Name: Protein of unknown function (DUF568) Pfam Description: Protein of unknown function (DUF568)
  misc_feature (1)..(305): Homolog of NCBI NO: 21593814 NR Description: unknown [Arabidopsis thaliana]
  misc_feature (1)..(305): Homolog of NCBI NO: 15235545 NR Description: auxin-induced protein, putative [Arabidopsis
  misc_feature (1)..(305): Homolog of NCBI NO: 18404500 NR Description: auxin-induced protein family [Arabidopsis
  misc_feature (1)..(319): Homolog of NCBI NO: 21592781 NR Description: putative membrane protein [Arabidopsis thaliana]
  misc_feature (1)..(319): Homolog of NCBI NO: 18421491 NR Description: auxin-induced protein family [Arabidopsis
  misc_feature (1)..(118): Homolog of NCBI NO: 25411125 NR Description: hypothetical protein At2g04850 [imported] -
  misc_feature (44)..(320): Homolog of NCBI NO: 25411125 NR Description: hypothetical protein At2g04850 [imported] -
  misc_feature (1)..(311): Homolog of NCBI NO: 24414274 NR Description: Hypothetical protein [Oryza sativa (japonica
  misc_feature (1)..(320): Homolog of NCBI NO: 21536849 NR Description: unknown [Arabidopsis thaliana]
  misc_feature (1)..(320): Homolog of NCBI NO: 18395877 NR Description: auxin-induced protein, putative [Arabidopsis
MTGSRVLIAFPDPNSGQLILLPYVLDSSVKLQKGPLLSRPLDLLRLSSSSASLYGGNMATIRNGASVQIYASVKLSSNNTKIHHVWNRGLYVQGYSPTIHPTTSTDLSSFSTFDVTSGFATVKRNSGSRALKVTHGVINAVAWGFLLPAGAVTARYLRQMQSIGPTWFYIHAAIQLTGFLLGTIGFSLGLVLGRNSPGVTYGLHRSLGIATFTLAALQTLALLFRPKTTNKFRRYWKSYHHFVGYGCVVMGVVNVFQGFDVLREGGSYAKLGYCMCLSTLVGVCVAMEVNSWVVFCRKAKEEKMKREGLTDDRCSSGIHS

SEQ ID NO: 110054 - DNA, 754 bp, Zea mays subsp. mays
  misc_feature (1)..(754): Ceres Seq. ID no. 15179480
atatctaaatcctctttctctctgcttcttcaaattttacagtttctttctaaagctgccctcgaattttacattaattacataaatgtccggaatcttagttaattctgccgctaactccctccgcttctcgccgggagctagccttcctcatccgaagccaaccagatcacacaacggcagcgcgcggttccccaccggagccaactcgttcagagcttccgcgcagactctcaacgcggagccaaccgtaacggaatccgttcgccggcgagcgtcgagcctctacgatctgctgaaagtcaacgaaacggcgtccttgccggagatcaagacggcgtaccggagcctagctaaagtctaccatcccgacgcgtcggagtcggacgggcgagatttcatggagatccacaaagcttacgcgacgctcgcggatccgacgacgagagcgatctacgattcgacgctgggagcgcgacggagacgtgtgcaggtcggggcgatgggtcgggcgggtcgggtgtattcgacgacccggagatgggagacggatcagtgttggtgatttaggtttcaggtgatgatgactttgcagcaagggcacttttttttacttcatttttccccttttgttacttttttttttttccttttgtcgtgtattgggaaaattaaggggaaagataagttttatcagtccttagctttaactttgttaacataaattatgaatagagagatgtatattattttt

SEQ ID NO: 110055 - protein, 159 aa, Zea mays subsp. mays
  misc_feature (1)..(159): Ceres Seq. ID no. 15179481
  misc_feature (66)..(128): Pfam Name: DnaJ domain Pfam Description: DnaJ domain
  misc_feature (66)..(128): Homolog of NCBI NO: 13507741 NR Description: similar to j-domain of DnaJ [Mycoplasma
  misc_feature (66)..(147): Homolog of NCBI NO: 34894012 NR Description: P0672D08.16 [Oryza sativa (japonica
  misc_feature (44)..(128): Homolog of NCBI NO: 30682610 NR Description: DnaJ protein family [Arabidopsis thaliana]
  misc_feature (44)..(128): Homolog of NCBI NO: 15236355 NR Description: DnaJ protein family [Arabidopsis thaliana]
  misc_feature (44)..(128): Homolog of NCBI NO: 6691127 NR Description: DnaJ-like protein [Arabidopsis thaliana]
  misc_feature (10)..(159): Homolog of NCBI NO: 15227919 NR Description: J11 protein, putative [Arabidopsis thaliana]
  misc_feature (5)..(159): Homolog of NCBI NO: 15233446 NR Description: DnaJ protein family [Arabidopsis thaliana]
  misc_feature (5)..(159): Homolog of NCBI NO: 9843641 NR Description: J11 protein [Arabidopsis thaliana]
  misc_feature (12)..(159): Homolog of NCBI NO: 7488763 NR Description: DnaJ protein homolog - kidney bean (fragment)
  misc_feature (1)..(159): Homolog of NCBI NO: 15231204 NR Description: DnaJ protein family [Arabidopsis thaliana]
MSGILVNSAANSLRFSPGASLPHPKPTRSHNGSARFPTGANSFRASAQTLNAEPTVTESVRRRASSLYDLLKVNETASLPEIKTAYRSLAKVYHPDASESDGRDFMEIHKAYATLADPTTRAIYDSTLGARRRRVQVGAMGRAGRVYSTTRRWETDQCW

SEQ ID NO: 110056 - DNA, 870 bp, Zea mays subsp. mays
  misc_feature (1)..(870): Ceres Seq. ID no. 15179249
agagataaaaaaagtaagtaatttaataattaattaccgcatttaagaaaatctcacattcacatataaagatgacaaggaccattacgctcctatctctcgccgtcaccgtcttggccattaccgctgtcttcgccgctgatcctccaacaccagccggagcgcctaaagccaacgccaacaaaagctcacccactcctcccgccgccgcagcatcccccaaacaacccgccgcagcatcccccaaacaacccgccgcaggatcaccaaaaccaaccaccgcaggatcccccaaacaacccgccgcagcatccccaaaatccaccgcttccgccccaacctcgccgcctacggcttctgctcccaccaccaccaagaagaactcctccgccactccaagcgcttccccatcttcaggtggtggcgcccccacaaacgctccaaaatcttcgtcagccaaaactccggctccaagccccgactcaagcaccggaggtcctaccagctcatccgaaggtcctacaagctcatcggaaggtcctacaagctcgtccgaaggccctacaagctcgtctgaaggccctacaagctcgtctgaaggtcctactagctcgtccgactcaccatccgcatcttctccgccgtctccgacaccagacatgtctccgtcgtcgtcccctgatgaaggacccaccagtgaaggccccgaagcttcagccccgacgggaagagcctcgtcgcttgagatctctatctctggatctgttctcatcgcagctgcatggttcttcttcatatgatgaaatgttactcttgtgtttcttattacacttaaaaaggctcgtttcatttaatattttttgattcctt

SEQ ID NO: 110057 - protein, 242 aa, Zea mays subsp. mays
  misc_feature (1)..(242): Ceres Seq. ID no. 15179250
  misc_feature (14)..(217): Pfam Name: Glycoprotein GG/GX Pfam Description: Glycoprotein GG/GX
  misc_feature (34)..(231): Homolog of NCBI NO: 11359723 NR Description: proteophosphoglycan, membrane-associated
  misc_feature (25)..(231): Homolog of NCBI NO: 11359723 NR Description: proteophosphoglycan, membrane-associated
  misc_feature (22)..(237): Homolog of NCBI NO: 5420387 NR Description: proteophosphoglycan [Leishmania major]
  misc_feature (37)..(223): Homolog of NCBI NO: 32699068 NR Description: hypothetical protein FLJ35107 [Homo sapiens]
  misc_feature (22)..(231): Homolog of NCBI NO: 13592175 NR Description: ppg3 [Leishmania major]
  misc_feature (16)..(237): Homolog of NCBI NO: 13592175 NR Description: ppg3 [Leishmania major]
  misc_feature (28)..(237): Homolog of NCBI NO: 5420387 NR Description: proteophosphoglycan [Leishmania major]
  misc_feature (16)..(237): Homolog of NCBI NO: 13592175 NR Description: ppg3 [Leishmania major]
  misc_feature (16)..(231): Homolog of NCBI NO: 13592175 NR Description: ppg3 [Leishmania major]
  misc_feature (16)..(237): Homolog of NCBI NO: 13592175 NR Description: ppg3 [Leishmania major]
MTRTITLLSLAVTVLAITAVFAADPPTPAGAPKANANKSSPTPPAAAASPKQPAAASPKQPAAGSPKPTTAGSPKQPAAASPKSTASAPTSPPTASAPTTTKKNSSATPSASPSSGGGAPTNAPKSSSAKTPAPSPDSSTGGPTSSSEGPTSSSEGPTSSSEGPTSSSEGPTSSSEGPTSSSDSPSASSPPSPTPDMSPSSSPDEGPTSEGPEASAPTGRASSLEISISGSVLIAAAWFFFI

SEQ ID NO: 110058 - DNA, 973 bp, Zea mays subsp. mays
  misc_feature (1)..(973): Ceres Seq. ID no. 15179159
gtattatacagatcaaatggcgtcgagcgatgagcttccgggaccgtatcctgcacgtgatggaggagacatacctccgggagatccgactacgatgaagacgatgatgattgacaaaggagctgcgatgcttcaatctttcaaaccaatcaagcagatgagtcttcatatgtgttcctttgcttgttacggtcacgatcctagccgtcaaatcgaagtccatttctatgttcatcgtgtcaacgaagactttctccagtgtgctgtttacgactgcgactccgctaagacccacctcatcgggatcgagtatattgtgtccgagaggttatttgagagcctttcctcggaagagcagaagctttggcattctcatgactatgagatccaaacaggtcttctaatgactccaagggtccctgagcttgtagctaagccagaacttcaaaatattgccaaaacttatggaaagttttggtgcacttggcagaccgaccgtggggataaattgccactaggtgcgccagcactaatgatgtcaccacaagacgtgaacatagggaagattaagccagggctactgaagaaacgagacgacgaatatggtatctcgacggaatcattgaagacatctcgagctgagattgtaggattggagaggaagaacccgatggctgattactgggttcatcatgggaaagggtttgctgtcgatataatcgagacggatatgaagaagtgtgctccgttcccgtaatataagttggtgttcaacgaacaataacatataatattcgtatgtactaaatgtggaccgttaagtatataatgtaagttataaataatgatgtgtaatgctacgggcattactacatcattgaggaggctgtttgtttgtttgttttcttcgtgtcattttctttcgtctgagaaactataagctgcgtacgtatataaaataccggtttggcat

SEQ ID NO: 110059 - protein, 251 aa, Zea mays subsp. mays
  misc_feature (1)..(251): Ceres Seq. ID no. 15179160
  misc_feature (2)..(228): Homolog of NCBI NO: 32413853 NR Description: hypothetical protein [Neurospora crassa]
  misc_feature (6)..(251): Homolog of NCBI NO: 34910820 NR Description: P0456A01.15 [Oryza sativa (japonica
  misc_feature (18)..(251): Homolog of NCBI NO: 15220516 NR Description: expressed protein [Arabidopsis thaliana]
  misc_feature (6)..(251): Homolog of NCBI NO: 34909516 NR Description: P0481E12.28 [Oryza sativa (japonica
  misc_feature (6)..(251): Homolog of NCBI NO: 7452426 NR Description: hypothetical protein F13C5.90 - Arabidopsis
  misc_feature (6)..(251): Homolog of NCBI NO: 21617913 NR Description: unknown [Arabidopsis thaliana]
  misc_feature (6)..(251): Homolog of NCBI NO: 18415199 NR Description: expressed protein [Arabidopsis thaliana]
  misc_feature (6)..(251): Homolog of NCBI NO: 9758672 NR Description: gene_id:MRA19.8~pir||T05029~strong similarity to
  misc_feature (6)..(251): Homolog of NCBI NO: 15242474 NR Description: expressed protein [Arabidopsis thaliana]
YYTDQMASSDELPGPYPARDGGDIPPGDPTTMKTMMIDKGAAMLQSFKPIKQMSLHMCSFACYGHDPSRQIEVHFYVHRVNEDFLQCAVYDCDSAKTHLIGIEYIVSERLFESLSSEEQKLWHSHDYEIQTGLLMTPRVPELVAKPELQNIAKTYGKFWCTWQTDRGDKLPLGAPALMMSPQDVNIGKIKPGLLKKRDDEYGISTESLKTSRAEIVGLERKNPMADYWVHHGKGFAVDIIETDMKKCAPFP

SEQ ID NO: 110060 - protein, 246 aa, Zea mays subsp. mays
  misc_feature (1)..(246): Ceres Seq. ID no. 15179161
  misc_feature (1)..(223): Homolog of NCBI NO: 32413853 NR Description: hypothetical protein [Neurospora crassa]
  misc_feature (1)..(246): Homolog of NCBI NO: 34910820 NR Description: P0456A01.15 [Oryza sativa (japonica
  misc_feature (13)..(246): Homolog of NCBI NO: 15220516 NR Description: expressed protein [Arabidopsis thaliana]
  misc_feature (1)..(246): Homolog of NCBI NO: 34909516 NR Description: P0481E12.28 [Oryza sativa (japonica
  misc_feature (1)..(246): Homolog of NCBI NO: 7452426 NR Description: hypothetical protein F13C5.90 - Arabidopsis
  misc_feature (1)..(246): Homolog of NCBI NO: 21617913 NR Description: unknown [Arabidopsis thaliana]
  misc_feature (1)..(246): Homolog of NCBI NO: 18415199 NR Description: expressed protein [Arabidopsis thaliana]
  misc_feature (1)..(246): Homolog of NCBI NO: 9758672 NR Description: gene_id:MRA19.8~pir||T05029~strong similarity to
  misc_feature (1)..(246): Homolog of NCBI NO: 15242474 NR Description: expressed protein [Arabidopsis thaliana]
MASSDELPGPYPARDGGDIPPGDPTTMKTMMIDKGAAMLQSFKPIKQMSLHMCSFACYGHDPSRQIEVHFYVHRVNEDFLQCAVYDCDSAKTHLIGIEYIVSERLFESLSSEEQKLWHSHDYEIQTGLLMTPRVPELVAKPELQNIAKTYGKFWCTWQTDRGDKLPLGAPALMMSPQDVNIGKIKPGLLKKRDDEYGISTESLKTSRAEIVGLERKNPMADYWVHHGKGFAVDIIETDMKKCAPFP

SEQ ID NO: 110061 - protein, 220 aa, Zea mays subsp. mays
  misc_feature (1)..(220): Ceres Seq. ID no. 15179162
  misc_feature (1)..(197): Homolog of NCBI NO: 32413853 NR Description: hypothetical protein [Neurospora crassa]
  misc_feature (1)..(220): Homolog of NCBI NO: 34910820 NR Description: P0456A01.15 [Oryza sativa (japonica
  misc_feature (1)..(220): Homolog of NCBI NO: 15220516 NR Description: expressed protein [Arabidopsis thaliana]
  misc_feature (1)..(220): Homolog of NCBI NO: 34909516 NR Description: P0481E12.28 [Oryza sativa (japonica
  misc_feature (1)..(220): Homolog of NCBI NO: 7452426 NR Description: hypothetical protein F13C5.90 - Arabidopsis
  misc_feature (1)..(220): Homolog of NCBI NO: 21617913 NR Description: unknown [Arabidopsis thaliana]
  misc_feature (1)..(220): Homolog of NCBI NO: 18415199 NR Description: expressed protein [Arabidopsis thaliana]
  misc_feature (1)..(220): Homolog of NCBI NO: 9758672 NR Description: gene_id:MRA19.8~pir||T05029~strong similarity to
  misc_feature (1)..(220): Homolog of NCBI NO: 15242474 NR Description: expressed protein [Arabidopsis thaliana]
MKTMMIDKGAAMLQSFKPIKQMSLHMCSFACYGHDPSRQIEVHFYVHRVNEDFLQCAVYDCDSAKTHLIGIEYIVSERLFESLSSEEQKLWHSHDYEIQTGLLMTPRVPELVAKPELQNIAKTYGKFWCTWQTDRGDKLPLGAPALMMSPQDVNIGKIKPGLLKKRDDEYGISTESLKTSRAEIVGLERKNPMADYWVHHGKGFAVDIIETDMKKCAPFP

SEQ ID NO: 110062 - DNA, 1438 bp, Zea mays subsp. mays
  misc_feature (1)..(1438): Ceres Seq. ID no. 15179955
ataagttcactctctcaccatgttcttctgacgatgctctcatcatcatcgtccttgatctattctcatctcattcaccacttcagttgtatttgaatcatctcattcaccacttcagttgtatttgaaagtcagtttcaaactcctgagatctatttgtttccccaagaaaacagcttgttttcaactcccgtcgtgtctgaagcctctagtacttgttctttccttttctgtcagctacagtttccttattgggagtttgtgtcacgactcacgacgaccttatagatcgtttgatcggaacctagaaatatatcaaaatgggtaaaaccgccgggaacagagactgggctcagatctacgctatatacggtattgaacaatggcagacgctcgtcttccttctcttccatgccttcgtcttctccctcctctccgtcctcttcctcatctacttcgaccagatttgcttcttcctcgactccttcttcctctccggcgccgccagactagccgcagggttcaccggcgcagtcaccgctctttccgccgtgtgcctcctcttcgccgccgctaatttcctctactccgacgttccgctccagtacaagatggctcagcgcatggtcagctccgtcggcgactggtcgtgcgtcaaaacggctctcgatctcggctgcggacgcggcattctcctcaatgccgtcgctactcagctcaagaaaaccggtagctccggtcgggtcgtcgggttagaccggtccaaacgcaccactctctcaactctccgcaccgccaaactcgaaggtgtgcaagagtacgtgacttgtcgggaaggagacgtgaggacgttaccgtttggggataactacttcgacgtggtggtctcgtcggtgtttgtgcacactgtggggaaagagcacggtcagaagtcggtggaggctgcggcggagaggatgagggtgttaggggagatagtgagagtagttaagcctggaggcttgtgcgtggtgtgggatctcttacacgtgcctgagtacgtgcggagactccaggagttaaagatggaggatatccgagtctctgagcgagtcacggcgtttatggctgcaagccacatcgtgtcgttccgtaaacctagcgaactcgtcgccggaccacgtgaagtccggctcgattggagatgctgacgtggatttttaaaacggcagtgtcggttggttatattatcaaacggcacgtagtacaagtcgggaggttggaaacgatgattgtgattatactgtattattttagttacgaatattaaaacttagaaatttaaatactggggaggcgaagcggaaccagattagcttgttaatggccgcgttttgatctttgtatttatttatacaaacaatactattaatataatcagatctttattatggtgctg

SEQ ID NO: 110063 - protein, 289 aa, Zea mays subsp. mays
  misc_feature (1)..(289): Ceres Seq. ID no. 15179956
  misc_feature (64)..(273): Homolog of NCBI NO: 22971588 NR Description: hypothetical protein [Chloroflexus aurantiacus]
  misc_feature (1)..(289): Homolog of NCBI NO: 15239632 NR Description: expressed protein [Arabidopsis thaliana]
  misc_feature (1)..(288): Homolog of NCBI NO: 18400797 NR Description: expressed protein [Arabidopsis thaliana]
MGKTAGNRDWAQIYAIYGIEQWQTLVFLLFHAFVFSLLSVLFLIYFDQICFFLDSFFLSGAARLAAGFTGAVTALSAVCLLFAAANFLYSDVPLQYKMAQRMVSSVGDWSCVKTALDLGCGRGILLNAVATQLKKTGSSGRVVGLDRSKRTTLSTLRTAKLEGVQEYVTCREGDVRTLPFGDNYFDVVVSSVFVHTVGKEHGQKSVEAAAERMRVLGEIVRVVKPGGLCVVWDLLHVPEYVRRLQELKMEDIRVSERVTAFMAASHIVSFRKPSELVAGPREVRLDWRC

SEQ ID NO: 110064 - protein, 192 aa, Zea mays subsp. mays
  misc_feature (1)..(192): Ceres Seq. ID no. 15179957
  misc_feature (1)..(176): Homolog of NCBI NO: 22971588 NR Description: hypothetical protein [Chloroflexus aurantiacus]
  misc_feature (1)..(192): Homolog of NCBI NO: 15239632 NR Description: expressed protein [Arabidopsis thaliana]
  misc_feature (1)..(191): Homolog of NCBI NO: 18400797 NR Description: expressed protein [Arabidopsis thaliana]
MAQRMVSSVGDWSCVKTALDLGCGRGILLNAVATQLKKTGSSGRVVGLDRSKRTTLSTLRTAKLEGVQEYVTCREGDVRTLPFGDNYFDVVVSSVFVHTVGKEHGQKSVEAAAERMRVLGEIVRVVKPGGLCVVWDLLHVPEYVRRLQELKMEDIRVSERVTAFMAASHIVSFRKPSELVAGPREVRLDWRC

SEQ ID NO: 110065 - protein, 188 aa, Zea mays subsp. mays
  misc_feature (1)..(188): Ceres Seq. ID no. 15179958
  misc_feature (1)..(172): Homolog of NCBI NO: 22971588 NR Description: hypothetical protein [Chloroflexus aurantiacus]
  misc_feature (1)..(188): Homolog of NCBI NO: 15239632 NR Description: expressed protein [Arabidopsis thaliana]
  misc_feature (1)..(187): Homolog of NCBI NO: 18400797 NR Description: expressed protein [Arabidopsis thaliana]
MVSSVGDWSCVKTALDLGCGRGILLNAVATQLKKTGSSGRVVGLDRSKRTTLSTLRTAKLEGVQEYVTCREGDVRTLPFGDNYFDVVVSSVFVHTVGKEHGQKSVEAAAERMRVLGEIVRVVKPGGLCVVWDLLHVPEYVRRLQELKMEDIRVSERVTAFMAASHIVSFRKPSELVAGPREVRLDWRC

SEQ ID NO: 110066 - DNA, 666 bp, Zea mays subsp. mays
  misc_feature (1)..(666): Ceres Seq. ID no. 15175146
gcatgtgagttgctaattactactctcttcttctattattaactttcttcctcttcttcttcttcgcttccctctccagcatcgccatggcagctgctccgcctcttactctcctcatcgctctctctcttctcttcatttcactccagagatctgaatctctccccgagaatccatccatgattcttctaggcgacggattcgactggccgatctctcacggcgacgcattagacatcgacggaggagaaagctttgaagatgcggaggaggaagatgtcgcggatcgacggtcattgtactggaagaggaggagatactacatctcttacggcgcattgtcggcgaacagagtcccgtgtcctcccagatctggaagatcgtactacactcacaactgcttcagagctagaggtcaggtgcatccctacagtcgaggctgctcctccatcactcggtgccggagatagaagaaaccacgggggcattctcgtaattttccaatcacggactctgtttgtagttctcgttcgatttcgatgtgttgtgtagtaaaccgtgattagttacgtttgtttaaattaattaagcccgcggtattattattattcgagtgatatctatatgtattcaactttgtggtaattgttatttattttgtcggtg

SEQ ID NO: 110067 - protein, 127 aa, Zea mays subsp. mays
  misc_feature (1)..(127): Ceres Seq. ID no. 15175147
  misc_feature (56)..(127): Pfam Name: Rapid ALkalinization Factor (RALF) Pfam Description: Rapid ALkalinization Factor (RALF)
  misc_feature (53)..(126): Homolog of NCBI NO: 34915062 NR Description: P0025H06.15 [Oryza sativa (japonica
  misc_feature (58)..(127): Homolog of NCBI NO: 18414528 NR Description: expressed protein [Arabidopsis thaliana]
  misc_feature (58)..(127): Homolog of NCBI NO: 18397246 NR Description: expressed protein [Arabidopsis thaliana]
  misc_feature (31)..(126): Homolog of NCBI NO: 16566316 NR Description: RALF precursor [Nicotiana tabacum]
  misc_feature (52)..(126): Homolog of NCBI NO: 28628203 NR Description: rapid alkalinization factor 1 precursor
  misc_feature (58)..(126): Homolog of NCBI NO: 28628205 NR Description: rapid alkalinization factor 2 precursor
  misc_feature (46)..(127): Homolog of NCBI NO: 18401177 NR Description: expressed protein [Arabidopsis thaliana]
  misc_feature (3)..(127): Homolog of NCBI NO: 21593826 NR Description: unknown [Arabidopsis thaliana]
  misc_feature (3)..(127): Homolog of NCBI NO: 15240191 NR Description: expressed protein [Arabidopsis thaliana]
MAAAPPLTLLIALSLLFISLQRSESLPENPSMILLGDGFDWPISHGDALDIDGGESFEDAEEEDVADRRSLYWKRRRYYISYGALSANRVPCPPRSGRSYYTHNCFRARGQVHPYSRGCSSITRCRR

SEQ ID NO: 110068 - protein, 96 aa, Zea mays subsp. mays
  misc_feature (1)..(96): Ceres Seq. ID no. 15175148
  misc_feature (25)..(96): Pfam Name: Rapid ALkalinization Factor (RALF) Pfam Description: Rapid ALkalinization Factor (RALF)
  misc_feature (27)..(95): Homolog of NCBI NO: 28628205 NR Description: rapid alkalinization factor 2 precursor
  misc_feature (21)..(95): Homolog of NCBI NO: 28628203 NR Description: rapid alkalinization factor 1 precursor
  misc_feature (22)..(95): Homolog of NCBI NO: 34915062 NR Description: P0025H06.15 [Oryza sativa (japonica
  misc_feature (27)..(96): Homolog of NCBI NO: 18414528 NR Description: expressed protein [Arabidopsis thaliana]
  misc_feature (27)..(96): Homolog of NCBI NO: 18397246 NR Description: expressed protein [Arabidopsis thaliana]
  misc_feature (1)..(95): Homolog of NCBI NO: 16566316 NR Description: RALF precursor [Nicotiana tabacum]
  misc_feature (15)..(96): Homolog of NCBI NO: 18401177 NR Description: expressed protein [Arabidopsis thaliana]
  misc_feature (1)..(96): Homolog of NCBI NO: 21593826 NR Description: unknown [Arabidopsis thaliana]
  misc_feature (1)..(96): Homolog of NCBI NO: 15240191 NR Description: expressed protein [Arabidopsis thaliana]
MILLGDGFDWPISHGDALDIDGGESFEDAEEEDVADRRSLYWKRRRYYISYGALSANRVPCPPRSGRSYYTHNCFRARGQVHPYSRGCSSITRCRR

SEQ ID NO: 110069 - protein, 96 aa, Zea mays subsp. mays
  misc_feature (1)..(96): Ceres Seq. ID no. 15175149
MRRRKMSRIDGHCTGRGGDTTSLTAHCRRTESRVLPDLEDRTTLTTASELEVRCIPTVEAAPPSLGAGDRRNHGGILVIFQSRTLFVVLVRFRCVV

SEQ ID NO: 110070 - DNA, 723 bp, Zea mays subsp. mays
  misc_feature (1)..(723): Ceres Seq. ID no. 15179206
atattcttctccttccgagtggtcgttagatcagatctcttcgtgttttacatttccaatggcgtcctcctgtgttgctaatctttctctgtcaggtgtgtctcaatctcattatgtcaaggcaaatggaatgtctaccgcaaagctcaactcgatttgtaaaacctctgcattgagtatccagaagagatcaaaccggagtcgcaagttttcagtttctgcagagtatgggagtaggagaggaagtggtggtggtgatttcgtagctggttttcttcttggtggtgctttgtttggtgctgcagcctatatctttgctccacaaatacgaagatcgataatgagtgaagaagatgagtatggtttcaagaagccagatcaaccaagttactacgatgaaggtttagagaaaacaagggagaccttgaacgagaaaatcggacagcttaactcagctattgacaatgtctcttcgcgtttaagaggtcgagcaaagaagacttcttccccggtcgaaactgatccagaagttgaagctactacttgagaaagaacacaaaatactttgcttcttctctgtttttttttttttccattcgtaattgatctgttgtgcttcttcttcttatctgttgctgctgtgcttcagttagaactcgtgcaaagtggaaaaatatacagtcttttggttttagtgaattttaatttggtttaactcaattc

SEQ ID NO: 110071 - protein, 181 aa, Zea mays subsp. mays
  misc_feature (1)..(181): Ceres Seq. ID no. 15179207
  misc_feature (22)..(76): Homolog of NCBI NO: 11357804 NR Description: hypothetical protein F5E19_10 - Arabidopsis
  misc_feature (20)..(180): Homolog of NCBI NO: 18400762 NR Description: expressed protein [Arabidopsis thaliana]
  misc_feature (20)..(180): Homolog of NCBI NO: 15233017 NR Description: expressed protein [Arabidopsis thaliana]
  misc_feature (32)..(181): Homolog of NCBI NO: 10176975 NR Description: protein; similar to unknown protein [Arabidopsis
  misc_feature (22)..(181): Homolog of NCBI NO: 17065406 NR Description: Unknown protein [Arabidopsis thaliana]
  misc_feature (22)..(181): Homolog of NCBI NO: 22326856 NR Description: protein; similar to unknown protein
YSSPSEWSLDQISSCFTFPMASSCVANLSLSGVSQSHYVKANGMSTAKLNSICKTSALSIQKRSNRSRKFSVSAEYGSRRGSGGGDFVAGFLLGGALFGAAAYIFAPQIRRSIMSEEDEYGFKKPDQPSYYDEGLEKTRETLNEKIGQLNSAIDNVSSRLRGRAKKTSSPVETDPEVEATT

SEQ ID NO: 110072 - protein, 162 aa, Zea mays subsp. mays
  misc_feature (1)..(162): Ceres Seq. ID no. 15179208
  misc_feature (3)..(57): Homolog of NCBI NO: 11357804 NR Description: hypothetical protein F5E19_10 - Arabidopsis
  misc_feature (1)..(161): Homolog of NCBI NO: 18400762 NR Description: expressed protein [Arabidopsis thaliana]
  misc_feature (1)..(161): Homolog of NCBI NO: 15233017 NR Description: expressed protein [Arabidopsis thaliana]
  misc_feature (13)..(162): Homolog of NCBI NO: 10176975 NR Description: protein; similar to unknown protein [Arabidopsis
  misc_feature (3)..(162): Homolog of NCBI NO: 17065406 NR Description: Unknown protein [Arabidopsis thaliana]
  misc_feature (3)..(162): Homolog of NCBI NO: 22326856 NR Description: protein; similar to unknown protein
MASSCVANLSLSGVSQSHYVKANGMSTAKLNSICKTSALSIQKRSNRSRKFSVSAEYGSRRGSGGGDFVAGFLLGGALFGAAAYIFAPQIRRSIMSEEDEYGFKKPDQPSYYDEGLEKTRETLNEKIGQLNSAIDNVSSRLRGRAKKTSSPVETDPEVEATT

SEQ ID NO: 110073 - protein, 138 aa, Zea mays subsp. mays
  misc_feature (1)..(138): Ceres Seq. ID no. 15179209
  misc_feature (1)..(33): Homolog of NCBI NO: 11357804 NR Description: hypothetical protein F5E19_10 - Arabidopsis
  misc_feature (1)..(137): Homolog of NCBI NO: 18400762 NR Description: expressed protein [Arabidopsis thaliana]
  misc_feature (1)..(137): Homolog of NCBI NO: 15233017 NR Description: expressed protein [Arabidopsis thaliana]
  misc_feature (1)..(138): Homolog of NCBI NO: 10176975 NR Description: protein; similar to unknown protein [Arabidopsis
  misc_feature (1)..(138): Homolog of NCBI NO: 17065406 NR Description: Unknown protein [Arabidopsis thaliana]
  misc_feature (1)..(138): Homolog of NCBI NO: 22326856 NR Description: protein; similar to unknown protein
MSTAKLNSICKTSALSIQKRSNRSRKFSVSAEYGSRRGSGGGDFVAGFLLGGALFGAAAYIFAPQIRRSIMSEEDEYGFKKPDQPSYYDEGLEKTRETLNEKIGQLNSAIDNVSSRLRGRAKKTSSPVETDPEVEATT

SEQ ID NO: 110074 - DNA, 1853 bp, Zea mays subsp. mays
  misc_feature (1)..(1853): Ceres Seq. ID no. 15180063
ctgtggtatccgtatctcccccttttactcatctaggaaatggctctccggcgagtatccgccaccgtaatcctcttcctctacttactattttccgctcactctctcgattccaaacaccacaagatcgaaggaccgatcaagaccatagtcgttgtagtcatggagaatcgctccttcgaccacatcctcggctggctcaaaccaacccgacccgaaatcgacggattaaccgggaaagagtcaaaccccctcaacgcctccgatccaaactccaaaaagatctacgtctcgaacgacgccgttttcgtcgacatggatcctggccattccttccaagccatccgagagcagatattcgggtccaacgacacctccggcgacccgaaaatgaacggattcgcgcaggaggcggagagcatggagccagggatggccaagaacgtgatgtccgggttcaaacccgaggtcctgcccgtttacaccgagctagcaaacgagttcgggatattcgaccggtggttcgcgtcggttccgacttccactcagccaaaccggttctacgtccactcggccacctcccacggatgctccagcaacgtgaagaaggatctcatcagaggcttccctcagaagacgattttcgattctctagaagagacggggctcagcttcgggatctattaccagaacatccccgccaccttcttcttcaagtctctccgcaggcttaaacacttggtgaagtttcacagctacgcgctcaagttcaagctccacgcgaagctcgggaagcttccgaactattcggtgatcgagcagaggtatttcgatattgatctgttcccggcgaatgacgatcacccgtcgcatgacgtggcggcggggcagaagtttgttaaggaagtgtacgagacgttaaggagtagtccgcagtgggatgagatggctttgattattacttatgatgagcacggcgggttttatgatcatgtgcccacgccggttaagggtgtgccgaaccctgatgggattattggaccggatccgttttatttcgggttcgaccggttgggtgttcgggttcctactttcattatctctccttggattgagaagggcactgtgatacatgaacctgatggtcctacaccaacttcacagtatgagcattcttctataccagcaacagtgaagaaactttttaaccttaagtctcatttccttaccaagagagatgcgtgggctggtacatttgagaagtacttccgtgtccgagactctcctcgccaagattgtccagagaaactagcagaagttgaacgatcactaaggccatggggagcaaaagaagactcaaagctttcagagttccaggtggagctgatccagctcgcttctcaactcgttggagaccatctcctaaactcatatccagacattgggaaaaacatgacagtacgtgaaggcaacaaatacgcagaggatgctgttcagaagtttttagaagctggcaaggctgccctggaagcaggagcggacgagagcactatagtcactatgaggccgtctctgacgaccaggaccagtcccagtgaaggtatcaacaagtatactggaagctattgaaaaatctataaataaaggaatgaaatgatatgtaaatacatgtggctacatctatgttcccactttacttagatacgttctatgatgtggaaaaaaggtatatacttatgtatgttatgtaatggatcaaaagacatggtaacgttatgttgctcctgacctccatctccttagtaggaataagatggagagttcttgtaatactaatacatatatacttatcc

SEQ ID NO: 110075 - protein, 529 aa, Zea mays subsp. mays
  misc_feature (1)..(529): Ceres Seq. ID no. 15180064
  misc_feature (34)..(409): Pfam Name: Phosphoesterase family Pfam Description: Phosphoesterase family
  misc_feature (11)..(495): Homolog of NCBI NO: 34894016 NR Description: P0672D08.18 [Oryza sativa (japonica
  misc_feature (33)..(506): Homolog of NCBI NO: 18396577 NR Description: phosphoesterase family [Arabidopsis thaliana]
  misc_feature (33)..(524): Homolog of NCBI NO: 17529016 NR Description: unknown protein [Arabidopsis thaliana]
  misc_feature (33)..(524): Homolog of NCBI NO: 15228577 NR Description: phosphoesterase family [Arabidopsis thaliana]
  misc_feature (12)..(515): Homolog of NCBI NO: 30693062 NR Description: phosphoesterase family [Arabidopsis thaliana]
  misc_feature (33)..(519): Homolog of NCBI NO: 20161866 NR Description: B1139B11.7 [Oryza sativa (japonica
  misc_feature (27)..(515): Homolog of NCBI NO: 15225806 NR Description: phosphoesterase family [Arabidopsis thaliana]
  misc_feature (11)..(523): Homolog of NCBI NO: 34897344 NR Description: putative phospholipase [Oryza sativa]
  misc_feature (1)..(529): Homolog of NCBI NO: 15222342 NR Description: phosphoesterase family [Arabidopsis thaliana]
  misc_feature (1)..(529): Homolog of NCBI NO: 21703147 NR Description: At1g07230/F10K1_4 [Arabidopsis thaliana]
MALRRVSATVILFLYLLFSAHSLDSKHHKIEGPIKTIVVVVMENRSFDHILGWLKPTRPEIDGLTGKESNPLNASDPNSKKIYVSNDAVFVDMDPGHSFQAIREQIFGSNDTSGDPKMNGFAQEAESMEPGMAKNVMSGFKPEVLPVYTELANEFGIFDRWFASVPTSTQPNRFYVHSATSHGCSSNVKKDLIRGFPQKTIFDSLEETGLSFGIYYQNIPATFFFKSLRRLKHLVKFHSYALKFKLHAKLGKLPNYSVIEQRYFDIDLFPANDDHPSHDVAAGQKFVKEVYETLRSSPQWDEMALIITYDEHGGFYDHVPTPVKGVPNPDGIIGPDPFYFGFDRLGVRVPTFIISPWIEKGTVIHEPDGPTPTSQYEHSSIPATVKKLFNLKSHFLTKRDAWAGTFEKYFRVRDSPRQDCPEKLAEVERSLRPWGAKEDSKLSEFQVELIQLASQLVGDHLLNSYPDIGKNMTVREGNKYAEDAVQKFLEAGKAALEAGADESTIVTMRPSLTTRTSPSEGINKYTGSY

SEQ ID NO: 110076 - protein, 488 aa, Zea mays subsp. mays
  misc_feature (1)..(488): Ceres Seq. ID no. 15180065
  misc_feature (1)..(368): Pfam Name: Phosphoesterase family Pfam Description: Phosphoesterase family
  misc_feature (1)..(454): Homolog of NCBI NO: 34894016 NR Description: P0672D08.18 [Oryza sativa (japonica
  misc_feature (1)..(465): Homolog of NCBI NO: 18396577 NR Description: phosphoesterase family [Arabidopsis thaliana]
  misc_feature (1)..(483): Homolog of NCBI NO: 17529016 NR Description: unknown protein [Arabidopsis thaliana]
  misc_feature (1)..(483): Homolog of NCBI NO: 15228577 NR Description: phosphoesterase family [Arabidopsis thaliana]
  misc_feature (1)..(474): Homolog of NCBI NO: 30693062 NR Description: phosphoesterase family [Arabidopsis thaliana]
  misc_feature (1)..(478): Homolog of NCBI NO: 20161866 NR Description: B1139B11.7 [Oryza sativa (japonica
  misc_feature (1)..(474): Homolog of NCBI NO: 15225806 NR Description: phosphoesterase family [Arabidopsis thaliana]
  misc_feature (1)..(482): Homolog of NCBI NO: 34897344 NR Description: putative phospholipase [Oryza sativa]
  misc_feature (1)..(488): Homolog of NCBI NO: 15222342 NR Description: phosphoesterase family [Arabidopsis thaliana]
  misc_feature (1)..(488): Homolog of NCBI NO: 21703147 NR Description: At1g07230/F10K1_4 [Arabidopsis thaliana]
MENRSFDHILGWLKPTRPEIDGLTGKESNPLNASDPNSKKIYVSNDAVFVDMDPGHSFQAIREQIFGSNDTSGDPKMNGFAQEAESMEPGMAKNVMSGFKPEVLPVYTELANEFGIFDRWFASVPTSTQPNRFYVHSATSHGCSSNVKKDLIRGFPQKTIFDSLEETGLSFGIYYQNIPATFFFKSLRRLKHLVKFHSYALKFKLHAKLGKLPNYSVIEQRYFDIDLFPANDDHPSHDVAAGQKFVKEVYETLRSSPQWDEMALIITYDEHGGFYDHVPTPVKGVPNPDGIIGPDPFYFGFDRLGVRVPTFIISPWIEKGTVIHEPDGPTPTSQYEHSSIPATVKKLFNLKSHFLTKRDAWAGTFEKYFRVRDSPRQDCPEKLAEVERSLRPWGAKEDSKLSEFQVELIQLASQLVGDHLLNSYPDIGKNMTVREGNKYAEDAVQKFLEAGKAALEAGADESTIVTMRPSLTTRTSPSEGINKYTGSY

SEQ ID NO: 110077 - protein, 437 aa, Zea mays subsp. mays
  misc_feature (1)..(437): Ceres Seq. ID no. 15180066
  misc_feature (1)..(317): Pfam Name: Phosphoesterase family Pfam Description: Phosphoesterase family
  misc_feature (1)..(403): Homolog of NCBI NO: 34894016 NR Description: P0672D08.18 [Oryza sativa (japonica
  misc_feature (1)..(414): Homolog of NCBI NO: 18396577 NR Description: phosphoesterase family [Arabidopsis thaliana]
  misc_feature (1)..(432): Homolog of NCBI NO: 17529016 NR Description: unknown protein [Arabidopsis thaliana]
  misc_feature (1)..(432): Homolog of NCBI NO: 15228577 NR Description: phosphoesterase family [Arabidopsis thaliana]
  misc_feature (1)..(423): Homolog of NCBI NO: 30693062 NR Description: phosphoesterase family [Arabidopsis thaliana]
  misc_feature (1)..(427): Homolog of NCBI NO: 20161866 NR Description: B1139B11.7 [Oryza sativa (japonica
  misc_feature (1)..(423): Homolog of NCBI NO: 15225806 NR Description: phosphoesterase family [Arabidopsis thaliana]
  misc_feature (1)..(431): Homolog of NCBI NO: 34897344 NR Description: putative phospholipase [Oryza sativa]
  misc_feature (1)..(437): Homolog of NCBI NO: 15222342 NR Description: phosphoesterase family [Arabidopsis thaliana]
  misc_feature (1)..(437): Homolog of NCBI NO: 21703147 NR Description: At1g07230/F10K1_4 [Arabidopsis thaliana]
MDPGHSFQAIREQIFGSNDTSGDPKMNGFAQEAESMEPGMAKNVMSGFKPEVLPVYTELANEFGIFDRWFASVPTSTQPNRFYVHSATSHGCSSNVKKDLIRGFPQKTIFDSLEETGLSFGIYYQNIPATFFFKSLRRLKHLVKFHSYALKFKLHAKLGKLPNYSVIEQRYFDIDLFPANDDHPSHDVAAGQKFVKEVYETLRSSPQWDEMALIITYDEHGGFYDHVPTPVKGVPNPDGIIGPDPFYFGFDRLGVRVPTFIISPWIEKGTVIHEPDGPTPTSQYEHSSIPATVKKLFNLKSHFLTKRDAWAGTFEKYFRVRDSPRQDCPEKLAEVERSLRPWGAKEDSKLSEFQVELIQLASQLVGDHLLNSYPDIGKNMTVREGNKYAEDAVQKFLEAGKAALEAGADESTIVTMRPSLTTRTSPSEGINKYTGSY

SEQ ID NO: 110078 - DNA, 1181 bp, Zea mays subsp. mays
  misc_feature (1)..(1181): Ceres Seq. ID no. 15179157
aaaattaaattaaaaaacaaaaacctctctgttctccccaaaaatggcacacactcaccgtcttgccgtccttctcatcctcctctccgccaccatcggcttctcctccgccgcgttggtcgaagagcagcctctggtgcttaagtaccacaacggcattctcttgaaaggaaacgtcactctcaacctcgtctggtacgggaagttcacctcaatccaacggtcaatcatcgtcgacttcatccgctctctcagctcctccgccgtcccatcaaaaggtccatccgtggcctcgtggtggaagacgacggagaagtacaaaggcggctcgtcgaagatcgtcgtcggtaaacagctcctcctcgagaactaccctctcggaaaatcgttaaagagtccttacctcagagctctctcggggaagctcaacggaggtggtgttcggtcgataaccgtcgttttaacggcgaaggacgtcgccgttgaaggattctgcatgaaccggtgcgggactcacggcgcgaaagcacgttccgttaacagcggagcttacgtctgggtgggaaactctgaaacgcagtgtgctggctactgcgcgtggccgtttcatcagccgatgtacggacctcagtctccgccgttaatcgcgcctaacggcgacgtcggagtcgacggaatgatcataaaccttgcgacgctactggttaacaccgtcacgaatccgtttaaaagcggttactttaacggcgggaatcaagaagccgtctcggtatgtaccgggatgttcgggtccggttcctacccgggttacgcgggtcgggtccttgtagacaagactaccggggcgagttacaacgccttgggactcgccgggaggaaatatcttttgccagcgatgtgggacccgcagacttcgaagtgtaagactttggtttgactttagacggtctagaaggagacacgtggcaagagatcaatggagatggagagttgaagcttatcggagccaaagaaagttgttgtagatatctatcttgtctgattgtacggaggagtttagggagggaagtggatgtgtttcttttgtcgttttgtgtgtcgtgtacattcgatcctggagatatgtgaaggatgggccatatatctaatttaatgccaataaataaaatcgatttgtagct

SEQ ID NO: 110079 - protein, 297 aa, Zea mays subsp. mays
  misc_feature (1)..(297): Ceres Seq. ID no. 15179158
  misc_feature (33)..(297): Pfam Name: Phosphate-induced protein 1 conserved region Pfam Description: Phosphate-induced protein 1 conserved region
  misc_feature (33)..(293): Homolog of NCBI NO: 25408357 NR Description: hypothetical protein At2g35150 [imported] -
  misc_feature (129)..(296): Homolog of NCBI NO: 13194680 NR Description: phosphate-induced protein 1-like protein
  misc_feature (34)..(231): Homolog of NCBI NO: 11762144 NR Description: At1g35140 [Arabidopsis thaliana]
  misc_feature (6)..(297): Homolog of NCBI NO: 21593043 NR Description: putative phi-1-like phosphate-induced protein
  misc_feature (6)..(297): Homolog of NCBI NO: 15236667 NR Description: phi-1 phosphate-induced protein -related
  misc_feature (34)..(296): Homolog of NCBI NO: 15219504 NR Description: phosphate-induced (phi-1) protein -related
  misc_feature (1)..(297): Homolog of NCBI NO: 3759184 NR Description: phi-1 [Nicotiana tabacum]
  misc_feature (8)..(297): Homolog of NCBI NO: 31074969 NR Description: erg-1 [Solanum tuberosum]
  misc_feature (1)..(297): Homolog of NCBI NO: 15242420 NR Description: expressed protein [Arabidopsis thaliana]
  misc_feature (1)..(297): Homolog of NCBI NO: 15237656 NR Description: phi-1-related protein [Arabidopsis thaliana]
MAHTHRLAVLLILLSATIGFSSAALVEEQPLVLKYHNGILLKGNVTLNLVWYGKFTSIQRSIIVDFIRSLSSSAVPSKGPSVASWWKTTEKYKGGSSKIVVGKQLLLENYPLGKSLKSPYLRALSGKLNGGGVRSITVVLTAKDVAVEGFCMNRCGTHGAKARSVNSGAYVWVGNSETQCAGYCAWPFHQPMYGPQSPPLIAPNGDVGVDGMIINLATLLVNTVTNPFKSGYFNGGNQEAVSVCTGMFGSGSYPGYAGRVLVDKTTGASYNALGLAGRKYLLPAMWDPQTSKCKTLV

SEQ ID NO: 110080 - DNA, 660 bp, Zea mays subsp. mays
  misc_feature (1)..(660): Ceres Seq. ID no. 15173998
attctcctctgcctctttcctcccggctcgcaaaaccctagtttcgaatctttaaccacaacagaaatggctttctgcaaaagtctcggtggtctactcagacaaggtgtggtttctcagaccggaaatattccggttacgtctgtgctcggttctctccggtacatgtctaccaagcttttcgttggaggtctgtcatggggaactgatgaccagtccttgagggaggcttttgcaaactttggtgaagtggtcgatgctaaagtcattgttgatagagaaacaggaaggtcaagaggttttggatttgtcaactttactgatgagaccgctgctaatactgccatttcagagatggatggaaaggatctgaatggacggagcattcgggtgaatgttgctaacgaaagaccaagtactccccggtatggcggaggtggtggctacggtggtggtggtggctacggtggtggtggctacggtggaggtagctatggagcaggtggtggtgatggtggcggttactaaacagagaagagtttcttgtgaaaagatttgatggtttttgtttagttgggtttctttgattgaatcttgtgttacaacttgaacctcgttagccattcatcgttttttcgattaacgtcttggattgatggt

SEQ ID NO: 110081 - protein, 175 aa, Zea mays subsp. mays
  misc_feature (1)..(175): Ceres Seq. ID no. 15173999
  misc_feature (60)..(131): Pfam Name: RNA recognition motif. (a.k.a. RRM, RBD, or RNP domain) Pfam Description: RNA recognition motif. (a.k.a. RRM, RBD, or RNP
  misc_feature (23)..(160): Homolog of NCBI NO: 21553972 NR Description: glycine-rich RNA binding protein, putative
  misc_feature (23)..(160): Homolog of NCBI NO: 15229525 NR Description: RNA-binding protein, putative [Arabidopsis
  misc_feature (43)..(174): Homolog of NCBI NO: 322514 NR Description: glycine-rich RNA-binding protein (clone A81) -
  misc_feature (23)..(172): Homolog of NCBI NO: 1084415 NR Description: RNA-binding protein - wood tobacco
  misc_feature (23)..(161): Homolog of NCBI NO: 7439995 NR Description: RNA binding protein 3 - wood tobacco
  misc_feature (23)..(170): Homolog of NCBI NO: 7439994 NR Description: glycine-rich RNA-binding protein - garden pea
  misc_feature (23)..(174): Homolog of NCBI NO: 15239505 NR Description: RNA-binding protein, putative [Arabidopsis
  misc_feature (23)..(174): Homolog of NCBI NO: 30682622 NR Description: glycine-rich RNA-binding protein (AtGRP2)
  misc_feature (23)..(175): Homolog of NCBI NO: 2826811 NR Description: AtGRP2 [Arabidopsis thaliana]
  misc_feature (23)..(174): Homolog of NCBI NO: 15236359 NR Description: glycine-rich RNA-binding protein (AtGRP2)
ILLCLFPPGSQNPSFESLTTTEMAFCKSLGGLLRQGVVSQTGNIPVTSVLGSLRYMSTKLFVGGLSWGTDDQSLREAFANFGEVVDAKVIVDRETGRSRGFGFVNFTDETAANTAISEMDGKDLNGRSIRVNVANERPSTPRYGGGGGYGGGGGYGGGGYGGGSYGAGGGDGGGY

SEQ ID NO: 110082 - protein, 153 aa, Zea mays subsp. mays
  misc_feature (1)..(153): Ceres Seq. ID no. 15174000
  misc_feature (38)..(109): Pfam Name: RNA recognition motif. (a.k.a. RRM, RBD, or RNP domain) Pfam Description: RNA recognition motif. (a.k.a. RRM, RBD, or RNP
  misc_feature (1)..(150): Homolog of NCBI NO: 1084415 NR Description: RNA-binding protein - wood tobacco
  misc_feature (1)..(152): Homolog of NCBI NO: 15239505 NR Description: RNA-binding protein, putative [Arabidopsis
  misc_feature (1)..(139): Homolog of NCBI NO: 7439995 NR Description: RNA binding protein 3 - wood tobacco
  misc_feature (1)..(148): Homolog of NCBI NO: 7439994 NR Description: glycine-rich RNA-binding protein - garden pea
  misc_feature (1)..(138): Homolog of NCBI NO: 21553972 NR Description: glycine-rich RNA binding protein, putative
  misc_feature (1)..(138): Homolog of NCBI NO: 15229525 NR Description: RNA-binding protein, putative [Arabidopsis
  misc_feature (21)..(152): Homolog of NCBI NO: 322514 NR Description: glycine-rich RNA-binding protein (clone A81) -
  misc_feature (1)..(152): Homolog of NCBI NO: 30682622 NR Description: glycine-rich RNA-binding protein (AtGRP2)
  misc_feature (1)..(153): Homolog of NCBI NO: 2826811 NR Description: AtGRP2 [Arabidopsis thaliana]
  misc_feature (1)..(152): Homolog of NCBI NO: 15236359 NR Description: glycine-rich RNA-binding protein (AtGRP2)
MAFCKSLGGLLRQGVVSQTGNIPVTSVLGSLRYMSTKLFVGGLSWGTDDQSLREAFANFGEVVDAKVIVDRETGRSRGFGFVNFTDETAANTAISEMDGKDLNGRSIRVNVANERPSTPRYGGGGGYGGGGGYGGGGYGGGSYGAGGGDGGGY

SEQ ID NO: 110083 - protein, 120 aa, Zea mays subsp. mays
  misc_feature (1)..(120): Ceres Seq. ID no. 15174001
  misc_feature (5)..(76): Pfam Name: RNA recognition motif. (a.k.a. RRM, RBD, or RNP domain) Pfam Description: RNA recognition motif. (a.k.a. RRM, RBD, or RNP
  misc_feature (1)..(117): Homolog of NCBI NO: 1084415 NR Description: RNA-binding protein - wood tobacco
  misc_feature (1)..(119): Homolog of NCBI NO: 15239505 NR Description: RNA-binding protein, putative [Arabidopsis
  misc_feature (1)..(106): Homolog of NCBI NO: 7439995 NR Description: RNA binding protein 3 - wood tobacco
  misc_feature (1)..(115): Homolog of NCBI NO: 7439994 NR Description: glycine-rich RNA-binding protein - garden pea
  misc_feature (1)..(105): Homolog of NCBI NO: 21553972 NR Description: glycine-rich RNA binding protein, putative
  misc_feature (1)..(105): Homolog of NCBI NO: 15229525 NR Description: RNA-binding protein, putative [Arabidopsis
  misc_feature (1)..(119): Homolog of NCBI NO: 322514 NR Description: glycine-rich RNA-binding protein (clone A81) -
  misc_feature (1)..(119): Homolog of NCBI NO: 30682622 NR Description: glycine-rich RNA-binding protein (AtGRP2)
  misc_feature (1)..(120): Homolog of NCBI NO: 2826811 NR Description: AtGRP2 [Arabidopsis thaliana]
  misc_feature (1)..(119): Homolog of NCBI NO: 15236359 NR Description: glycine-rich RNA-binding protein (AtGRP2)
MSTKLFVGGLSWGTDDQSLREAFANFGEVVDAKVIVDRETGRSRGFGFVNFTDETAANTAISEMDGKDLNGRSIRVNVANERPSTPRYGGGGGYGGGGGYGGGGYGGGSYGAGGGDGGGY

SEQ ID NO: 110084 - DNA, 889 bp, Zea mays subsp. mays
  misc_feature (1)..(889): Ceres Seq. ID no. 15179044
aacagtgtcagagccgaaacaaacgtagcaaaaaaaaaaaacatagaaaatgtctgtcttcttacgcggaggaatcgccggaggatttcatctccgtagtcgtgactcctcagccgtcatcacgaaacgacgaatctcatccgttggagccgtaacaggacgaagcgtcaatccagcatcagccattgaacaacgtgccacatggttacctggtctcgaacctcctccctacctcgacggaaagttagctggagattacgggtttgacccgctcggtttaggagaggatccgaaaagtttgaaatggtatgttcaagcagagcttgtccacgctcgtttcgccatgctcggtgttgccggaatactcttcaccgacctacttcgtaccacagggattagcaacttgcctgtttggtacgaagccggagcaacgaaatttgattttgccagcacaaagactctcattgttgtacagtttctactcatggggtttgctgagaccaaaaggtatatggacttcgtctcaccaggatctcaagccgcagaaggaacattctttggacttgaagcagcactcgaagggctcgagcccggatatcctggagggccgctcttgaatccgctaggccttgctaaggatatcaagagcgctcacgactggaagcttaaggagatcaagaatggtcgtctagcgatgatggcgatgctagggttcttcgttcaagcctcagtgactcacactggtcctatcgataacctcgtcgagcatctctctaatccatggcataagaccatcattcaaaccctcttcacctctgcttcttagttttacatttcacatagcaaattcaatatactgctggagaagtgtatcaattacctttgtttc

SEQ ID NO: 110085 - protein, 258 aa, Zea mays subsp. mays
  misc_feature (1)..(258): Ceres Seq. ID no. 15179045
  misc_feature (58)..(227): Pfam Name: Chlorophyll A-B binding protein Pfam Description: Chlorophyll A-B binding protein
  misc_feature (36)..(253): Homolog of NCBI NO: 100196 NR Description: chlorophyll a/b-binding protein (cab-11) - tomato
  misc_feature (21)..(253): Homolog of NCBI NO: 322393 NR Description: chlorophyll a/b-binding protein type 4,
  misc_feature (22)..(246): Homolog of NCBI NO: 5902596 NR Description: light harvesting complex a protein [Volvox
  misc_feature (21)..(253): Homolog of NCBI NO: 322392 NR Description: chlorophyll a/b-binding protein type 4,
  misc_feature (24)..(246): Homolog of NCBI NO: 40714515 NR Description: light-harvesting chlorophyll-a/b protein of
  misc_feature (22)..(246): Homolog of NCBI NO: 27542569 NR Description: light-harvesting complex I protein [Chlamydomonas
  misc_feature (22)..(246): Homolog of NCBI NO: 40714521 NR Description: light-harvesting chlorophyll-a/b protein of
  misc_feature (1)..(258): Homolog of NCBI NO: 25299023 NR Description: chlorophyll a/b-binding protein Lhca5,
  misc_feature (1)..(258): Homolog of NCBI NO: 21593722 NR Description: light-harvesting complex protein [Arabidopsis
  misc_feature (1)..(258): Homolog of NCBI NO: 15220077 NR Description: light-harvesting chlorophyll a/b binding protein
MSVFLRGGIAGGFHLRSRDSSAVITKRRISSVGAVTGRSVNPASAIEQRATWLPGLEPPPYLDGKLAGDYGFDPLGLGEDPKSLKWYVQAELVHARFAMLGVAGILFTDLLRTTGISNLPVWYEAGATKFDFASTKTLIVVQFLLMGFAETKRYMDFVSPGSQAAEGTFFGLEAALEGLEPGYPGGPLLNPLGLAKDIKSAHDWKLKEIKNGRLAMMAMLGFFVQASVTHTGPIDNLVEHLSNPWHKTIIQTLFTSAS

SEQ ID NO: 110086 - protein, 160 aa, Zea mays subsp. mays
  misc_feature (1)..(160): Ceres Seq. ID no. 15179046
  misc_feature (1)..(129): Pfam Name: Chlorophyll A-B binding protein Pfam Description: Chlorophyll A-B binding protein
  misc_feature (1)..(155): Homolog of NCBI NO: 100196 NR Description: chlorophyll a/b-binding protein (cab-11) - tomato
  misc_feature (1)..(155): Homolog of NCBI NO: 322393 NR Description: chlorophyll a/b-binding protein type 4,
  misc_feature (1)..(148): Homolog of NCBI NO: 5902596 NR Description: light harvesting complex a protein [Volvox
  misc_feature (1)..(155): Homolog of NCBI NO: 322392 NR Description: chlorophyll a/b-binding protein type 4,
  misc_feature (1)..(148): Homolog of NCBI NO: 40714515 NR Description: light-harvesting chlorophyll-a/b protein of
  misc_feature (1)..(148): Homolog of NCBI NO: 27542569 NR Description: light-harvesting complex I protein [Chlamydomonas
  misc_feature (1)..(148): Homolog of NCBI NO: 40714521 NR Description: light-harvesting chlorophyll-a/b protein of
  misc_feature (1)..(160): Homolog of NCBI NO: 25299023 NR Description: chlorophyll a/b-binding protein Lhca5,
  misc_feature (1)..(160): Homolog of NCBI NO: 21593722 NR Description: light-harvesting complex protein [Arabidopsis
  misc_feature (1)..(160): Homolog of NCBI NO: 15220077 NR Description: light-harvesting chlorophyll a/b binding protein
MLGVAGILFTDLLRTTGISNLPVWYEAGATKFDFASTKTLIVVQFLLMGFAETKRYMDFVSPGSQAAEGTFFGLEAALEGLEPGYPGGPLLNPLGLAKDIKSAHDWKLKEIKNGRLAMMAMLGFFVQASVTHTGPIDNLVEHLSNPWHKTIIQTLFTSAS

SEQ ID NO: 110087 - DNA, 1001 bp, Zea mays subsp. mays
  misc_feature (1)..(1001): Ceres Seq. ID no. 15179047
acacatcaatctcgaagtgcgttttctcttgaatctgcgttacaaagcaatcaccacctctcagcgacgaagatcagcaacatccatggcggtaagatcagtaaaagttggcaatctctcctcaggagcaaaggagcatgatattaaagagttcttctctttctccggtgaagttgaaagcattgacatccaaagtaacgagcatagtgcttatgtgacattcaaagaccctcaaggagcagagaccgctgtgctcttatcaggtgcaagtattgccgatcagtccgtcgtcattgagatggctcctaactacactccacctgctgcccctcatgctgaaacacagagcggtggcgttgcagaatcagttgtccaaaaggcagaagatgttgtgagcaccatgttagcaaagggtttcatcctcggaaaagacgcggtcggcaaagcaaaagcttttgacgagaaactcggttttacttcaaccgcaaccgcaggcgttgcttccatagaccaaaaaatcggcctgagccaaaaaatcacagctggtacaagcttggtgaccgagaagatcaaaggggtggaccaaagcttccaagtcacagagaggaccaagtctgcctttgcgacagcggaacagacggtgagcagcgcgggaaccgccgtgatgaaaaaccgctttgtgttaacgggtgtgagctgggccgcaggagcgttcaacagagttgctaaagctgctggagaggttggacagaagacaaaggaaaaggttgaagctgagcaaccaccacaaccgtcgcagtcagagcagaaaccaccagaagggtattttccgcttcactgaaaaagctgcgtttttatatttcttttactcgttggtttccttacataaaaaaatgggaatttgtttttttttttttttttttttggatgtaacatagaacctatgtttggatcttctctattactagtttgggttttttttataagatattgtgttcact

SEQ ID NO: 110088 - protein, 279 aa, Zea mays subsp. mays
  misc_feature (1)..(279): Ceres Seq. ID no. 15179048
  misc_feature (34)..(98): Pfam Name: RNA recognition motif. (a.k.a. RRM, RBD, or RNP domain) Pfam Description: RNA recognition motif. (a.k.a. RRM, RBD, or RNP
  misc_feature (26)..(264): Homolog of NCBI NO: 30697598 NR Description: RNA recognition motif (RRM)-containing protein
  misc_feature (70)..(256): Homolog of NCBI NO: 7485085 NR Description: hypothetical protein - Arabidopsis thaliana
  misc_feature (31)..(279): Homolog of NCBI NO: 38344181 NR Description: OSJNBa0053K19.20 [Oryza sativa (japonica
  misc_feature (33)..(272): Homolog of NCBI NO: 38347069 NR Description: OSJNBa0006A01.10 [Oryza sativa (japonica
  misc_feature (33)..(256): Homolog of NCBI NO: 8809670 NR Description: gene_id:MSD23.5~pir||C71447~similar to unknown
  misc_feature (29)..(256): Homolog of NCBI NO: 30695063 NR Description: RNA recognition motif (RRM)-containing protein
  misc_feature (29)..(256): Homolog of NCBI NO: 18414951 NR Description: RNA recognition motif (RRM)-containing protein
  misc_feature (31)..(279): Homolog of NCBI NO: 16648740 NR Description: AT5g16840/F5E19_180 [Arabidopsis thaliana]
  misc_feature (31)..(279): Homolog of NCBI NO: 21592997 NR Description: unknown [Arabidopsis thaliana]
  misc_feature (31)..(279): Homolog of NCBI NO: 15237419 NR Description: RNA recognition motif (RRM)-containing protein
HINLEVRFLLNLRYKAITTSQRRRSATSMAVRSVKVGNLSSGAKEHDIKEFFSFSGEVESIDIQSNEHSAYVTFKDPQGAETAVLLSGASIADQSVVIEMAPNYTPPAAPHAETQSGGVAESVVQKAEDVVSTMLAKGFILGKDAVGKAKAFDEKLGFTSTATAGVASIDQKIGLSQKITAGTSLVTEKIKGVDQSFQVTERTKSAFATAEQTVSSAGTAVMKNRFVLTGVSWAAGAFNRVAKAAGEVGQKTKEKVEAEQPPQPSQSEQKPPEGYFPLH

SEQ ID NO: 110089 - protein, 251 aa, Zea mays subsp. mays
  misc_feature (1)..(251): Ceres Seq. ID no. 15179049
  misc_feature (6)..(70): Pfam Name: RNA recognition motif. (a.k.a. RRM, RBD, or RNP domain) Pfam Description: RNA recognition motif. (a.k.a. RRM, RBD, or RNP
  misc_feature (1)..(236): Homolog of NCBI NO: 30697598 NR Description: RNA recognition motif (RRM)-containing protein
  misc_feature (42)..(228): Homolog of NCBI NO: 7485085 NR Description: hypothetical protein - Arabidopsis thaliana
  misc_feature (3)..(251): Homolog of NCBI NO: 38344181 NR Description: OSJNBa0053K19.20 [Oryza sativa (japonica
  misc_feature (5)..(244): Homolog of NCBI NO: 38347069 NR Description: OSJNBa0006A01.10 [Oryza sativa (japonica
  misc_feature (5)..(228): Homolog of NCBI NO: 8809670 NR Description: gene_id:MSD23.5~pir||C71447~similar to unknown
  misc_feature (1)..(228): Homolog of NCBI NO: 30695063 NR Description: RNA recognition motif (RRM)-containing protein
  misc_feature (1)..(228): Homolog of NCBI NO: 18414951 NR Description: RNA recognition motif (RRM)-containing protein
  misc_feature (3)..(251): Homolog of NCBI NO: 16648740 NR Description: AT5g16840/F5E19_180 [Arabidopsis thaliana]
  misc_feature (3)..(251): Homolog of NCBI NO: 21592997 NR Description: unknown [Arabidopsis thaliana]
  misc_feature (3)..(251): Homolog of NCBI NO: 15237419 NR Description: RNA recognition motif (RRM)-containing protein
MAVRSVKVGNLSSGAKEHDIKEFFSFSGEVESIDIQSNEHSAYVTFKDPQGAETAVLLSGASIADQSVVIEMAPNYTPPAAPHAETQSGGVAESVVQKAEDVVSTMLAKGFILGKDAVGKAKAFDEKLGFTSTATAGVASIDQKIGLSQKITAGTSLVTEKIKGVDQSFQVTERTKSAFATAEQTVSSAGTAVMKNRFVLTGVSWAAGAFNRVAKAAGEVGQKTKEKVEAEQPPQPSQSEQKPPEGYFPLH

SEQ ID NO: 110090 - protein, 180 aa, Zea mays subsp. mays
  misc_feature (1)..(180): Ceres Seq. ID no. 15179050
  misc_feature (1)..(165): Homolog of NCBI NO: 30697598 NR Description: RNA recognition motif (RRM)-containing protein
  misc_feature (1)..(157): Homolog of NCBI NO: 7485085 NR Description: hypothetical protein - Arabidopsis thaliana
  misc_feature (1)..(180): Homolog of NCBI NO: 38344181 NR Description: OSJNBa0053K19.20 [Oryza sativa (japonica
  misc_feature (1)..(173): Homolog of NCBI NO: 38347069 NR Description: OSJNBa0006A01.10 [Oryza sativa (japonica
  misc_feature (1)..(157): Homolog of NCBI NO: 8809670 NR Description: gene_id:MSD23.5~pir||C71447~similar to unknown
  misc_feature (1)..(157): Homolog of NCBI NO: 30695063 NR Description: RNA recognition motif (RRM)-containing protein
  misc_feature (1)..(157): Homolog of NCBI NO: 18414951 NR Description: RNA recognition motif (RRM)-containing protein
  misc_feature (1)..(180): Homolog of NCBI NO: 16648740 NR Description: AT5g16840/F5E19_180 [Arabidopsis thaliana]
  misc_feature (1)..(180): Homolog of NCBI NO: 21592997 NR Description: unknown [Arabidopsis thaliana]
  misc_feature (1)..(180): Homolog of NCBI NO: 15237419 NR Description: RNA recognition motif (RRM)-containing protein
MAPNYTPPAAPHAETQSGGVAESVVQKAEDVVSTMLAKGFILGKDAVGKAKAFDEKLGFTSTATAGVASIDQKIGLSQKITAGTSLVTEKIKGVDQSFQVTERTKSAFATAEQTVSSAGTAVMKNRFVLTGVSWAAGAFNRVAKAAGEVGQKTKEKVEAEQPPQPSQSEQKPPEGYFPLH

SEQ ID NO: 110091 - DNA, 575 bp, Zea mays subsp. mays
  misc_feature (1)..(575): Ceres Seq. ID no. 15173983
atcacaatctcaaacctcaaaccctaaaaaaataaaaaagagctacgtagaaagagacagagagaagaatgggtcgccaaaacgttattgtagtttttggcctcgtgttcttggccgtccttggcctcgccgcagctgcctcctttccgtctccttcagcgtcaccttccaaagctccatctacttccacacctgaggttgaatctccagtgtccgaggacaccattggaaccaccgacgacgatgtagctgcttctcctggtgatgatgacgtagctgtggctggtcctctaggaagtgactcgtcctacggtagcaatggaccttcaggctctgccgattctgctgacagcggcgcggcggctcttggagtttctgcggtcgttgcgggtgttacatccatcgtcggttctttcttgtttttctgaggcgtgtattttcatgagaatatcatttttgagtaaagactatttatatatatggatattgtgatgatcatgttgtaatttgtttctccttggttatgagaaccgatgtccttgaaataagctgaaaataaaactttccttagcaat

SEQ ID NO: 110092 - protein, 119 aa, Zea mays subsp. mays
  misc_feature (1)..(119): Ceres Seq. ID no. 15173984
  misc_feature (1)..(119): Homolog of NCBI NO: 21536506 NR Description: unknown [Arabidopsis thaliana]
  misc_feature (1)..(119): Homolog of NCBI NO: 18404806 NR Description: expressed protein [Arabidopsis thaliana]
  misc_feature (1)..(113): Homolog of NCBI NO: 780177 NR Description: agp1 [Arabidopsis thaliana]
  misc_feature (1)..(109): Homolog of NCBI NO: 15221772 NR Description: agp1 -related [Arabidopsis thaliana]
  misc_feature (1)..(117): Homolog of NCBI NO: 25355278 NR Description: protein F21J9.18 [imported] - Arabidopsis
  misc_feature (1)..(117): Homolog of NCBI NO: 21592730 NR Description: putative agp1 [Arabidopsis thaliana]
  misc_feature (1)..(118): Homolog of NCBI NO: 486757 NR Description: anther-specific protein (clone Bgp1) - field
  misc_feature (1)..(119): Homolog of NCBI NO: 1168619 NR Description: ANTHER-SPECIFIC PROTEIN BCP1
MGRQNVIVVFGLVFLAVLGLAAAASFPSPSASPSKAPSTSTPEVESPVSEDTIGTTDDDVAASPGDDDVAVAGPLGSDSSYGSNGPSGSADSADSGAAALGVSAVVAGVTSIVGSFLFF

SEQ ID NO: 110093 - protein, 64 aa, Zea mays subsp. mays; identical to SEQ ID NO: 61375
  misc_feature (1)..(64): Ceres Seq. ID no. 15173985

SEQ ID NO: 110094 - DNA, 1187 bp, Zea mays subsp. mays
  misc_feature (1)..(1187): Ceres Seq. ID no. 15179072
aaatatataagagattagtgtagcacggttctgccagtgccatccgcgccctcagccgaggatctccattctcctccccacgcagaatccaccgcgaggtctccgccgccctaaccgcgcccttccatccatggttgcagtggtgtcgtgctccccagatctaccacgggcgcgtgcccggatctggcccgacgaacagcggtggagctcgcgcggtgttccattcatggattgggatctcaagatgtcggtctcctaggacctccgcgacttcccccgcgacagcgtcgggcattgccgccgcagctgccgcgccttccctcgcgacggcgccgagccgagcggagtgctccgtcgacctcaagctcggcaggacgacaccaccacgaaggagccggtggctgcaaccgcagcgccgtccgccagcccgatgggcggcgtcgggcattgccgccgcagctgccgagccttcccccgcgacggtgctgagccgggcggagtgctccgtcgacctcaagctcggcgggctaggcccaggagcagcccccggccccggggacctgcgacctgtacaagggccgctgggtgtacgacgagtcccgcgcgccgctgtacaaggagtccgactgcagcttcctcacggagcaggtcacctgtatgcgcaacggccgacgcgacgacgactaccagaagtggcgctggcagcccgacggctgcgatctccccagttcggctgcttcaaggtgctcggaaaggggatgctgttgtccaaccccatcattgttagggccaagctcatctccaagatcatcgagaagaggatcaatgttactggaggcactgtcttgctgaccgccacatagggcactgaaagagtcattcctagagactctacggaaggacacaacggagatggagcagcctgcttgagaagaggcggcggaggagaaggaagcgctcaacctagactcgtggtcgtcgaccagcatgcgccttgacgtcctcttttttgattcatttatttgattttttgaacaaaattgcccttgtctttgtccttcctcccttttttcattttcttaatgccctcatgtaaaatataaggcatgtgttgttcaaatctttcttttaaaactacatgtatttcgtgtgttctatgatgatatatacagaaactggtcttcttg

SEQ ID NO: 110095 - protein, 118 aa, Zea mays subsp. mays
  misc_feature (1)..(118): Ceres Seq. ID no. 15179073
MGGVGHCRRSCRAFPRDGAEPGGVLRRPQARRARPRSSPRPRGPATCTRAAGCTTSPARRCTRSPTAASSRSRSPVCATADATTTTRSGAGSPTAAISPVRLLQGARKGDAVVQPHHC

SEQ ID NO: 110096 - protein, 64 aa, Zea mays subsp. mays
  misc_feature (1)..(64): Ceres Seq. ID no. 15179074
  misc_feature (1)..(23): Homolog of NCBI NO: 18405283 NR Description: expressed protein [Arabidopsis thaliana]
  misc_feature (1)..(23): Homolog of NCBI NO: 25366731 NR Description: hypothetical protein At2g40150 [imported] -
  misc_feature (1)..(33): Homolog of NCBI NO: 26452343 NR Description: unknown protein [Arabidopsis thaliana]
  misc_feature (1)..(33): Homolog of NCBI NO: 15228789 NR Description: expressed protein [Arabidopsis thaliana]
  misc_feature (1)..(29): Homolog of NCBI NO: 28876029 NR Description: hypothetical protein [Oryza sativa (japonica
  misc_feature (1)..(33): Homolog of NCBI NO: 34907966 NR Description: P0446G04.14 [Oryza sativa (japonica
  misc_feature (1)..(33): Homolog of NCBI NO: 34898234 NR Description: P0034A04.28 [Oryza sativa (japonica
  misc_feature (1)..(23): Homolog of NCBI NO: 30350857 NR Description: hypothetical protein At2g30900 [Arabidopsis
  misc_feature (1)..(23): Homolog of NCBI NO: 18405285 NR Description: expressed protein [Arabidopsis thaliana]
  misc_feature (1)..(28): Homolog of NCBI NO: 15228429 NR Description: expressed protein [Arabidopsis thaliana]
MRNGRRDDDYQKWRWQPDGCDLPSSAASRCSERGCCCPTPSLLGPSSSPRSSRRGSMLLEALSC

SEQ ID NO: 110097 - DNA, 1001 bp, Zea mays subsp. mays
  misc_feature (1)..(1001): Ceres Seq. ID no. 15177514
attcatccgatccctcgcttcgcttgctcatcgtttgccgtttcagaatcgaggggaatgaaccaaatcgagaacatggcgacgcagaaagctattgtgctatggaacatcagcagctgcccgattccagatggtcatgatcctcttatggtggttcagagaatacaagcggcggtggagaagtccggctacgtccgccgcaacggtgagatctcgatcactgccattggcgacaaactaacagaggtccctggcgaagacgtcatgaggaggctctcttccatcggaatcgctcttaaaaacggggacgaatatcaaatggatttgtataattgggccgacgagaacgctcctccgggtactatgatgctcatagacggtcatgagcaactgggatggttagcagaaacactttccgagtttgaagatatgggattcagaattcttcttgcatatcctcaccgtgacccagcagccacaccctttccgtgtaaacagtgggattgggctgccttgttctcagatgaacaggagacgacaacaacaagccttgttgttaattccagtgttaaatctccctggttctgtgaagtatgctttgttgctgccccaaaccttgaagatttcaccacccatctcaagtctgtaaaacatgcatatggtgagtgggacaggcacgctagtaaaaacaatgtggatcgtactgaccctgctaacctgccgtttggtctatcaaatgagttggacttgctgcttaatcaagacatggttagacgtcagatgttaacgtcagggcgcaggcgcgggccgctcggccctcttaggcctcgactcacattcaacctaacccattccaagtattgaaggaacatttgaagaagaagctggagtgtgaaggagaagaagcgaggacttttatgtaataaataaaattacttactactgtgttatctattgttaaacatcgcaattcagttttttatatttgccatttccaaagt

SEQ ID NO: 110098 - protein, 287 aa, Zea mays subsp. mays
  misc_feature (1)..(287): Ceres Seq. ID no. 15177515
  misc_feature (24)..(166): Homolog of NCBI NO: 15233032 NR Description: hypothetical protein [Arabidopsis thaliana]
  misc_feature (23)..(206): Homolog of NCBI NO: 18415509 NR Description: expressed protein [Arabidopsis thaliana]
  misc_feature (23)..(206): Homolog of NCBI NO: 15028393 NR Description: unknown protein [Arabidopsis thaliana]
  misc_feature (27)..(176): Homolog of NCBI NO: 33146722 NR Description: unknown protein [Oryza sativa (japonica
  misc_feature (23)..(206): Homolog of NCBI NO: 7459375 NR Description: hypothetical protein F9F13.130 - Arabidopsis
  misc_feature (25)..(176): Homolog of NCBI NO: 9759464 NR Description: emb|CAB71880.1~gene_id:MAF19.18~similar to
  misc_feature (27)..(172): Homolog of NCBI NO: 15229336 NR Description: hypothetical protein [Arabidopsis thaliana]
  misc_feature (27)..(222): Homolog of NCBI NO: 15229336 NR Description: hypothetical protein [Arabidopsis thaliana]
  misc_feature (37)..(282): Homolog of NCBI NO: 15231195 NR Description: hypothetical protein [Arabidopsis thaliana]
  misc_feature (25)..(255): Homolog of NCBI NO: 9294534 NR Description: gb|AAC80583.1~gene_id:MDC11.11~similar to unknown
IHPIPRFACSSFAVSESRGMNQIENMATQKAIVLWNISSCPIPDGHDPLMVVQRIQAAVEKSGYVRRNGEISITAIGDKLTEVPGEDVMRRLSSIGIALKNGDEYQMDLYNWADENAPPGTMMLIDGHEQLGWLAETLSEFEDMGFRILLAYPHRDPAATPFPCKQWDWAALFSDEQETTTTSLVVNSSVKSPWFCEVCFVAAPNLEDFTTHLKSVKHAYGEWDRHASKNNVDRTDPANLPFGLSNELDLLLNQDMVRRQMLTSGRRRGPLGPLRPRLTFNLTHSKY

SEQ ID NO: 110099 - protein, 268 aa, Zea mays subsp. mays
  misc_feature (1)..(268): Ceres Seq. ID no. 15177516
  misc_feature (5)..(147): Homolog of NCBI NO: 15233032 NR Description: hypothetical protein [Arabidopsis thaliana]
  misc_feature (4)..(187): Homolog of NCBI NO: 18415509 NR Description: expressed protein [Arabidopsis thaliana]
  misc_feature (4)..(187): Homolog of NCBI NO: 15028393 NR Description: unknown protein [Arabidopsis thaliana]
  misc_feature (8)..(157): Homolog of NCBI NO: 33146722 NR Description: unknown protein [Oryza sativa (japonica
  misc_feature (4)..(187): Homolog of NCBI NO: 7459375 NR Description: hypothetical protein F9F13.130 - Arabidopsis
  misc_feature (6)..(157): Homolog of NCBI NO: 9759464 NR Description: emb|CAB71880.1~gene_id:MAF19.18~similar to
  misc_feature (8)..(153): Homolog of NCBI NO: 15229336 NR Description: hypothetical protein [Arabidopsis thaliana]
  misc_feature (8)..(203): Homolog of NCBI NO: 15229336 NR Description: hypothetical protein [Arabidopsis thaliana]
  misc_feature (18)..(263): Homolog of NCBI NO: 15231195 NR Description: hypothetical protein [Arabidopsis thaliana]
  misc_feature (6)..(236): Homolog of NCBI NO: 9294534 NR Description: gb|AAC80583.1~gene_id:MDC11.11~similar to unknown
MNQIENMATQKAIVLWNISSCPIPDGHDPLMVVQRIQAAVEKSGYVRRNGEISITAIGDKLTEVPGEDVMRRLSSIGIALKNGDEYQMDLYNWADENAPPGTMMLIDGHEQLGWLAETLSEFEDMGFRILLAYPHRDPAATPFPCKQWDWAALFSDEQETTTTSLVVNSSVKSPWFCEVCFVAAPNLEDFTTHLKSVKHAYGEWDRHASKNNVDRTDPANLPFGLSNELDLLLNQDMVRRQMLTSGRRRGPLGPLRPRLTFNLTHSKY

SEQ ID NO: 110100 - protein, 262 aa, Zea mays subsp. mays
  misc_feature (1)..(262): Ceres Seq. ID no. 15177517
  misc_feature (1)..(141): Homolog of NCBI NO: 15233032 NR Description: hypothetical protein [Arabidopsis thaliana]
  misc_feature (1)..(181): Homolog of NCBI NO: 18415509 NR Description: expressed protein [Arabidopsis thaliana]
  misc_feature (1)..(181): Homolog of NCBI NO: 15028393 NR Description: unknown protein [Arabidopsis thaliana]
  misc_feature (2)..(151): Homolog of NCBI NO: 33146722 NR Description: unknown protein [Oryza sativa (japonica
  misc_feature (1)..(181): Homolog of NCBI NO: 7459375 NR Description: hypothetical protein F9F13.130 - Arabidopsis
  misc_feature (1)..(151): Homolog of NCBI NO: 9759464 NR Description: emb|CAB71880.1~gene_id:MAF19.18~similar to
  misc_feature (2)..(147): Homolog of NCBI NO: 15229336 NR Description: hypothetical protein [Arabidopsis thaliana]
  misc_feature (2)..(197): Homolog of NCBI NO: 15229336 NR Description: hypothetical protein [Arabidopsis thaliana]
  misc_feature (12)..(257): Homolog of NCBI NO: 15231195 NR Description: hypothetical protein [Arabidopsis thaliana]
  misc_feature (1)..(230): Homolog of NCBI NO: 9294534 NR Description: gb|AAC80583.1~gene_id:MDC11.11~similar to unknown
MATQKAIVLWNISSCPIPDGHDPLMVVQRIQAAVEKSGYVRRNGEISITAIGDKLTEVPGEDVMRRLSSIGIALKNGDEYQMDLYNWADENAPPGTMMLIDGHEQLGWLAETLSEFEDMGFRILLAYPHRDPAATPFPCKQWDWAALFSDEQETTTTSLVVNSSVKSPWFCEVCFVAAPNLEDFTTHLKSVKHAYGEWDRHASKNNVDRTDPANLPFGLSNELDLLLNQDMVRRQMLTSGRRRGPLGPLRPRLTFNLTHSKY

SEQ ID NO: 110101 - DNA, 847 bp, Zea mays subsp. mays
  misc_feature (1)..(847): Ceres Seq. ID no. 15174311
aaatcgctctctctctctttctctgcaatggtgtctcttcagcaaactatgctctctctgcagtccaaacttcctccatcatctttccacatcgggggatctcttcctatgcgaaagacagccttaccacttcgaatcagaggcggaaacgcggcgggagcgagaatgtcagccacggcggcgggaagctacgcgatggctctcgcggacgtcgcgaagaggaacgatactctcgaattgacgagcgcagacgtcgagaagctcgagaaggtcttctccgatccgcaggtgctcaacttcttcgcgaatccaaccgtcgagctcgagaagaagcgtctcgtgatcgacgagatcgtgaaatcgtcctctctccagagccacacctccaatttcctcaacatcctggtcgacgcgaatcgtatcaacatagtgaccgacatcgtgaaggagttcgagattgtgtacaacaagataacggacacgcagttggcggaggttagatcggtggtgaagctggagccgccgcagcttgctcagatcgccaaacaggttcagaagctgaccggggcgaagaacgtcagggtgaagacggttcttgatccgagccttgtcgctgggtttacgattaggtacggtgattctgggtcgaagcttattgatatgagtgtgaagaagcagcttgaggatatcgctgctcagctagaactcggcgagattcagttagctgcatgagaaaattgtattattgacaacagcttctttttacttgtgcaagttaattctttctctcttcttttctccatcaatcatctccatataatatacttatataaataattctcgagtt

SEQ ID NO: 110102 - protein, 243 aa, Zea mays subsp. mays
  misc_feature (1)..(243): Ceres Seq. ID no. 15174312
  misc_feature (60)..(234): Pfam Name: ATP synthase delta (OSCP) subunit Pfam Description: ATP synthase delta (OSCP) subunit
  misc_feature (41)..(234): Homolog of NCBI NO: 5902612 NR Description: ATP synthase-delta chain [Volvox carteri f.
  misc_feature (35)..(241): Homolog of NCBI NO: 1168587 NR Description: ATP synthase delta chain, chloroplast precursor
  misc_feature (60)..(241): Homolog of NCBI NO: 1084479 NR Description: H+-transporting two-sector ATPase (EC 3.6.3.14)
  misc_feature (1)..(242): Homolog of NCBI NO: 170098 NR Description: ATP synthase delta subunit precursor
  misc_feature (1)..(242): Homolog of NCBI NO: 114584 NR Description: ATP synthase delta chain, chloroplast precursor
  misc_feature (110)..(243): Homolog of NCBI NO: 1480014 NR Description: putative delta subunit of ATP synthase [Brassica
  misc_feature (35)..(242): Homolog of NCBI NO: 399082 NR Description: ATP synthase delta chain, chloroplast precursor
  misc_feature (10)..(242): Homolog of NCBI NO: 416681 NR Description: ATP synthase delta chain, chloroplast precursor
  misc_feature (10)..(242): Homolog of NCBI NO: 15233985 NR Description: H+-transporting ATP synthase-related protein
  misc_feature (2)..(242): Homolog of NCBI NO: 18491181 NR Description: putative H+-transporting ATP synthase
KSLSLSFSAMVSLQQTMLSLQSKLPPSSFHIGGSLPMRKTALPLRIRGGNAAGARMSATAAGSYAMALADVAKRNDTLELTSADVEKLEKVFSDPQVLNFFANPTVELEKKRLVIDEIVKSSSLQSHTSNFLNILVDANRINIVTDIVKEFEIVYNKITDTQLAEVRSVVKLEPPQLAQIAKQVQKLTGAKNVRVKTVLDPSLVAGFTIRYGDSGSKLIDMSVKKQLEDIAAQLELGEIQLAA

SEQ ID NO: 110103 - protein, 234 aa, Zea mays subsp. mays
  misc_feature (1)..(234): Ceres Seq. ID no. 15174313
  misc_feature (51)..(225): Pfam Name: ATP synthase delta (OSCP) subunit Pfam Description: ATP synthase delta (OSCP) subunit
  misc_feature (32)..(225): Homolog of NCBI NO: 5902612 NR Description: ATP synthase-delta chain [Volvox carteri f.
  misc_feature (26)..(232): Homolog of NCBI NO: 1168587 NR Description: ATP synthase delta chain, chloroplast precursor
  misc_feature (51)..(232): Homolog of NCBI NO: 1084479 NR Description: H+-transporting two-sector ATPase (EC 3.6.3.14)
  misc_feature (1)..(233): Homolog of NCBI NO: 170098 NR Description: ATP synthase delta subunit precursor
  misc_feature (1)..(233): Homolog of NCBI NO: 114584 NR Description: ATP synthase delta chain, chloroplast precursor
  misc_feature (101)..(234): Homolog of NCBI NO: 1480014 NR Description: putative delta subunit of ATP synthase [Brassica
  misc_feature (26)..(233): Homolog of NCBI NO: 399082 NR Description: ATP synthase delta chain, chloroplast precursor
  misc_feature (1)..(233): Homolog of NCBI NO: 416681 NR Description: ATP synthase delta chain, chloroplast precursor
  misc_feature (1)..(233): Homolog of NCBI NO: 15233985 NR Description: H+-transporting ATP synthase-related protein
  misc_feature (1)..(233): Homolog of NCBI NO: 18491181 NR Description: putative H+-transporting ATP synthase
MVSLQQTMLSLQSKLPPSSFHIGGSLPMRKTALPLRIRGGNAAGARMSATAAGSYAMALADVAKRNDTLELTSADVEKLEKVFSDPQVLNFFANPTVELEKKRLVIDEIVKSSSLQSHTSNFLNILVDANRINIVTDIVKEFEIVYNKITDTQLAEVRSVVKLEPPQLAQIAKQVQKLTGAKNVRVKTVLDPSLVAGFTIRYGDSGSKLIDMSVKKQLEDIAAQLELGEIQLAA

SEQ ID NO: 110104 - protein, 227 aa, Zea mays subsp. mays
  misc_feature (1)..(227): Ceres Seq. ID no. 15174314
  misc_feature (44)..(218): Pfam Name: ATP synthase delta (OSCP) subunit Pfam Description: ATP synthase delta (OSCP) subunit
  misc_feature (25)..(218): Homolog of NCBI NO: 5902612 NR Description: ATP synthase-delta chain [Volvox carteri f.
  misc_feature (19)..(225): Homolog of NCBI NO: 1168587 NR Description: ATP synthase delta chain, chloroplast precursor
  misc_feature (44)..(225): Homolog of NCBI NO: 1084479 NR Description: H+-transporting two-sector ATPase (EC 3.6.3.14)
  misc_feature (1)..(226): Homolog of NCBI NO: 170098 NR Description: ATP synthase delta subunit precursor
  misc_feature (1)..(226): Homolog of NCBI NO: 114584 NR Description: ATP synthase delta chain, chloroplast precursor
  misc_feature (94)..(227): Homolog of NCBI NO: 1480014 NR Description: putative delta subunit of ATP synthase [Brassica
  misc_feature (19)..(226): Homolog of NCBI NO: 399082 NR Description: ATP synthase delta chain, chloroplast precursor
  misc_feature (1)..(226): Homolog of NCBI NO: 416681 NR Description: ATP synthase delta chain, chloroplast precursor
  misc_feature (1)..(226): Homolog of NCBI NO: 15233985 NR Description: H+-transporting ATP synthase-related protein
  misc_feature (1)..(226): Homolog of NCBI NO: 18491181 NR Description: putative H+-transporting ATP synthase
MLSLQSKLPPSSFHIGGSLPMRKTALPLRIRGGNAAGARMSATAAGSYAMALADVAKRNDTLELTSADVEKLEKVFSDPQVLNFFANPTVELEKKRLVIDEIVKSSSLQSHTSNFLNILVDANRINIVTDIVKEFEIVYNKITDTQLAEVRSVVKLEPPQLAQIAKQVQKLTGAKNVRVKTVLDPSLVAGFTIRYGDSGSKLIDMSVKKQLEDIAAQLELGEIQLAA

SEQ ID NO: 110105 - DNA, 1161 bp, Zea mays subsp. mays
  misc_feature (1)..(1161): Ceres Seq. ID no. 15178801
acagaaaccgcaagagagcaaaacttaaaagagaagaagaagaagaagcaacgtgaggaggtagccgaagaagaataatcaaaatacactcaaatgcttgcatttgtcatcttattttgagaaaacatataattctccaaccttccggctttcgaaccactattcgtttggttctcgtcgcttggtcaagagaatgaatccgtttaacctagcctccacaatctcacctcctcctgttgctaatcatctctcggcgaagcgaaagagaggccgtccacgtaaagatgcaaccatgactcgacaaaaaagatctccagggagtccaaaggaggatgttaatctggttggtaagacggtgtctggtgtggtcgaaagatcttgcgaggcggggttcatcatcaatgttaaggtgaaagacagtgacacgagactgcgaggttttgtgttctcacgggggaaagtcgttcctgtgactccagaaaacgacgtggctcctcatgtcaaaatgatcgtaagagaagagatcaagaatcagactgaatatcgtgatcaatcttgtcctcctaacgatcagacaatgaaagatgctgtcactgacttggagactgaatgtgctagagctttgattctactgccacatggaataaatggagaggaccccaaggaagttatggaagaaagagaagctgctgctactcgtttggtggaattttctcaaactccagaaacgaccatagtgactcctcaacagaaccttgtcttggcacggaaagagaccaacgagcatcagaattctcctggtgaggctcgtgggtttgatctaatggcggaggaaccggttcatccggtaaaggaagtaccgcaggagcttcagctagaacttgggaacaagacaatatggaggggagacaacaacaaaaatggcaccgcaatggagatagatcctgaaagctctgtgcctaggaatggctttatagagaagttgttaaaaggaaaggaaaaggtcgactgttagtgcagtagtttaaaacctctttctattcggttgttttatatttcagactctccaatatatttctgctctcttttgttttcagtactttgtattttcagacttcagtgtttgtactttgttgtaaaaccatttcttcttctggttat

SEQ ID NO: 110106 - protein, 273 aa, Zea mays subsp. mays
  misc_feature (1)..(273): Ceres Seq. ID no. 15178802
  misc_feature (15)..(108): Homolog of NCBI NO: 9758273 NR Description: gene_id:MBG8.20~pir||T05472~similar to unknown
  misc_feature (15)..(108): Homolog of NCBI NO: 18423689 NR Description: expressed protein [Arabidopsis thaliana]
  misc_feature (16)..(135): Homolog of NCBI NO: 15237296 NR Description: expressed protein [Arabidopsis thaliana]
  misc_feature (125)..(271): Homolog of NCBI NO: 15237296 NR Description: expressed protein [Arabidopsis thaliana]
  misc_feature (1)..(245): Homolog of NCBI NO: 15234633 NR Description: MATE efflux protein family [Arabidopsis thaliana]
MNPFNLASTISPPPVANHLSAKRKRGRPRKDATMTRQKRSPGSPKEDVNLVGKTVSGVVERSCEAGFIINVKVKDSDTRLRGFVFSRGKVVPVTPENDVAPHVKMIVREEIKNQTEYRDQSCPPNDQTMKDAVTDLETECARALILLPHGINGEDPKEVMEEREAAATRLVEFSQTPETTIVTPQQNLVLARKETNEHQNSPGEARGFDLMAEEPVHPVKEVPQELQLELGNKTIWRGDNNKNGTAMEIDPESSVPRNGFIEKLLKGKEKVDC

SEQ ID NO: 110107 - protein, 240 aa, Zea mays subsp. mays
  misc_feature (1)..(240): Ceres Seq. ID no. 15178803
  misc_feature (1)..(75): Homolog of NCBI NO: 9758273 NR Description: gene_id:MBG8.20~pir||T05472~similar to unknown
  misc_feature (1)..(75): Homolog of NCBI NO: 18423689 NR Description: expressed protein [Arabidopsis thaliana]
  misc_feature (1)..(102): Homolog of NCBI NO: 15237296 NR Description: expressed protein [Arabidopsis thaliana]
  misc_feature (92)..(238): Homolog of NCBI NO: 15237296 NR Description: expressed protein [Arabidopsis thaliana]
  misc_feature (1)..(212): Homolog of NCBI NO: 15234633 NR Description: MATE efflux protein family [Arabidopsis thaliana]
MTRQKRSPGSPKEDVNLVGKTVSGVVERSCEAGFIINVKVKDSDTRLRGFVFSRGKVVPVTPENDVAPHVKMIVREEIKNQTEYRDQSCPPNDQTMKDAVTDLETECARALILLPHGINGEDPKEVMEEREAAATRLVEFSQTPETTIVTPQQNLVLARKETNEHQNSPGEARGFDLMAEEPVHPVKEVPQELQLELGNKTIWRGDNNKNGTAMEIDPESSVPRNGFIEKLLKGKEKVDC

SEQ ID NO: 110108 - protein, 169 aa, Zea mays subsp. mays
  misc_feature (1)..(169): Ceres Seq. ID no. 15178804
  misc_feature (1)..(31): Homolog of NCBI NO: 15237296 NR Description: expressed protein [Arabidopsis thaliana]
  misc_feature (21)..(167): Homolog of NCBI NO: 15237296 NR Description: expressed protein [Arabidopsis thaliana]
  misc_feature (1)..(141): Homolog of NCBI NO: 15234633 NR Description: MATE efflux protein family [Arabidopsis thaliana]
MIVREEIKNQTEYRDQSCPPNDQTMKDAVTDLETECARALILLPHGINGEDPKEVMEEREAAATRLVEFSQTPETTIVTPQQNLVLARKETNEHQNSPGEARGFDLMAEEPVHPVKEVPQELQLELGNKTIWRGDNNKNGTAMEIDPESSVPRNGFIEKLLKGKEKVDC

SEQ ID NO: 110109 - DNA, 956 bp, Zea mays subsp. mays
  misc_feature (1)..(956): Ceres Seq. ID no. 15178854
atttatcatcattcatcaaacctcatcattatcaaaatattcaaacctaaccccaaactcaaaccatgtcttcttccaactgtccgtcaccgttacccaccgtcacgaaacttcaagttgattccgttacttttccaccgtccgtcatctcaccggcttcctccaaccctctcttcctcggtggcgcaggtgtgcgaggtttggatatccaaggaaaattcgtgatcttcaccgtcatcggagtttacctagatcctgtctccgtcccgtcactctccgttaagtggaaaggtaaaacgacagaggagttaacggaatccgtccctttcttccgtgaaatcgtcacaggctcgtttgagaaattcatcaaagtgacgatgaagctgccgttaacgggacaacaatattcagagaaagtaacggagaactgtgtggcgatatggaaatcgttagggatttacacagactctgaggctaaagctgtggagagatttttggaagtcttcaaagacgaaacgttccctcctggtgcatccatcctcttcgctctcgcctctaaaggctctcttacggttgcgttttcgaaagatgatagcattcctgaaacgggaaaagcggtgatcgaaaataagttgttggcagaggcagttcttgaatcgatcattggaaagaacggtgtgtctcctggggctaggttgagtgttgccgagagattagctcagctgatgaatagtgacaaggtcgaagaagatgcaacaaagactgatcaagaggaagctaacaatctccccctaggagataaactggccaaagagaactgatggaatgggagttttttcttggttttttagtgctttatgtttctatatctaataacgttctgtttagttcccattgtatgttttaaatctgtttctgttcgtaagacttattaaataatcacatggagttggttc

SEQ ID NO: 110110 - protein, 251 aa, Zea mays subsp. mays; identical to SEQ ID NO: 52020
  misc_feature (1)..(251): Ceres Seq. ID no. 15178855
  misc_feature (11)..(221): Pfam Name: Chalcone-flavanone isomerase Pfam Description: Chalcone-flavanone isomerase
  misc_feature (1)..(251): Homolog of NCBI NO: 320138 NR Description: chalcone isomerase (EC 5.5.1.6) - Arabidopsis
  misc_feature (7)..(251): Homolog of NCBI NO: 18203239 NR Description: Chalcone--flavonone isomerase (Chalcone
  misc_feature (8)..(228): Homolog of NCBI NO: 1705761 NR Description: CHALCONE--FLAVONONE ISOMERASE (CHALCONE
  misc_feature (39)..(209): Homolog of NCBI NO: 28804474 NR Description: chalcone flavanone isomerase [Raphanus sativus]
  misc_feature (1)..(251): Homolog of NCBI NO: 15233190 NR Description: chalcone-flavanone isomerase (chalcone isomerase)
  misc_feature (1)..(251): Homolog of NCBI NO: 8670955 NR Description: chalcone flavanone isomerase [Arabidopsis
  misc_feature (1)..(251): Homolog of NCBI NO: 8670918 NR Description: chalcone flavanone isomerase [Arabidopsis
  misc_feature (12)..(240): Homolog of NCBI NO: 5921722 NR Description: Chalcone--flavonone isomerase (Chalcone
  misc_feature (8)..(227): Homolog of NCBI NO: 4126399 NR Description: chalcone isomerase [Citrus sinensis]
  misc_feature (1)..(251): Homolog of NCBI NO: 5921725 NR Description: CHALCONE--FLAVONONE ISOMERASE (CHALCONE

SEQ ID NO: 110111 - protein, 147 aa, Zea mays subsp. mays; identical to SEQ ID NO: 52021
  misc_feature (1)..(147): Ceres Seq. ID no. 15178856
  misc_feature (1)..(117): Pfam Name: Chalcone-flavanone isomerase Pfam Description: Chalcone-flavanone isomerase
  misc_feature (1)..(123): Homolog of NCBI NO: 4126399 NR Description: chalcone isomerase [Citrus sinensis]
  misc_feature (1)..(124): Homolog of NCBI NO: 1705761 NR Description: CHALCONE--FLAVONONE ISOMERASE (CHALCONE
  misc_feature (1)..(136): Homolog of NCBI NO: 5921722 NR Description: Chalcone--flavonone isomerase (Chalcone
  misc_feature (1)..(105): Homolog of NCBI NO: 28804474 NR Description: chalcone flavanone isomerase [Raphanus sativus]
  misc_feature (1)..(147): Homolog of NCBI NO: 8670918 NR Description: chalcone flavanone isomerase [Arabidopsis
  misc_feature (1)..(147): Homolog of NCBI NO: 15233190 NR Description: chalcone-flavanone isomerase (chalcone isomerase)
  misc_feature (1)..(147): Homolog of NCBI NO: 8670955 NR Description: chalcone flavanone isomerase [Arabidopsis
  misc_feature (1)..(147): Homolog of NCBI NO: 320138 NR Description: chalcone isomerase (EC 5.5.1.6) - Arabidopsis
  misc_feature (1)..(147): Homolog of NCBI NO: 18203239 NR Description: Chalcone--flavonone isomerase (Chalcone
  misc_feature (1)..(147): Homolog of NCBI NO: 5921725 NR Description: CHALCONE--FLAVONONE ISOMERASE (CHALCONE

SEQ ID NO: 110112 - DNA, 1608 bp, Zea mays subsp. mays
  misc_feature (1)..(1608): Ceres Seq. ID no. 15177892
atatcaatagttcagttcgtctttctaaaacaggagaagaaagtgtttggcgatgaaaaagcacgcactttggctactatgcgttctggtgttaccggcgatagcctggggcaggaatcctgagaagaaggcaacgacttcgtccgggaggaaggaagatgacctggtaaccggtttgcctggccaaccaccggttaacttcagacattacgccggctacgtcaatctcgggccacgacagaagcaaaaggcgcttttctactggttcttcgaagcccaacgaaactcctcaggtcgtcctcttgtcctctggctcaacggaggacctggttgttcatcgatagcctatggagctgcacaagagctaggccctttccttgttcgcgccggcggtgacaaccttaccttcaataagttctcttggaacaaagaggccaatatgttgttcttggaagcaccggttggggttgggttctcgtataccaataactcaatggatcttcataagcttggagatcaagttagtgcagaggattctcttgctttcttgatcaactggttcatgaaatttcctgagtaccgatccaacgagttttacatcgccggagagagttacgccggtcactatgttccacaacttgcgaatgccatttacgacaggaacaagaaggttacaagaggctcgcacatcaatcttaagggtttcatgattggtaacgcggtgatcaatgaggaaacagacatggcaggactagtggactacgcatggagccacgctatagtatctgacgagatccacagcaacatccatggcatgtgccgttttgaggaagagcaaaagagcaaccagaccgtagaatgtaacgacaatttcaaagctttcatggaagcttacagcgatatcgatatatacagcatctatacgcccgtttgcctctcctcttcgtcttcttctccaagaaaacctaaactcatcgtgtctcctcgtctcctaacttcacacgacttgtgggatagcttaccggccgggtatgatccatgcactgaaggttatgccgaaaactattttaaccggaaagatgtgcagcttgcacttcatgcgaacgttacaaaccttccttatccgtattctccttgcagtggggtaataaaaagatggaatgatgctcctcccaccgtgattcccatcatccagaagcttttggcaggcggcctccgcatctggatctatagtggagatacggatgggagagttccagtaacatctacacgttatagcataaagaagatgagacctaaggtggtgtcaccgtggaggtcatggttccacaagagtcaagtagctggatgggttgaaacttacgccggaggattaacctttgccaccgtgagaggagccggtcatcaggttccggtctttgctccagcccaatctctttccttattctctcacttcctttcttccacccctttgccttcaaagcgtttctgatcattaccgccaccaaatcatgccaagttgttgttatgttttgaaactgtcgtttggtacacttatgtacccaattgatataatgagtttcaaatgattaataaaatattttaaac

SEQ ID NO: 110113 - protein, 479 aa, Zea mays subsp. mays
  misc_feature (1)..(479): Ceres Seq. ID no. 15177893
  misc_feature (43)..(471): Pfam Name: Serine carboxypeptidase Pfam Description: Serine carboxypeptidase
  misc_feature (1)..(479): Homolog of NCBI NO: 37536528 NR Description: putative serine carboxypeptidase
  misc_feature (27)..(475): Homolog of NCBI NO: 15234795 NR Description: serine carboxypeptidase -related [Arabidopsis
  misc_feature (27)..(475): Homolog of NCBI NO: 13877871 NR Description: putative serine carboxypeptidase II [Arabidopsis
  misc_feature (328)..(478): Homolog of NCBI NO: 11967861 NR Description: putative serine carboxypeptidase [Pisum sativum]
  misc_feature (27)..(311): Homolog of NCBI NO: 11967861 NR Description: putative serine carboxypeptidase [Pisum sativum]
  misc_feature (317)..(478): Homolog of NCBI NO: 15220282 NR Description: serine carboxypeptidase -related [Arabidopsis
  misc_feature (35)..(291): Homolog of NCBI NO: 15220282 NR Description: serine carboxypeptidase -related [Arabidopsis
  misc_feature (37)..(479): Homolog of NCBI NO: 10177810 NR Description: serine carboxypeptidase II-like protein
  misc_feature (27)..(418): Homolog of NCBI NO: 38344436 NR Description: OSJNBa0038O10.8 [Oryza sativa (japonica
  misc_feature (1)..(479): Homolog of NCBI NO: 15241571 NR Description: serine carboxypeptidase II -related [Arabidopsis
MKKHALWLLCVLVLPAIAWGRNPEKKATTSSGRKEDDLVTGLPGQPPVNFRHYAGYVNLGPRQKQKALFYWFFEAQRNSSGRPLVLWLNGGPGCSSIAYGAAQELGPFLVRAGGDNLTFNKFSWNKEANMLFLEAPVGVGFSYTNNSMDLHKLGDQVSAEDSLAFLINWFMKFPEYRSNEFYIAGESYAGHYVPQLANAIYDRNKKVTRGSHINLKGFMIGNAVINEETDMAGLVDYAWSHAIVSDEIHSNIHGMCRFEEEQKSNQTVECNDNFKAFMEAYSDIDIYSIYTPVCLSSSSSSPRKPKLIVSPRLLTSHDLWDSLPAGYDPCTEGYAENYFNRKDVQLALHANVTNLPYPYSPCSGVIKRWNDAPPTVIPIIQKLLAGGLRIWIYSGDTDGRVPVTSTRYSIKKMRPKVVSPWRSWFHKSQVAGWVETYAGGLTFATVRGAGHQVPVFAPAQSLSLFSHFLSSTPLPSKRF

SEQ ID NO: 110114 - protein, 350 aa, Zea mays subsp. mays
  misc_feature (1)..(350): Ceres Seq. ID no. 15177894
  misc_feature (1)..(342): Pfam Name: Serine carboxypeptidase Pfam Description: Serine carboxypeptidase
  misc_feature (1)..(350): Homolog of NCBI NO: 37536528 NR Description: putative serine carboxypeptidase
  misc_feature (1)..(346): Homolog of NCBI NO: 15234795 NR Description: serine carboxypeptidase -related [Arabidopsis
  misc_feature (1)..(346): Homolog of NCBI NO: 13877871 NR Description: putative serine carboxypeptidase II [Arabidopsis
  misc_feature (199)..(349): Homolog of NCBI NO: 11967861 NR Description: putative serine carboxypeptidase [Pisum sativum]
  misc_feature (1)..(182): Homolog of NCBI NO: 11967861 NR Description: putative serine carboxypeptidase [Pisum sativum]
  misc_feature (188)..(349): Homolog of NCBI NO: 15220282 NR Description: serine carboxypeptidase -related [Arabidopsis
  misc_feature (1)..(162): Homolog of NCBI NO: 15220282 NR Description: serine carboxypeptidase -related [Arabidopsis
  misc_feature (1)..(350): Homolog of NCBI NO: 10177810 NR Description: serine carboxypeptidase II-like protein
  misc_feature (1)..(289): Homolog of NCBI NO: 38344436 NR Description: OSJNBa0038O10.8 [Oryza sativa (japonica
  misc_feature (1)..(350): Homolog of NCBI NO: 15241571 NR Description: serine carboxypeptidase II -related [Arabidopsis
MLFLEAPVGVGFSYTNNSMDLHKLGDQVSAEDSLAFLINWFMKFPEYRSNEFYIAGESYAGHYVPQLANAIYDRNKKVTRGSHINLKGFMIGNAVINEETDMAGLVDYAWSHAIVSDEIHSNIHGMCRFEEEQKSNQTVECNDNFKAFMEAYSDIDIYSIYTPVCLSSSSSSPRKPKLIVSPRLLTSHDLWDSLPAGYDPCTEGYAENYFNRKDVQLALHANVTNLPYPYSPCSGVIKRWNDAPPTVIPIIQKLLAGGLRIWIYSGDTDGRVPVTSTRYSIKKMRPKVVSPWRSWFHKSQVAGWVETYAGGLTFATVRGAGHQVPVFAPAQSLSLFSHFLSSTPLPSKRF

SEQ ID NO: 110115 - protein, 332 aa, Zea mays subsp. mays
  misc_feature (1)..(332): Ceres Seq. ID no. 15177895
  misc_feature (1)..(324): Pfam Name: Serine carboxypeptidase Pfam Description: Serine carboxypeptidase
  misc_feature (1)..(332): Homolog of NCBI NO: 37536528 NR Description: putative serine carboxypeptidase
  misc_feature (1)..(328): Homolog of NCBI NO: 15234795 NR Description: serine carboxypeptidase -related [Arabidopsis
  misc_feature (1)..(328): Homolog of NCBI NO: 13877871 NR Description: putative serine carboxypeptidase II [Arabidopsis
  misc_feature (181)..(331): Homolog of NCBI NO: 11967861 NR Description: putative serine carboxypeptidase [Pisum sativum]
  misc_feature (1)..(164): Homolog of NCBI NO: 11967861 NR Description: putative serine carboxypeptidase [Pisum sativum]
  misc_feature (170)..(331): Homolog of NCBI NO: 15220282 NR Description: serine carboxypeptidase -related [Arabidopsis
  misc_feature (1)..(144): Homolog of NCBI NO: 15220282 NR Description: serine carboxypeptidase -related [Arabidopsis
  misc_feature (1)..(332): Homolog of NCBI NO: 10177810 NR Description: serine carboxypeptidase II-like protein
  misc_feature (1)..(271): Homolog of NCBI NO: 38344436 NR Description: OSJNBa0038O10.8 [Oryza sativa (japonica
  misc_feature (1)..(332): Homolog of NCBI NO: 15241571 NR Description: serine carboxypeptidase II -related [Arabidopsis
MDLHKLGDQVSAEDSLAFLINWFMKFPEYRSNEFYIAGESYAGHYVPQLANAIYDRNKKVTRGSHINLKGFMIGNAVINEETDMAGLVDYAWSHAIVSDEIHSNIHGMCRFEEEQKSNQTVECNDNFKAFMEAYSDIDIYSIYTPVCLSSSSSSPRKPKLIVSPRLLTSHDLWDSLPAGYDPCTEGYAENYFNRKDVQLALHANVTNLPYPYSPCSGVIKRWNDAPPTVIPIIQKLLAGGLRIWIYSGDTDGRVPVTSTRYSIKKMRPKVVSPWRSWFHKSQVAGWVETYAGGLTFATVRGAGHQVPVFAPAQSLSLFSHFLSSTPLPSKRF

SEQ ID NO: 110116 - DNA, 1065 bp, Zea mays subsp. mays
  misc_feature (1)..(1065): Ceres Seq. ID no. 15177896
tctcgatctcggttatcgatcgacgactgaaccggagacgtcgtcacgggacgatctaatcgccggtaaactcaaatcaaatcgaatctccggcgatctgatcgcaatgagtaacagcgagcttctcaacgtggagcctctcgatcttcaattcccttttgaactgaggaagcagatctcatgctctctttacttgaccaacaagacggacaatcatgtagctttcaaggttaagacaacgaatccgaaaaagtattgcgtaaggcctaacactggagttgttcttccaaggtccacttgtgaagttctcgtgaccatgcaagctcaaaaggaagctccttcggatatgcagtgcaaggacaagtttctgcttcaaggtgtgattgctagtcctggtgtcacggccaaggaagtcactcctgagatgtttagcaaagaggctgggcatttagttgaggagactaagctgagagttacgtatgttgctccaccacaaccaccatcaccggttcacgaaggttctgaagagggttcttctccacgggcttctgtttctgataacggaggacaggcttctgagttttcttctcagagatttatagcagcggacaaggttgaacctcaaggaaacacatctgaggcaagggctctcatcacaaagctaaccgaggaaaaacagtctgccattcaactaaacaacaaacttcaaagagaactggaccagttgagacgtgacagtaagagaggccaaagtggtatgcctttgatgtacgttcttctggtcggactaatcggtctaattctgggatacattatgaagagcacataaccacctgagttcttcgtgccacacaggaaagaagaacaaaggaaacagactatttctcttatctttgtatttgacaatttcacctgaaaggtgtctctagatgattgatttgtagtgaaaatgtcaataactcattttgctttgtttttatttaaactttttattttacttttggtaccaataacatggtccgcttttttttttttattgatctcaatcttatctcagagtttagc

SEQ ID NO: 110117 - protein, 275 aa, Zea mays subsp. mays
  misc_feature (1)..(275): Ceres Seq. ID no. 15177897
  misc_feature (36)..(239): Homolog of NCBI NO: 7486542 NR Description: hypothetical protein F6N15.21 - Arabidopsis
  misc_feature (32)..(194): Homolog of NCBI NO: 25405451 NR Description: hypothetical protein F11M15.13 [imported] -
  misc_feature (32)..(194): Homolog of NCBI NO: 15223792 NR Description: VAMP (vesicle-associated membrane
  misc_feature (36)..(272): Homolog of NCBI NO: 21592874 NR Description: putative proline-rich protein [Arabidopsis
  misc_feature (36)..(272): Homolog of NCBI NO: 18411240 NR Description: VAMP (vesicle-associated membrane
  misc_feature (36)..(275): Homolog of NCBI NO: 11288307 NR Description: 27k vesicle-associated membrane
  misc_feature (36)..(275): Homolog of NCBI NO: 15225415 NR Description: VAMP (vesicle-associated membrane
  misc_feature (15)..(275): Homolog of NCBI NO: 11288305 NR Description: hypothetical protein T4C21.10 - Arabidopsis
  misc_feature (36)..(275): Homolog of NCBI NO: 21554053 NR Description: putative VAMP-associated protein [Arabidopsis
  misc_feature (15)..(275): Homolog of NCBI NO: 18411661 NR Description: VAMP (vesicle-associated membrane
LDLGYRSTTEPETSSRDDLIAGKLKSNRISGDLIAMSNSELLNVEPLDLQFPFELRKQISCSLYLTNKTDNHVAFKVKTTNPKKYCVRPNTGVVLPRSTCEVLVTMQAQKEAPSDMQCKDKFLLQGVIASPGVTAKEVTPEMFSKEAGHLVEETKLRVTYVAPPQPPSPVHEGSEEGSSPRASVSDNGGQASEFSSQRFIAADKVEPQGNTSEARALITKLTEEKQSAIQLNNKLQRELDQLRRDSKRGQSGMPLMYVLLVGLIGLILGYIMKST

SEQ ID NO: 110118 - protein, 240 aa, Zea mays subsp. mays
  misc_feature (1)..(240): Ceres Seq. ID no. 15177898
  misc_feature (1)..(204): Homolog of NCBI NO: 7486542 NR Description: hypothetical protein F6N15.21 - Arabidopsis
  misc_feature (1)..(159): Homolog of NCBI NO: 25405451 NR Description: hypothetical protein F11M15.13 [imported] -
  misc_feature (1)..(159): Homolog of NCBI NO: 15223792 NR Description: VAMP (vesicle-associated membrane
  misc_feature (1)..(237): Homolog of NCBI NO: 21592874 NR Description: putative proline-rich protein [Arabidopsis
  misc_feature (1)..(237): Homolog of NCBI NO: 18411240 NR Description: VAMP (vesicle-associated membrane
  misc_feature (1)..(240): Homolog of NCBI NO: 11288307 NR Description: 27k vesicle-associated membrane
  misc_feature (1)..(240): Homolog of NCBI NO: 15225415 NR Description: VAMP (vesicle-associated membrane
  misc_feature (1)..(240): Homolog of NCBI NO: 11288305 NR Description: hypothetical protein T4C21.10 - Arabidopsis
  misc_feature (1)..(240): Homolog of NCBI NO: 21554053 NR Description: putative VAMP-associated protein [Arabidopsis
  misc_feature (1)..(240): Homolog of NCBI NO: 18411661 NR Description: VAMP (vesicle-associated membrane
MSNSELLNVEPLDLQFPFELRKQISCSLYLTNKTDNHVAFKVKTTNPKKYCVRPNTGVVLPRSTCEVLVTMQAQKEAPSDMQCKDKFLLQGVIASPGVTAKEVTPEMFSKEAGHLVEETKLRVTYVAPPQPPSPVHEGSEEGSSPRASVSDNGGQASEFSSQRFIAADKVEPQGNTSEARALITKLTEEKQSAIQLNNKLQRELDQLRRDSKRGQSGMPLMYVLLVGLIGLILGYIMKST

SEQ ID NO: 110119 - protein, 170 aa, Zea mays subsp. mays
  misc_feature (1)..(170): Ceres Seq. ID no. 15177899
  misc_feature (1)..(134): Homolog of NCBI NO: 7486542 NR Description: hypothetical protein F6N15.21 - Arabidopsis
  misc_feature (1)..(89): Homolog of NCBI NO: 25405451 NR Description: hypothetical protein F11M15.13 [imported] -
  misc_feature (1)..(89): Homolog of NCBI NO: 15223792 NR Description: VAMP (vesicle-associated membrane
  misc_feature (1)..(167): Homolog of NCBI NO: 21592874 NR Description: putative proline-rich protein [Arabidopsis
  misc_feature (1)..(167): Homolog of NCBI NO: 18411240 NR Description: VAMP (vesicle-associated membrane
  misc_feature (1)..(170): Homolog of NCBI NO: 11288307 NR Description: 27k vesicle-associated membrane
  misc_feature (1)..(170): Homolog of NCBI NO: 15225415 NR Description: VAMP (vesicle-associated membrane
  misc_feature (1)..(170): Homolog of NCBI NO: 11288305 NR Description: hypothetical protein T4C21.10 - Arabidopsis
  misc_feature (1)..(170): Homolog of NCBI NO: 21554053 NR Description: putative VAMP-associated protein [Arabidopsis
  misc_feature (1)..(170): Homolog of NCBI NO: 18411661 NR Description: VAMP (vesicle-associated membrane
MQAQKEAPSDMQCKDKFLLQGVIASPGVTAKEVTPEMFSKEAGHLVEETKLRVTYVAPPQPPSPVHEGSEEGSSPRASVSDNGGQASEFSSQRFIAADKVEPQGNTSEARALITKLTEEKQSAIQLNNKLQRELDQLRRDSKRGQSGMPLMYVLLVGLIGLILGYIMKST

SEQ ID NO: 110120 - DNA, 1081 bp, Zea mays subsp. mays
  misc_feature (1)..(1081): Ceres Seq. ID no. 15179026
atacttttttctaaggcgcctgaaaccatatagtatatacaatacatgatttgtgccgttgacctttcccccgtgtgtaaatgggcatatttcctgagtttggtggctggatcagtcagaacactcaacagcctaaaaaatctgaaaaagtgaaatccaagcctgtgagagagacaaaaactcacgatgagagagatgagacgaaggagcaattaaaactgtggagagatgcaaataagaaggaacaatatcatgaaccttctcctacggtgaaggtgcatacggaccataatattgatagcttttccagtataaaaatggaatttacattaggattgccacctcaagcagcttacgacgttttaactaatcaagacaacaaaacatactccagagaaatcaatggccgcccacttctgaaagccatatcaagaaaagttacatcagagagaggtatagggaataggccgatcctggaggttgataaagagttgtcatggaacttccttttcttttcaggaactatcccaatacgtctaaatgtcctcgaaaacccaaaagaactttcgacatataactggaaaaggagaaaaggaatggactacatggaaacgttcgaggtcaactatacagtagagccaatgtatgtcgatgcagaacgcttgtgcaagcacaagaagccgaagagtagagaagaatacagaaaatgtagtggtggaaaaggattgattgcgtccaaggttaaagttgaccagaattttaggccttcttttccttggaatctgccactgctgtcttcctactttcgccggttcactgttgagaccactaagaaagtggcggaagattttcaaacgcgggctggcgatatccgacatcggttgtaacgtctgagtcttgcgcaagggcgggggtgaaagcgacgaacaaattttcttagacatgatattaattatgttatatcgattatttgcatcggtaaaataagaaattttacaaccctgaaaaggcagaaaacagatgcaatatactatatggcttaatatacggtagattttcaataaactattccctctgttcc

SEQ ID NO: 110121 - protein, 268 aa, Zea mays subsp. mays
  misc_feature (1)..(268): Ceres Seq. ID no. 15179027
  misc_feature (145)..(248): Pfam Name: Domain of unknown function DUF220 Pfam Description: Domain of unknown function DUF220
  misc_feature (174)..(265): Homolog of NCBI NO: 8778586 NR Description: F28C11.14 [Arabidopsis thaliana]
  misc_feature (1)..(165): Homolog of NCBI NO: 8778586 NR Description: F28C11.14 [Arabidopsis thaliana]
  misc_feature (1)..(117): Homolog of NCBI NO: 8778583 NR Description: F28C11.19 [Arabidopsis thaliana]
  misc_feature (1)..(265): Homolog of NCBI NO: 15220802 NR Description: OBP32pep protein -related [Arabidopsis thaliana]
  misc_feature (183)..(265): Homolog of NCBI NO: 25373400 NR Description: hypothetical protein F5O8.7 [imported] -
  misc_feature (1)..(158): Homolog of NCBI NO: 25373400 NR Description: hypothetical protein F5O8.7 [imported] -
  misc_feature (1)..(265): Homolog of NCBI NO: 25373395 NR Description: hypothetical protein F5O8.22 - Arabidopsis
  misc_feature (112)..(268): Homolog of NCBI NO: 8778583 NR Description: F28C11.19 [Arabidopsis thaliana]
  misc_feature (1)..(266): Homolog of NCBI NO: 15220799 NR Description: OBP32pep protein -related [Arabidopsis thaliana]
  misc_feature (1)..(265): Homolog of NCBI NO: 15220781 NR Description: OBP32pep protein -related [Arabidopsis thaliana]
MGIFPEFGGWISQNTQQPKKSEKVKSKPVRETKTHDERDETKEQLKLWRDANKKEQYHEPSPTVKVHTDHNIDSFSSIKMEFTLGLPPQAAYDVLTNQDNKTYSREINGRPLLKAISRKVTSERGIGNRPILEVDKELSWNFLFFSGTIPIRLNVLENPKELSTYNWKRRKGMDYMETFEVNYTVEPMYVDAERLCKHKKPKSREEYRKCSGGKGLIASKVKVDQNFRPSFPWNLPLLSSYFRRFTVETTKKVAEDFQTRAGDIRHRL

SEQ ID NO: 110122 - protein, 189 aa, Zea mays subsp. mays
  misc_feature (1)..(189): Ceres Seq. ID no. 15179028
  misc_feature (66)..(169): Pfam Name: Domain of unknown function DUF220 Pfam Description: Domain of unknown function DUF220
  misc_feature (1)..(187): Homolog of NCBI NO: 15220799 NR Description: OBP32pep protein -related [Arabidopsis thaliana]
  misc_feature (1)..(38): Homolog of NCBI NO: 8778583 NR Description: F28C11.19 [Arabidopsis thaliana]
  misc_feature (33)..(189): Homolog of NCBI NO: 8778583 NR Description: F28C11.19 [Arabidopsis thaliana]
  misc_feature (1)..(186): Homolog of NCBI NO: 15220802 NR Description: OBP32pep protein -related [Arabidopsis thaliana]
  misc_feature (1)..(186): Homolog of NCBI NO: 25373395 NR Description: hypothetical protein F5O8.22 - Arabidopsis
  misc_feature (104)..(186): Homolog of NCBI NO: 25373400 NR Description: hypothetical protein F5O8.7 [imported] -
  misc_feature (1)..(79): Homolog of NCBI NO: 25373400 NR Description: hypothetical protein F5O8.7 [imported] -
  misc_feature (95)..(186): Homolog of NCBI NO: 8778586 NR Description: F28C11.14 [Arabidopsis thaliana]
  misc_feature (1)..(86): Homolog of NCBI NO: 8778586 NR Description: F28C11.14 [Arabidopsis thaliana]
  misc_feature (1)..(186): Homolog of NCBI NO: 15220781 NR Description: OBP32pep protein -related [Arabidopsis thaliana]
MEFTLGLPPQAAYDVLTNQDNKTYSREINGRPLLKAISRKVTSERGIGNRPILEVDKELSWNFLFFSGTIPIRLNVLENPKELSTYNWKRRKGMDYMETFEVNYTVEPMYVDAERLCKHKKPKSREEYRKCSGGKGLIASKVKVDQNFRPSFPWNLPLLSSYFRRFTVETTKKVAEDFQTRAGDIRHRL

SEQ ID NO: 110123 - DNA, 1490 bp, Zea mays subsp. mays
  misc_feature (1)..(1490): Ceres Seq. ID no. 15180075
gaaaaaaggacccttctttttcttggcactcccagcggaaggaacggtggcgtttctccgttgtacgaagtggcgccatctgcaccggtcggcttgagcggtggctttcctcgtcagttgctcttcccgaacgacgccagcaccgcccgtggcatctgcgtctctgccttctccaaccgccagcaccgctccccgatccaggaccaagaagcgtgtgaggagctttcagctgccacccggtgccaccatgctccggcatctccagcgatccctccgtgccattcactacttacccatcatcggacgtgatgccgcctgcaaccccattcccctccaccggtcctgggattcacatatagagcatgccaccagagatttctctacttccacaagacttacaggacatccaatatatcagcagaatgagttagaaccaactacgcctgtgaaggatactgacataataattgaccgcatacgaaagagcacacggaaattggaggaaggccctgttggaaaaaatctgtcttcagcggagaaaaggaaatttcttgtcaacactctccttagccttgaagattcaagagaagctgtttatggcacccttgatgcctgggttgcctttgagcaggattttcctttggcttcactaaagcaagcactttcagttcttgagaaggaggaacagtggcatagaattgtccaggtgatcaaatggatgctgagcaaagggcaaggaaatacaatgagaacatatgagctattggcatgtgcactcgagaaggataatagagctgaggaagcacatagaatctggcagaataaagtgggccacgatctgcattcggttccttggcgtttctgccgtcttatgttggctatctactaccgaaacaataggctagacaggctcgtgaagctcttcaaagaactcgaagcttgtggccgtaaacctccaagcaaagacattgtgcggaaagtcgaagatgcgtacgaaacgcttggattactagaagataaaaaggtgttgcttgataaatacaaggatttatacaacaaaccgtctcgggacgatcggaagaaaggctccaaatccaaaaagatcgagtctgataaaccatctgatggtgacagtaaggaaagcaagatggaaacatctgagaaccttgaagaccgctgtttccctgtggatgcaaaaccagatgcctctgcttaggctcatcactgaaccaccgacgtcgccataagatttggccaaaacccggtgctgtcagcattagcgattggcgtgctctcagtacacgtttgctcccctaaccagttagtgttttttctttctctctagacatgttacaagggcatttgtatttgctgttttgcactgacatcatttttgccaagaccctaagcggtataatactgtgcgacggctatgtataatactgtgcgacgttcattactggcagcaatatacacaccccttgttcgac

SEQ ID NO: 110124 - protein, 322 aa, Zea mays subsp. mays
  misc_feature (1)..(322): Ceres Seq. ID no. 15180076
  misc_feature (102)..(309): Homolog of NCBI NO: 7486589 NR Description: hypothetical protein F7J7.130 - Arabidopsis
  misc_feature (91)..(309): Homolog of NCBI NO: 18415645 NR Description: pentatricopeptide (PPR) repeat-containing protein
  misc_feature (95)..(269): Homolog of NCBI NO: 34393638 NR Description: pentatricopeptide (PPR) repeat-containing
  misc_feature (76)..(322): Homolog of NCBI NO: 34909686 NR Description: B1131G08.1 [Oryza sativa (japonica
  misc_feature (79)..(285): Homolog of NCBI NO: 7485419 NR Description: hypothetical protein F13C5.140 - Arabidopsis
  misc_feature (79)..(269): Homolog of NCBI NO: 18415213 NR Description: pentatricopeptide (PPR) repeat-containing protein
  misc_feature (106)..(309): Homolog of NCBI NO: 25406795 NR Description: hypothetical protein [imported] - Arabidopsis
  misc_feature (89)..(309): Homolog of NCBI NO: 30678929 NR Description: expressed protein [Arabidopsis thaliana]
  misc_feature (89)..(309): Homolog of NCBI NO: 18390413 NR Description: expressed protein [Arabidopsis thaliana]
MLRHLQRSLRAIHYLPIIGRDAACNPIPLHRSWDSHIEHATRDFSTSTRLTGHPIYQQNELEPTTPVKDTDIIIDRIRKSTRKLEEGPVGKNLSSAEKRKFLVNTLLSLEDSREAVYGTLDAWVAFEQDFPLASLKQALSVLEKEEQWHRIVQVIKWMLSKGQGNTMRTYELLACALEKDNRAEEAHRIWQNKVGHDLHSVPWRFCRLMLAIYYRNNRLDRLVKLFKELEACGRKPPSKDIVRKVEDAYETLGLLEDKKVLLDKYKDLYNKPSRDDRKKGSKSKKIESDKPSDGDSKESKMETSENLEDRCFPVDAKPDASA

SEQ ID NO: 110125 - protein, 165 aa, Zea mays subsp. mays
  misc_feature (1)..(165): Ceres Seq. ID no. 15180077
  misc_feature (1)..(152): Homolog of NCBI NO: 7486589 NR Description: hypothetical protein F7J7.130 - Arabidopsis
  misc_feature (1)..(152): Homolog of NCBI NO: 18415645 NR Description: pentatricopeptide (PPR) repeat-containing protein
  misc_feature (1)..(112): Homolog of NCBI NO: 34393638 NR Description: pentatricopeptide (PPR) repeat-containing
  misc_feature (1)..(165): Homolog of NCBI NO: 34909686 NR Description: B1131G08.1 [Oryza sativa (japonica
  misc_feature (1)..(128): Homolog of NCBI NO: 7485419 NR Description: hypothetical protein F13C5.140 - Arabidopsis
  misc_feature (1)..(112): Homolog of NCBI NO: 18415213 NR Description: pentatricopeptide (PPR) repeat-containing protein
  misc_feature (1)..(152): Homolog of NCBI NO: 25406795 NR Description: hypothetical protein [imported] - Arabidopsis
  misc_feature (1)..(152): Homolog of NCBI NO: 30678929 NR Description: expressed protein [Arabidopsis thaliana]
  misc_feature (1)..(152): Homolog of NCBI NO: 18390413 NR Description: expressed protein [Arabidopsis thaliana]
MLSKGQGNTMRTYELLACALEKDNRAEEAHRIWQNKVGHDLHSVPWRFCRLMLAIYYRNNRLDRLVKLFKELEACGRKPPSKDIVRKVEDAYETLGLLEDKKVLLDKYKDLYNKPSRDDRKKGSKSKKIESDKPSDGDSKESKMETSENLEDRCFPVDAKPDASA

SEQ ID NO: 110126 - DNA, 2478 bp, Zea mays subsp. mays
  misc_feature (1)..(2478): Ceres Seq. ID no. 15177678
  misc_feature: MA Experiment ID: 108527 Result: Up-regulated in Transcription
  misc_feature: MA Experiment 108527 PARAMETER Experiment Name: Zm_5mM_NO_P Parameter: Age (day) Value: 8
  misc_feature: MA Experiment 108527 PARAMETER Experiment Name: Zm_5mM_NO_P Parameter: Organism Value: Zea mays
  misc_feature: MA Experiment 108527 PARAMETER Experiment Name: Zm_5mM_NO_P Parameter: Plant Line Value: 35A19
  misc_feature: MA Experiment 108527 PARAMETER Experiment Name: Zm_5mM_NO_P Parameter: Timepoint (hr) Value: 6
  misc_feature: MA Experiment 108527 PARAMETER Experiment Name: Zm_5mM_NO_P Parameter: Tissue Value: Aerial
  misc_feature: MA Experiment 108527 PARAMETER Experiment Name: Zm_5mM_NO_P Parameter: Treatment Value: 5mM NO vs. No Treatment
  misc_feature: MA Experiment ID: 20000534 Result: Down-regulated in Transcription
  misc_feature: MA Experiment 20000534 PARAMETER Experiment Name: Zm_Hybrid_Pollen_P Parameter: Age (day) Value: 8
  misc_feature: MA Experiment 20000534 PARAMETER Experiment Name: Zm_Hybrid_Pollen_P Parameter: Organism Value: Zea mays
  misc_feature: MA Experiment 20000534 PARAMETER Experiment Name: Zm_Hybrid_Pollen_P Parameter: Plant Line Value: 35A19
  misc_feature: MA Experiment 20000534 PARAMETER Experiment Name: Zm_Hybrid_Pollen_P Parameter: Tissue Value: Pollen vs. Aerial
aaaacttgccctcttctctgcttgaaccgcggagcaagaccgctcttgttctcttctctgcttgaactgcggagaaagaccgaatccgaagggacgttgggactttctggctgggaagactacataccatttctctaattcgggcgtggtttgtgctgggagggaaggaatccatggggctgcagctcgatccgcgctgagagttgaaggaaccggccttgttgtgtgctccacccaatcgaggaaaaggggcaaggattgctgctttgttgtctttggatccgttacgccattggggattcaaccatcagcagggcgaagtgacggttctgcaccacttttccccttatcctaattcgattttatttgaacactggatgtgattataatctcggttgctgttctgtgcggctctatctgagggtttcctccgtcctggatcgggaaggaaggcgcccttggatttccgtctccatggcgcccgccttgtaacccacggagtctaacttttaaatttagtgtaaatattagtggtagcagctgttaaggaagccccggtctccttagtagccaccgtgtgaatatgtcgtcagctggtgtgatcgtcttggggccagtcccaaaagaccctgctttcctgcctatctgcttcaacggcagccggtcgccacactgctcgtctgggtcacagctgcaggattccattcttattttccttgctgtgcctggtatgtcacccatgcccatgagcgtgctggaatctgagtccattgcctccgtgaagctgcgcatccagcggttcaaaggctttgtggcgacgaagcagcggcttgtgctggatgggcatgaactggcaagaaataactgcccagtcaaggattatgggctggctgagggaaatgttcttcatcttgttattcgactgtctgatctccgtgtgatcaatattgagactgcaactggaaagaagtttcagtttcaggtggatcagagccgcaatgttaagtttcttaagaacaagcttgcagcagagggtgatgaggatattggtaatcttcaggatcacaagcttgaatatgatggcgaggagcttgaggaccaccagctgatagctgatattagcaagagggatgatgctgtaattcatttgttcatcctcaaaccagcaaaagtactgacacagcaagttgatagagatactttggttacagttctcaatccacaggagaaaggcaacctgcaaaatgaacctcgctcaatgaactccacaaaatcagttgaggttaggcctgctcctgttgaaccaatagttagccaaaatgtgaagctgtcacctgaattgattaagatgataaatttaaccacagttggactggagaaagggcacctgcctgtgatgtcagctgaaggttcaggaggtgtatatttcatgcgagatgcaacaggtcagaagaatattgctgtgtttaagcctattgatgaggaacccatggccaaaaacaacccaaggggtcttcctttgtccactgatggcgaggggatgaagaggggaacaattgtagggggaggtgcattcagggaggttgcagcttatattctcgaccatccagttagtgatagtaaatctggtcacagttttgggttttctggtgtgcctcccaccacattggtccgaacctcgcatagggggaagaacttcaagattggttcactgcagatgttcatggacaacaatggaagcactgaagatatgggtcctcgaccttttcctgtcaaggaggttcataaaatagcagtactagatattaggttagctaatgctgatcgtcatgctgggaatattctagtgtgcaaggagagagaaggtggcaactacaagctgattccaattgatcatggttactgcttgccagagaagtttgaagattgtacatttgagtggctctactggccccaagcccgtgagccattcaatgatgaaaccattgaatacatcaaatcactcgatgctgaagaagacatcaagcttctcaagatccatgggtgggagctgcctccacggtgtgctcgtgtcctgcgcatcagcacaatgcttttgaagaaaggtgcatctcgtggcttcacgccctatgacatagggcgcatactatgcagggaaactgtgaatagggactctgagattgaggtcatcattcaggaagcagaggatgctgttctcccatggtccagtgaaaacatgttcttagaaactttatctgaaatcatggaccgtcacctccacaaggaatgagtttagaaattcagaataacttatctagttgctccagctgtatccggtttgttgtaagtattgtagacaaggggtgtcaagggactaatgatttcatttgtttgtatcctctcaaatgatttcacttggttgtaattgctcgagtactttgcttatgcacattttgtgaataatatatttgtttggct

SEQ ID NO: 110127 - protein, 568 aa, Zea mays subsp. mays
  misc_feature (1)..(568): Ceres Seq. ID no. 15177679
  misc_feature (276)..(525): Pfam Name: Phosphatidylinositol 3- and 4-kinase Pfam Description: Phosphatidylinositol 3- and 4-kinase
  misc_feature (235)..(541): Homolog of NCBI NO: 18394020 NR Description: phosphatidylinositol 3- and 4-kinase family
  misc_feature (235)..(544): Homolog of NCBI NO: 25363315 NR Description: hypothetical protein At2g03890 [imported] -
  misc_feature (235)..(544): Homolog of NCBI NO: 18395629 NR Description: phosphatidylinositol 3- and 4-kinase family
  misc_feature (255)..(562): Homolog of NCBI NO: 32488384 NR Description: OSJNBa0043A12.14 [Oryza sativa (japonica
  misc_feature (283)..(565): Homolog of NCBI NO: 15217655 NR Description: phosphatidylinositol 3- and 4-kinase family
  misc_feature (1)..(234): Homolog of NCBI NO: 6633833 NR Description: F1N19.4 [Arabidopsis thaliana]
  misc_feature (277)..(565): Homolog of NCBI NO: 6633833 NR Description: F1N19.4 [Arabidopsis thaliana]
  misc_feature (1)..(567): Homolog of NCBI NO: 34904388 NR Description: unnamed protein product [Oryza sativa (japonica
  misc_feature (34)..(565): Homolog of NCBI NO: 15237921 NR Description: ubiquitin family [Arabidopsis thaliana]
  misc_feature (1)..(568): Homolog of NCBI NO: 18407090 NR Description: ubiquitin family [Arabidopsis thaliana]
MSSAGVIVLGPVPKDPAFLPICFNGSRSPHCSSGSQLQDSILIFLAVPGMSPMPMSVLESESIASVKLRIQRFKGFVATKQRLVLDGHELARNNCPVKDYGLAEGNVLHLVIRLSDLRVINIETATGKKFQFQVDQSRNVKFLKNKLAAEGDEDIGNLQDHKLEYDGEELEDHQLIADISKRDDAVIHLFILKPAKVLTQQVDRDTLVTVLNPQEKGNLQNEPRSMNSTKSVEVRPAPVEPIVSQNVKLSPELIKMINLTTVGLEKGHLPVMSAEGSGGVYFMRDATGQKNIAVFKPIDEEPMAKNNPRGLPLSTDGEGMKRGTIVGGGAFREVAAYILDHPVSDSKSGHSFGFSGVPPTTLVRTSHRGKNFKIGSLQMFMDNNGSTEDMGPRPFPVKEVHKIAVLDIRLANADRHAGNILVCKEREGGNYKLIPIDHGYCLPEKFEDCTFEWLYWPQAREPFNDETIEYIKSLDAEEDIKLLKIHGWELPPRCARVLRISTMLLKKGASRGFTPYDIGRILCRETVNRDSEIEVIIQEAEDAVLPWSSENMFLETLSEIMDRHLHKE

SEQ ID NO: 110128 - protein, 519 aa, Zea mays subsp. mays
  misc_feature (1)..(519): Ceres Seq. ID no. 15177680
  misc_feature (227)..(476): Pfam Name: Phosphatidylinositol 3- and 4-kinase Pfam Description: Phosphatidylinositol 3- and 4-kinase
  misc_feature (186)..(492): Homolog of NCBI NO: 18394020 NR Description: phosphatidylinositol 3- and 4-kinase family
  misc_feature (186)..(495): Homolog of NCBI NO: 25363315 NR Description: hypothetical protein At2g03890 [imported] -
  misc_feature (186)..(495): Homolog of NCBI NO: 18395629 NR Description: phosphatidylinositol 3- and 4-kinase family
  misc_feature (206)..(513): Homolog of NCBI NO: 32488384 NR Description: OSJNBa0043A12.14 [Oryza sativa (japonica
  misc_feature (234)..(516): Homolog of NCBI NO: 15217655 NR Description: phosphatidylinositol 3- and 4-kinase family
  misc_feature (1)..(185): Homolog of NCBI NO: 6633833 NR Description: F1N19.4 [Arabidopsis thaliana]
  misc_feature (228)..(516): Homolog of NCBI NO: 6633833 NR Description: F1N19.4 [Arabidopsis thaliana]
  misc_feature (1)..(518): Homolog of NCBI NO: 34904388 NR Description: unnamed protein product [Oryza sativa (japonica
  misc_feature (1)..(516): Homolog of NCBI NO: 15237921 NR Description: ubiquitin family [Arabidopsis thaliana]
  misc_feature (1)..(519): Homolog of NCBI NO: 18407090 NR Description: ubiquitin family [Arabidopsis thaliana]
MSPMPMSVLESESIASVKLRIQRFKGFVATKQRLVLDGHELARNNCPVKDYGLAEGNVLHLVIRLSDLRVINIETATGKKFQFQVDQSRNVKFLKNKLAAEGDEDIGNLQDHKLEYDGEELEDHQLIADISKRDDAVIHLFILKPAKVLTQQVDRDTLVTVLNPQEKGNLQNEPRSMNSTKSVEVRPAPVEPIVSQNVKLSPELIKMINLTTVGLEKGHLPVMSAEGSGGVYFMRDATGQKNIAVFKPIDEEPMAKNNPRGLPLSTDGEGMKRGTIVGGGAFREVAAYILDHPVSDSKSGHSFGFSGVPPTTLVRTSHRGKNFKIGSLQMFMDNNGSTEDMGPRPFPVKEVHKIAVLDIRLANADRHAGNILVCKEREGGNYKLIPIDHGYCLPEKFEDCTFEWLYWPQAREPFNDETIEYIKSLDAEEDIKLLKIHGWELPPRCARVLRISTMLLKKGASRGFTPYDIGRILCRETVNRDSEIEVIIQEAEDAVLPWSSENMFLETLSEIMDRHLHKE

SEQ ID NO: 110129 - protein, 516 aa, Zea mays subsp. mays
  misc_feature (1)..(516): Ceres Seq. ID no. 15177681
  misc_feature (224)..(473): Pfam Name: Phosphatidylinositol 3- and 4-kinase Pfam Description: Phosphatidylinositol 3- and 4-kinase
  misc_feature (183)..(489): Homolog of NCBI NO: 18394020 NR Description: phosphatidylinositol 3- and 4-kinase family
  misc_feature (183)..(492): Homolog of NCBI NO: 25363315 NR Description: hypothetical protein At2g03890 [imported] -
  misc_feature (183)..(492): Homolog of NCBI NO: 18395629 NR Description: phosphatidylinositol 3- and 4-kinase family
  misc_feature (203)..(510): Homolog of NCBI NO: 32488384 NR Description: OSJNBa0043A12.14 [Oryza sativa (japonica
  misc_feature (231)..(513): Homolog of NCBI NO: 15217655 NR Description: phosphatidylinositol 3- and 4-kinase family
  misc_feature (1)..(182): Homolog of NCBI NO: 6633833 NR Description: F1N19.4 [Arabidopsis thaliana]
  misc_feature (225)..(513): Homolog of NCBI NO: 6633833 NR Description: F1N19.4 [Arabidopsis thaliana]
  misc_feature (1)..(515): Homolog of NCBI NO: 34904388 NR Description: unnamed protein product [Oryza sativa (japonica
  misc_feature (1)..(513): Homolog of NCBI NO: 15237921 NR Description: ubiquitin family [Arabidopsis thaliana]
  misc_feature (1)..(516): Homolog of NCBI NO: 18407090 NR Description: ubiquitin family [Arabidopsis thaliana]
MPMSVLESESIASVKLRIQRFKGFVATKQRLVLDGHELARNNCPVKDYGLAEGNVLHLVIRLSDLRVINIETATGKKFQFQVDQSRNVKFLKNKLAAEGDEDIGNLQDHKLEYDGEELEDHQLIADISKRDDAVIHLFILKPAKVLTQQVDRDTLVTVLNPQEKGNLQNEPRSMNSTKSVEVRPAPVEPIVSQNVKLSPELIKMINLTTVGLEKGHLPVMSAEGSGGVYFMRDATGQKNIAVFKPIDEEPMAKNNPRGLPLSTDGEGMKRGTIVGGGAFREVAAYILDHPVSDSKSGHSFGFSGVPPTTLVRTSHRGKNFKIGSLQMFMDNNGSTEDMGPRPFPVKEVHKIAVLDIRLANADRHAGNILVCKEREGGNYKLIPIDHGYCLPEKFEDCTFEWLYWPQAREPFNDETIEYIKSLDAEEDIKLLKIHGWELPPRCARVLRISTMLLKKGASRGFTPYDIGRILCRETVNRDSEIEVIIQEAEDAVLPWSSENMFLETLSEIMDRHLHKE

SEQ ID NO: 110130 - DNA, 752 bp, Zea mays subsp. mays
  misc_feature (1)..(752): Ceres Seq. ID no. 15179225
aacatcgaaccatggagaaatcaactagaaccctaatgatcataaccatcgtgataacctccatgttggtagggtttggaagctcagatctggatcaagacagagaagagtgtacggaccagttgatagcactctcaccatgtctcccatacgtgggaggaaacgcaaaggctccaacaaaagattgttgtggtggttttgatcaggttataacaaagagtgagaagtgtgtttgcatattggtcaaagacaaagatgatcctaatcttggcctcaagtttaacgcaacactagctgctcatatccccaccctttgtcatattacagctcctaacatcaccaagtgtatttcgcttctgcatttatctccaaactcgacactggctaaagagtttgagagtttaggaaggattgaatatgaaggaaagaccaactccacatctccttcacataatgttaaagatgggactggaggaggaaaagctgaacaagtgaagagtactggagagaagaagagttggttggctgttgagcttttaatatttgctctcttctctcatcttctcttcattatcccttctttcacatcttcctcctttatttaatgttacgttcttctgctttaatttatgttatatagttacatctaaatttatatatgcatgtgcatgcatatgatttatgcatgtaagtgagtgcaaacttgtaatgggtattgagattttaataacgaaagcgtagcttttaatctt

SEQ ID NO: 110131 - protein, 200 aa, Zea mays subsp. mays
  misc_feature (1)..(200): Ceres Seq. ID no. 15179226
  misc_feature (37)..(115): Pfam Name: Protease inhibitor/seed storage/LTP family Pfam Description: Protease inhibitor/seed storage/LTP family
  misc_feature (12)..(115): Homolog of NCBI NO: 18403453 NR Description: protease inhibitor/seed storage/lipid transfer
  misc_feature (16)..(194): Homolog of NCBI NO: 18407534 NR Description: protease inhibitor/seed storage/lipid transfer
  misc_feature (16)..(194): Homolog of NCBI NO: 21592774 NR Description: unknown [Arabidopsis thaliana]
  misc_feature (11)..(154): Homolog of NCBI NO: 21555220 NR Description: unknown [Arabidopsis thaliana]
  misc_feature (11)..(154): Homolog of NCBI NO: 15231070 NR Description: protease inhibitor/seed storage/lipid transfer
  misc_feature (11)..(177): Homolog of NCBI NO: 34394084 NR Description: lipid transfer protein-like
  misc_feature (14)..(191): Homolog of NCBI NO: 15224862 NR Description: lipid transfer protein family [Arabidopsis
  misc_feature (4)..(191): Homolog of NCBI NO: 15224863 NR Description: lipid transfer protein - related [Arabidopsis
  misc_feature (21)..(189): Homolog of NCBI NO: 21537387 NR Description: unknown [Arabidopsis thaliana]
  misc_feature (4)..(189): Homolog of NCBI NO: 18405294 NR Description: protease inhibitor/seed storage/lipid transfer
HRTMEKSTRTLMIITIVITSMLVGFGSSDLDQDREECTDQLIALSPCLPYVGGNAKAPTKDCCGGFDQVITKSEKCVCILVKDKDDPNLGLKFNATLAAHIPTLCHITAPNITKCISLLHLSPNSTLAKEFESLGRIEYEGKTNSTSPSHNVKDGTGGGKAEQVKSTGEKKSWLAVELLIFALFSHLLFIIPSFTSSSFI

SEQ ID NO: 110132 - protein, 197 aa, Zea mays subsp. mays
  misc_feature (1)..(197): Ceres Seq. ID no. 15179227
  misc_feature (34)..(112): Pfam Name: Protease inhibitor/seed storage/LTP family Pfam Description: Protease inhibitor/seed storage/LTP family
  misc_feature (13)..(191): Homolog of NCBI NO: 18407534 NR Description: protease inhibitor/seed storage/lipid transfer
  misc_feature (13)..(191): Homolog of NCBI NO: 21592774 NR Description: unknown [Arabidopsis thaliana]
  misc_feature (8)..(151): Homolog of NCBI NO: 21555220 NR Description: unknown [Arabidopsis thaliana]
  misc_feature (8)..(151): Homolog of NCBI NO: 15231070 NR Description: protease inhibitor/seed storage/lipid transfer
  misc_feature (8)..(174): Homolog of NCBI NO: 34394084 NR Description: lipid transfer protein-like
  misc_feature (9)..(112): Homolog of NCBI NO: 18403453 NR Description: protease inhibitor/seed storage/lipid transfer
  misc_feature (11)..(188): Homolog of NCBI NO: 15224862 NR Description: lipid transfer protein family [Arabidopsis
  misc_feature (1)..(188): Homolog of NCBI NO: 15224863 NR Description: lipid transfer protein - related [Arabidopsis
  misc_feature (18)..(186): Homolog of NCBI NO: 21537387 NR Description: unknown [Arabidopsis thaliana]
  misc_feature (1)..(186): Homolog of NCBI NO: 18405294 NR Description: protease inhibitor/seed storage/lipid transfer
MEKSTRTLMIITIVITSMLVGFGSSDLDQDREECTDQLIALSPCLPYVGGNAKAPTKDCCGGFDQVITKSEKCVCILVKDKDDPNLGLKFNATLAAHIPTLCHITAPNITKCISLLHLSPNSTLAKEFESLGRIEYEGKTNSTSPSHNVKDGTGGGKAEQVKSTGEKKSWLAVELLIFALFSHLLFIIPSFTSSSFI

SEQ ID NO: 110133 - protein, 189 aa, Zea mays subsp. mays
  misc_feature (1)..(189): Ceres Seq. ID no. 15179228
  misc_feature (26)..(104): Pfam Name: Protease inhibitor/seed storage/LTP family Pfam Description: Protease inhibitor/seed storage/LTP family
  misc_feature (1)..(104): Homolog of NCBI NO: 18403453 NR Description: protease inhibitor/seed storage/lipid transfer
  misc_feature (5)..(183): Homolog of NCBI NO: 18407534 NR Description: protease inhibitor/seed storage/lipid transfer
  misc_feature (5)..(183): Homolog of NCBI NO: 21592774 NR Description: unknown [Arabidopsis thaliana]
  misc_feature (1)..(143): Homolog of NCBI NO: 21555220 NR Description: unknown [Arabidopsis thaliana]
  misc_feature (1)..(143): Homolog of NCBI NO: 15231070 NR Description: protease inhibitor/seed storage/lipid transfer
  misc_feature (1)..(166): Homolog of NCBI NO: 34394084 NR Description: lipid transfer protein-like
  misc_feature (3)..(180): Homolog of NCBI NO: 15224862 NR Description: lipid transfer protein family [Arabidopsis
  misc_feature (1)..(180): Homolog of NCBI NO: 15224863 NR Description: lipid transfer protein - related [Arabidopsis
  misc_feature (10)..(178): Homolog of NCBI NO: 21537387 NR Description: unknown [Arabidopsis thaliana]
  misc_feature (1)..(178): Homolog of NCBI NO: 18405294 NR Description: protease inhibitor/seed storage/lipid transfer
MIITIVITSMLVGFGSSDLDQDREECTDQLIALSPCLPYVGGNAKAPTKDCCGGFDQVITKSEKCVCILVKDKDDPNLGLKFNATLAAHIPTLCHITAPNITKCISLLHLSPNSTLAKEFESLGRIEYEGKTNSTSPSHNVKDGTGGGKAEQVKSTGEKKSWLAVELLIFALFSHLLFIIPSFTSSSFI

SEQ ID NO: 110134 - DNA, 809 bp, Zea mays subsp. mays
  misc_feature (1)..(809): Ceres Seq. ID no. 15179187
aagccccctttgcgagacaagagaagagaaacaagcagccatggtgtgcatcaggcgagcgacggttgacgatctgctggcgatgcaagcctgcaatctcatgtgtcttcccgagaactaccagatgaagtactacctctaccacatcctctcctggcctcagcttctctacgttgccgaggactacaacggccgcatcgtcggctatgtcctcgccaagatggacgaggagagtaacgagtgccacggccacatcacttccctcgctgttcttcgtactcatcggaagcttggtctcgccactaagctcatgaccgccgctcagtctgccatggaacaggtttatgaggcagagtatgtttcgctgcacgtgaggagaagtaaccgagcagcgtttcatctgtacacggagacgttaggctacaagattcacgatgtggaagcgaagtattacgctgatggagaggatgcctatgacatgcggaagtattttaagggtaagcaaaaccatcaacagagccacggtcatcatcatcatcatcatcatggaggtgggtgttgttccggtgatgcagtagatacaactccagccgaagatgctatagcaacgacgtcgaagtgagactgagttgtattggtgtgtgtttgctggctagctctagtagtgctgctcactattttccattcatatgattttgagtgtcaaaacacatttggtaaaccactcttgtgcttgagtgtttctccattggtcttctttttggttgtacttgatatttattagccagtcttttttttttctatgtatc

SEQ ID NO: 110135 - protein, 206 aa, Zea mays subsp. mays
  misc_feature (1)..(206): Ceres Seq. ID no. 15179188
  misc_feature (58)..(142): Pfam Name: Acetyltransferase (GNAT) family Pfam Description: Acetyltransferase (GNAT) family
  misc_feature (17)..(162): Homolog of NCBI NO: 34881754 NR Description: similar to ARD-1 N-acetyltransferase homologue
  misc_feature (17)..(162): Homolog of NCBI NO: 9845236 NR Description: N-acetyltransferase ARD1 [Mus musculus]
  misc_feature (17)..(162): Homolog of NCBI NO: 37539684 NR Description: hypothetical protein MGC10646 [Homo sapiens]
  misc_feature (17)..(162): Homolog of NCBI NO: 28422354 NR Description: Similar to N-acetyltransferase ARD1 homolog (S.
  misc_feature (17)..(162): Homolog of NCBI NO: 30519923 NR Description: DNA segment, Chr 18, Wayne State University 98,
  misc_feature (4)..(162): Homolog of NCBI NO: 33871453 NR Description: MGC10646 protein [Homo sapiens]
  misc_feature (4)..(162): Homolog of NCBI NO: 39645307 NR Description: Unknown (protein for IMAGE:3922934) [Homo sapiens]
  misc_feature (14)..(195): Homolog of NCBI NO: 14550116 NR Description: silencing group B protein [Zea mays]
  misc_feature (14)..(191): Homolog of NCBI NO: 38344807 NR Description: OSJNBa0043L09.27 [Oryza sativa (japonica
  misc_feature (14)..(204): Homolog of NCBI NO: 15240705 NR Description: N-acetyltransferase, putative [Arabidopsis
SPLCETREEKQAAMVCIRRATVDDLLAMQACNLMCLPENYQMKYYLYHILSWPQLLYVAEDYNGRIVGYVLAKMDEESNECHGHITSLAVLRTHRKLGLATKLMTAAQSAMEQVYEAEYVSLHVRRSNRAAFHLYTETLGYKIHDVEAKYYADGEDAYDMRKYFKGKQNHQQSHGHHHHHHHGGGCCSGDAVDTTPAEDAIATTSK

SEQ ID NO: 110136 - protein, 193 aa, Zea mays subsp. mays
  misc_feature (1)..(193): Ceres Seq. ID no. 15179189
  misc_feature (45)..(129): Pfam Name: Acetyltransferase (GNAT) family Pfam Description: Acetyltransferase (GNAT) family
  misc_feature (4)..(149): Homolog of NCBI NO: 20071196 NR Description: Ard1 protein [Mus musculus]
  misc_feature (4)..(149): Homolog of NCBI NO: 9845236 NR Description: N-acetyltransferase ARD1 [Mus musculus]
  misc_feature (4)..(149): Homolog of NCBI NO: 37539684 NR Description: hypothetical protein MGC10646 [Homo sapiens]
  misc_feature (4)..(149): Homolog of NCBI NO: 28422354 NR Description: Similar to N-acetyltransferase ARD1 homolog (S.
  misc_feature (4)..(149): Homolog of NCBI NO: 30519923 NR Description: DNA segment, Chr 18, Wayne State University 98,
  misc_feature (1)..(149): Homolog of NCBI NO: 33871453 NR Description: MGC10646 protein [Homo sapiens]
  misc_feature (1)..(149): Homolog of NCBI NO: 39645307 NR Description: Unknown (protein for IMAGE:3922934) [Homo sapiens]
  misc_feature (1)..(182): Homolog of NCBI NO: 14550116 NR Description: silencing group B protein [Zea mays]
  misc_feature (1)..(178): Homolog of NCBI NO: 38344807 NR Description: OSJNBa0043L09.27 [Oryza sativa (japonica
  misc_feature (1)..(191): Homolog of NCBI NO: 15240705 NR Description: N-acetyltransferase, putative [Arabidopsis
MVCIRRATVDDLLAMQACNLMCLPENYQMKYYLYHILSWPQLLYVAEDYNGRIVGYVLAKMDEESNECHGHITSLAVLRTHRKLGLATKLMTAAQSAMEQVYEAEYVSLHVRRSNRAAFHLYTETLGYKIHDVEAKYYADGEDAYDMRKYFKGKQNHQQSHGHHHHHHHGGGCCSGDAVDTTPAEDAIATTSK

SEQ ID NO: 110137 - protein, 179 aa, Zea mays subsp. mays
  misc_feature (1)..(179): Ceres Seq. ID no. 15179190
  misc_feature (31)..(115): Pfam Name: Acetyltransferase (GNAT) family Pfam Description: Acetyltransferase (GNAT) family
  misc_feature (1)..(135): Homolog of NCBI NO: 20071196 NR Description: Ard1 protein [Mus musculus]
  misc_feature (1)..(135): Homolog of NCBI NO: 9845236 NR Description: N-acetyltransferase ARD1 [Mus musculus]
  misc_feature (1)..(135): Homolog of NCBI NO: 37539684 NR Description: hypothetical protein MGC10646 [Homo sapiens]
  misc_feature (1)..(135): Homolog of NCBI NO: 28422354 NR Description: Similar to N-acetyltransferase ARD1 homolog (S.
  misc_feature (1)..(135): Homolog of NCBI NO: 30519923 NR Description: DNA segment, Chr 18, Wayne State University 98,
  misc_feature (1)..(135): Homolog of NCBI NO: 33871453 NR Description: MGC10646 protein [Homo sapiens]
  misc_feature (1)..(135): Homolog of NCBI NO: 39645307 NR Description: Unknown (protein for IMAGE:3922934) [Homo sapiens]
  misc_feature (1)..(168): Homolog of NCBI NO: 14550116 NR Description: silencing group B protein [Zea mays]
  misc_feature (1)..(164): Homolog of NCBI NO: 38344807 NR Description: OSJNBa0043L09.27 [Oryza sativa (japonica
  misc_feature (1)..(177): Homolog of NCBI NO: 15240705 NR Description: N-acetyltransferase, putative [Arabidopsis
MQACNLMCLPENYQMKYYLYHILSWPQLLYVAEDYNGRIVGYVLAKMDEESNECHGHITSLAVLRTHRKLGLATKLMTAAQSAMEQVYEAEYVSLHVRRSNRAAFHLYTETLGYKIHDVEAKYYADGEDAYDMRKYFKGKQNHQQSHGHHHHHHHGGGCCSGDAVDTTPAEDAIATTSK

SEQ ID NO: 110138 - DNA, 1180 bp, Zea mays subsp. mays
  misc_feature (1)..(1180): Ceres Seq. ID no. 15179217
atcagtttccaatctgaaaaaaaaaaaacaaaacttctagggtttgcgatttggattcttaatttctctcccatcctcgattaagcataaaacatgccgcaaagacactcgaagaacaacaacgatctcgcgtacttcacgtacgacgagaagaagaagttagggtatggaacccagagggagagattggggaaagactcgatcaagcccttcgatgcttgttccctctgcttgaaacccttcatcgatcccatgtgttgccacaagggtcatgtcttctgcagagagtgtatcctcgaatgcttcctcgcgcagaagaaagacatccagaggaggcttgctgcccatgcttctcaaaagaatcaagataaggacgaagaagaagagaggctaatgttacaaaaggctagagagctcgacgagtttgatcagcaaaaccatggtgctttgcctcgatacagtgacaagagccaaagccaggacaagaatggttttcatggggcgaacagtgtgaaggcgacttcttttgaagaggaagctcttaggacaatgaaagccttctggcttccatcggctacaccaggagcttcggttagagttgaagctccggaaactcatacggtctgtccagagggcaaagagaagctcaagcttaaaaacctctttgctatccgtttcacggaagataacagcgaagaggaagaggagaaggcgaaatcgtcatcaacaagctcttatgacaaaacctacatttgcccgagctgcaaagtcactctgactaacaccatgtctcttgtggcacttagctcatgcggacatgttttctgcaagaagtgtggtgaaaagtttatgcccgtggacaaagtctgtcttgtgtgtgacaaaccttgcaaggacaggaacttggttgggttgaagaaaggaggcactggttttgctgagcacgacgatcatcttgaggctaaagagtacaagcatttgggtagtggctctggtttagggatggtgcggatgggtaagacatgatgattgtggacagcgcatcagatgtttgtgttaaaattgtatacaactaagagactgttttctctatttggcttttggttcttgttcttttcatccgatcttatttgcacttctactaccccaataccatgagtctttcaaagaagtttccatg

SEQ ID NO: 110139 - protein, 310 aa, Zea mays subsp. mays
  misc_feature (1)..(310): Ceres Seq. ID no. 15179218
  misc_feature (137)..(280): Homolog of NCBI NO: 32414767 NR Description: hypothetical protein [Neurospora crassa]
  misc_feature (4)..(292): Homolog of NCBI NO: 15030017 NR Description: Similar to eNOS interacting protein [Homo sapiens]
  misc_feature (4)..(291): Homolog of NCBI NO: 13384956 NR Description: RIKEN cDNA 2310061K06 [Mus musculus]
  misc_feature (4)..(291): Homolog of NCBI NO: 27731403 NR Description: similar to RIKEN cDNA 2310061K06
  misc_feature (4)..(292): Homolog of NCBI NO: 7705716 NR Description: eNOS interacting protein; CGI-25 protein [Homo
  misc_feature (4)..(292): Homolog of NCBI NO: 38174118 NR Description: Unknown (protein for MGC:75989) [Silurana
  misc_feature (4)..(292): Homolog of NCBI NO: 24643007 NR Description: CG6179-PA [Drosophila melanogaster]
  misc_feature (4)..(294): Homolog of NCBI NO: 31213459 NR Description: ENSANGP00000021661 [Anopheles gambiae]
  misc_feature (1)..(310): Homolog of NCBI NO: 26449463 NR Description: unknown protein [Arabidopsis thaliana]
  misc_feature (1)..(310): Homolog of NCBI NO: 18407260 NR Description: expressed protein [Arabidopsis thaliana]
MPQRHSKNNNDLAYFTYDEKKKLGYGTQRERLGKDSIKPFDACSLCLKPFIDPMCCHKGHVFCRECILECFLAQKKDIQRRLAAHASQKNQDKDEEEERLMLQKARELDEFDQQNHGALPRYSDKSQSQDKNGFHGANSVKATSFEEEALRTMKAFWLPSATPGASVRVEAPETHTVCPEGKEKLKLKNLFAIRFTEDNSEEEEEKAKSSSTSSYDKTYICPSCKVTLTNTMSLVALSSCGHVFCKKCGEKFMPVDKVCLVCDKPCKDRNLVGLKKGGTGFAEHDDHLEAKEYKHLGSGSGLGMVRMGKT

SEQ ID NO: 110140 - protein, 257 aa, Zea mays subsp. mays
  misc_feature (1)..(257): Ceres Seq. ID no. 15179219
  misc_feature (84)..(227): Homolog of NCBI NO: 32414767 NR Description: hypothetical protein [Neurospora crassa]
  misc_feature (1)..(239): Homolog of NCBI NO: 15030017 NR Description: Similar to eNOS interacting protein [Homo sapiens]
  misc_feature (1)..(238): Homolog of NCBI NO: 13384956 NR Description: RIKEN cDNA 2310061K06 [Mus musculus]
  misc_feature (1)..(238): Homolog of NCBI NO: 27731403 NR Description: similar to RIKEN cDNA 2310061K06
  misc_feature (1)..(239): Homolog of NCBI NO: 7705716 NR Description: eNOS interacting protein; CGI-25 protein [Homo
  misc_feature (1)..(239): Homolog of NCBI NO: 38174118 NR Description: Unknown (protein for MGC:75989) [Silurana
  misc_feature (1)..(239): Homolog of NCBI NO: 24643007 NR Description: CG6179-PA [Drosophila melanogaster]
  misc_feature (1)..(241): Homolog of NCBI NO: 31213459 NR Description: ENSANGP00000021661 [Anopheles gambiae]
  misc_feature (1)..(257): Homolog of NCBI NO: 26449463 NR Description: unknown protein [Arabidopsis thaliana]
  misc_feature (1)..(257): Homolog of NCBI NO: 18407260 NR Description: expressed protein [Arabidopsis thaliana]
MCCHKGHVFCRECILECFLAQKKDIQRRLAAHASQKNQDKDEEEERLMLQKARELDEFDQQNHGALPRYSDKSQSQDKNGFHGANSVKATSFEEEALRTMKAFWLPSATPGASVRVEAPETHTVCPEGKEKLKLKNLFAIRFTEDNSEEEEEKAKSSSTSSYDKTYICPSCKVTLTNTMSLVALSSCGHVFCKKCGEKFMPVDKVCLVCDKPCKDRNLVGLKKGGTGFAEHDDHLEAKEYKHLGSGSGLGMVRMGKT

SEQ ID NO: 110141 - protein, 210 aa, Zea mays subsp. mays
  misc_feature (1)..(210): Ceres Seq. ID no. 15179220
  misc_feature (37)..(180): Homolog of NCBI NO: 32414767 NR Description: hypothetical protein [Neurospora crassa]
  misc_feature (1)..(192): Homolog of NCBI NO: 15030017 NR Description: Similar to eNOS interacting protein [Homo sapiens]
  misc_feature (1)..(191): Homolog of NCBI NO: 13384956 NR Description: RIKEN cDNA 2310061K06 [Mus musculus]
  misc_feature (1)..(191): Homolog of NCBI NO: 27731403 NR Description: similar to RIKEN cDNA 2310061K06
  misc_feature (1)..(192): Homolog of NCBI NO: 7705716 NR Description: eNOS interacting protein; CGI-25 protein [Homo
  misc_feature (1)..(192): Homolog of NCBI NO: 38174118 NR Description: Unknown (protein for MGC:75989) [Silurana
  misc_feature (1)..(192): Homolog of NCBI NO: 24643007 NR Description: CG6179-PA [Drosophila melanogaster]
  misc_feature (1)..(194): Homolog of NCBI NO: 31213459 NR Description: ENSANGP00000021661 [Anopheles gambiae]
  misc_feature (1)..(210): Homolog of NCBI NO: 26449463 NR Description: unknown protein [Arabidopsis thaliana]
  misc_feature (1)..(210): Homolog of NCBI NO: 18407260 NR Description: expressed protein [Arabidopsis thaliana]
MLQKARELDEFDQQNHGALPRYSDKSQSQDKNGFHGANSVKATSFEEEALRTMKAFWLPSATPGASVRVEAPETHTVCPEGKEKLKLKNLFAIRFTEDNSEEEEEKAKSSSTSSYDKTYICPSCKVTLTNTMSLVALSSCGHVFCKKCGEKFMPVDKVCLVCDKPCKDRNLVGLKKGGTGFAEHDDHLEAKEYKHLGSGSGLGMVRMGKT

SEQ ID NO: 110142 - DNA, 1006 bp, Zea mays subsp. mays
  misc_feature (1)..(1006): Ceres Seq. ID no. 15179213
aaagcttttcagatcttaatagaagaagaacctaaacttctctcgatccgacaaaaagatgacttttactattccgatcgataacggagattccgtgaagaccgcagaagctgattcacaaagaacactgtacccatatgttactgggacttctattgtcgcaatcaagtacaaggatggggttttaatggcttccgacatgggaggttcatatggatccaccttaaggtacaagaacattgagagaatgaaggctattggtaagcattctcttctcggtgccagcggagaaatcagtgactttcaggagattcttcgttatcttgatgagcttgttttgaatgataacatgtgggatgatggtaactctttggggccgaaagaggtgcacaactatctgacccgagtgatgtacaaccgtcgcaacaagtttaaccctctctggaacactctcgtccttggaggtgtcaaaaatggggaaagttaccttggcatggtgtcaatgattggtgttagtttcgaggacaatcatgttgccaccggatttggaaaccacctcgctaggcctattcttcgtgatgagtggcatgcagacctgagttttgaagatggtgtcaagctccttgagaaatgtatgcgtgtgcttctgtaccgtgacagatctgccattaacaagcttcagatagcgaagatcacagaagaaggcgtgacggtttctcagccatactcgttgaagacattctgggaattcaaggcgttcaacaatccgactgctggtgctgaaggctcctggtaagaagcctaatcaaccacatactgcctggagatctttcaagaacgcttcctttttttatgttatttcgtgtgatgttaaattactatgtactctagtggttttcctagcaacaattgtggttatttcatgaaatttcggagttagatcgataaaaatttatggatatttcttaatatctttggactaaactaatctcaaaattttcttcgt

SEQ ID NO: 110143 - protein, 245 aa, Zea mays subsp. mays
  misc_feature (1)..(245): Ceres Seq. ID no. 15179214
  misc_feature (27)..(212): Pfam Name: Proteasome A-type and B-type Pfam Description: Proteasome A-type and B-type
  misc_feature (17)..(230): Homolog of NCBI NO: 14198355 NR Description: Psmb4 protein [Mus musculus]
  misc_feature (21)..(229): Homolog of NCBI NO: 28828772 NR Description: similar to Arabidopsis thaliana (Mouse-ear
  misc_feature (28)..(230): Homolog of NCBI NO: 104166 NR Description: C 3.4.25.1 proteasome endopeptidase complex ()
  misc_feature (21)..(230): Homolog of NCBI NO: 33417170 NR Description: Unknown (protein for MGC:69145) [Xenopus laevis]
  misc_feature (21)..(230): Homolog of NCBI NO: 3915809 NR Description: Proteasome subunit beta type 4 precursor beta chain) (Macropain beta chain) (Multicatalytic endopeptidase
  misc_feature (125)..(245): Homolog of NCBI NO: 2511598 NR Description: multicatalytic endopeptidase complex, proteasome
  misc_feature (49)..(177): Homolog of NCBI NO: 14594935 NR Description: putative beta7 proteasome subunit [Nicotiana
  misc_feature (1)..(245): Homolog of NCBI NO: 8671512 NR Description: beta 7 subunit of 20S proteasome
  misc_feature (2)..(245): Homolog of NCBI NO: 25290071 NR Description: C 3.4.25.1 proteasome endopeptidase complex ()
  misc_feature (2)..(245): Homolog of NCBI NO: 15223537 NR Description: 20S proteasome beta subunit G1 (PBG1)
MTFTIPIDNGDSVKTAEADSQRTLYPYVTGTSIVAIKYKDGVLMASDMGGSYGSTLRYKNIERMKAIGKHSLLGASGEISDFQEILRYLDELVLNDNMWDDGNSLGPKEVHNYLTRVMYNRRNKFNPLWNTLVLGGVKNGESYLGMVSMIGVSFEDNHVATGFGNHLARPILRDEWHADLSFEDGVKLLEKCMRVLLYRDRSAINKLQIAKITEEGVTVSQPYSLKTFWEFKAFNNPTAGAEGSW

SEQ ID NO: 110144 - protein, 202 aa, Zea mays subsp. mays
  misc_feature (1)..(202): Ceres Seq. ID no. 15179215
  misc_feature (1)..(169): Pfam Name: Proteasome A-type and B-type Pfam Description: Proteasome A-type and B-type
  misc_feature (1)..(187): Homolog of NCBI NO: 14198355 NR Description: Psmb4 protein [Mus musculus]
  misc_feature (1)..(186): Homolog of NCBI NO: 28828772 NR Description: similar to Arabidopsis thaliana (Mouse-ear
  misc_feature (1)..(187): Homolog of NCBI NO: 104166 NR Description: C 3.4.25.1 proteasome endopeptidase complex ()
  misc_feature (1)..(187): Homolog of NCBI NO: 33417170 NR Description: Unknown (protein for MGC:69145) [Xenopus laevis]
  misc_feature (1)..(187): Homolog of NCBI NO: 3915809 NR Description: Proteasome subunit beta type 4 precursor beta chain) (Macropain beta chain) (Multicatalytic endopeptidase
  misc_feature (82)..(202): Homolog of NCBI NO: 2511598 NR Description: multicatalytic endopeptidase complex, proteasome
  misc_feature (6)..(134): Homolog of NCBI NO: 14594935 NR Description: putative beta7 proteasome subunit [Nicotiana
  misc_feature (1)..(202): Homolog of NCBI NO: 8671512 NR Description: beta 7 subunit of 20S proteasome
  misc_feature (1)..(202): Homolog of NCBI NO: 25290071 NR Description: C 3.4.25.1 proteasome endopeptidase complex ()
  misc_feature (1)..(202): Homolog of NCBI NO: 15223537 NR Description: 20S proteasome beta subunit G1 (PBG1)
MASDMGGSYGSTLRYKNIERMKAIGKHSLLGASGEISDFQEILRYLDELVLNDNMWDDGNSLGPKEVHNYLTRVMYNRRNKFNPLWNTLVLGGVKNGESYLGMVSMIGVSFEDNHVATGFGNHLARPILRDEWHADLSFEDGVKLLEKCMRVLLYRDRSAINKLQIAKITEEGVTVSQPYSLKTFWEFKAFNNPTAGAEGSW

SEQ ID NO: 110145 - protein, 198 aa, Zea mays subsp. mays
  misc_feature (1)..(198): Ceres Seq. ID no. 15179216
  misc_feature (1)..(165): Pfam Name: Proteasome A-type and B-type Pfam Description: Proteasome A-type and B-type
  misc_feature (1)..(183): Homolog of NCBI NO: 14198355 NR Description: Psmb4 protein [Mus musculus]
  misc_feature (1)..(182): Homolog of NCBI NO: 28828772 NR Description: similar to Arabidopsis thaliana (Mouse-ear
  misc_feature (1)..(183): Homolog of NCBI NO: 104166 NR Description: C 3.4.25.1 proteasome endopeptidase complex ()
  misc_feature (1)..(183): Homolog of NCBI NO: 33417170 NR Description: Unknown (protein for MGC:69145) [Xenopus laevis]
  misc_feature (1)..(183): Homolog of NCBI NO: 3915809 NR Description: Proteasome subunit beta type 4 precursor beta chain) (Macropain beta chain) (Multicatalytic endopeptidase
  misc_feature (78)..(198): Homolog of NCBI NO: 2511598 NR Description: multicatalytic endopeptidase complex, proteasome
  misc_feature (2)..(130): Homolog of NCBI NO: 14594935 NR Description: putative beta7 proteasome subunit [Nicotiana
  misc_feature (1)..(198): Homolog of NCBI NO: 8671512 NR Description: beta 7 subunit of 20S proteasome
  misc_feature (1)..(198): Homolog of NCBI NO: 25290071 NR Description: C 3.4.25.1 proteasome endopeptidase complex ()
  misc_feature (1)..(198): Homolog of NCBI NO: 15223537 NR Description: 20S proteasome beta subunit G1 (PBG1)
MGGSYGSTLRYKNIERMKAIGKHSLLGASGEISDFQEILRYLDELVLNDNMWDDGNSLGPKEVHNYLTRVMYNRRNKFNPLWNTLVLGGVKNGESYLGMVSMIGVSFEDNHVATGFGNHLARPILRDEWHADLSFEDGVKLLEKCMRVLLYRDRSAINKLQIAKITEEGVTVSQPYSLKTFWEFKAFNNPTAGAEGSW

SEQ ID NO: 110146 - DNA, 1725 bp, Zea mays subsp. mays
  misc_feature (1)..(1725): Ceres Seq. ID no. 15179412
actaacctaaccagctgcatctcctctctctcctaactcctaagctctcagccgtcgccgtcgccgtcgccgtcgctctcctctctgtccctctccacgccgctctcctctctcctccgagccgcagctccctctccccagcgcgccgccactgtaccggcatctgggccaattcgccccactaggagggaaacaaactgctgcacagcttcccggggactggatctccattggccacagcacccagtggctctggtactccgtgtacgcaaccttcttccattaagaattggtcatcatggcgtgggagctcattgaagtcccgggcaacttgaatccttctctcaaagactcttcagttgatgtggtggccgccaagattgatcccaagttagccaatactctcattaggcagttaagccaggtgtgccctttggagaatctgaggcatgtaaagcgtgtacgtcgacgtactgaatgtggtggaaaatctgagttatcaataatcctatgtgtttctactgggtctgaaacttgtaacatacagttctctgaagatctacagaagatagtggatacttatcagctgagtcctttcaccgcaaaagttgccaggtgttgtgctacatcaaaagaggagtgggaggaacagtgcaaactttggccaacatcttaccatcctgcacatgaccttggtattgtccgtggatttcaagaggaggaattaccatcaatatttaattgcatgaaggctgctattcagttatcaaaggcaggcaatgctgcaatcattgttgatccatcaagcatgcaaatagttgcaaaggccactgaccatacacacaagcatgatactcctgaagaagggaacacattttctgaagcgaatgcagatgttacctgctcttggaatgcatcgactgatgatgacaacaatctgtcacttccaggatcctttcttcctaaactcaacagtttgaacatggaaatcccatgtataaatccttggggatggatgaaaaaaaggacttgtgagcagaagccatcgccatgcgatggctgttctgcatggcatcctctgagacatgctcccatggctgccattgaaaatgctgctgtgagggacagaacgatgtttccttcttcgatttcaataaccaagccagattcagatggcagtcccgagaactgctgcgacaatgaaccagcaaaaaggctgaagacggatacaaaagataatgagaaaccggcatctgaatcatctggtggcgacctgtttgaaaccagcagaccatatctctgcacagggtttgatatctaccttgtttgggaaccatgcacaatgtgtgcgatggcgcttgtgcatcataggttcaagcgcgtgttctacgccttccccaatcctgtggccggagcactcggtggagtctacaggttgcatggggagaggagtctaaaccatcactataatgtgtttagggtttcagtacctgaggcgtacttgaatgggttgaactgttattcgaaggaatgctgatccaacacctttccgtttttatttagaaaaaaagaggatccaacactgtgttccttttttatttttggcacaagggcttcatattaggcctagacttgcccatctgtattattaaatgttttggtaacaaatgtgtttatggatgtaaacgttggtgctattttttattagtttacttaaatttaatg

SEQ ID NO: 110147 - protein, 412 aa, Zea mays subsp. mays
  misc_feature (1)..(412): Ceres Seq. ID no. 15179413
  misc_feature (300)..(364): Pfam Name: Cytidine and deoxycytidylate deaminase Pfam Description: Cytidine and deoxycytidylate deaminase
  misc_feature (325)..(394): Homolog of NCBI NO: 19923945 NR Description: hypothetical protein BC011824 [Homo sapiens]
  misc_feature (3)..(179): Homolog of NCBI NO: 19923945 NR Description: hypothetical protein BC011824 [Homo sapiens]
  misc_feature (328)..(394): Homolog of NCBI NO: 22204218 NR Description: SI:dZ211O13.3 (novel protein) [Danio rerio]
  misc_feature (3)..(179): Homolog of NCBI NO: 22204218 NR Description: SI:dZ211O13.3 (novel protein) [Danio rerio]
  misc_feature (328)..(394): Homolog of NCBI NO: 22204386 NR Description: SI:dZ72B14.5 (novel protein) [Danio rerio]
  misc_feature (3)..(179): Homolog of NCBI NO: 22204386 NR Description: SI:dZ72B14.5 (novel protein) [Danio rerio]
  misc_feature (2)..(104): Homolog of NCBI NO: 30689567 NR Description: expressed protein [Arabidopsis thaliana]
  misc_feature (100)..(399): Homolog of NCBI NO: 30689567 NR Description: expressed protein [Arabidopsis thaliana]
  misc_feature (2)..(104): Homolog of NCBI NO: 9759207 NR Description: gene_id:MXC17.5~unknown protein [Arabidopsis
  misc_feature (100)..(399): Homolog of NCBI NO: 9759207 NR Description: gene_id:MXC17.5~unknown protein [Arabidopsis
MAWELIEVPGNLNPSLKDSSVDVVAAKIDPKLANTLIRQLSQVCPLENLRHVKRVRRRTECGGKSELSIILCVSTGSETCNIQFSEDLQKIVDTYQLSPFTAKVARCCATSKEEWEEQCKLWPTSYHPAHDLGIVRGFQEEELPSIFNCMKAAIQLSKAGNAAIIVDPSSMQIVAKATDHTHKHDTPEEGNTFSEANADVTCSWNASTDDDNNLSLPGSFLPKLNSLNMEIPCINPWGWMKKRTCEQKPSPCDGCSAWHPLRHAPMAAIENAAVRDRTMFPSSISITKPDSDGSPENCCDNEPAKRLKTDTKDNEKPASESSGGDLFETSRPYLCTGFDIYLVWEPCTMCAMALVHHRFKRVFYAFPNPVAGALGGVYRLHGERSLNHHYNVFRVSVPEAYLNGLNCYSKEC

SEQ ID NO: 110148 - protein, 263 aa, Zea mays subsp. mays
  misc_feature (1)..(263): Ceres Seq. ID no. 15179414
  misc_feature (151)..(215): Pfam Name: Cytidine and deoxycytidylate deaminase Pfam Description: Cytidine and deoxycytidylate deaminase
  misc_feature (151)..(250): Homolog of NCBI NO: 19922544 NR Description: CG10927-PA [Drosophila melanogaster]
  misc_feature (149)..(246): Homolog of NCBI NO: 31199497 NR Description: ENSANGP00000021467 [Anopheles gambiae]
  misc_feature (176)..(245): Homolog of NCBI NO: 19923945 NR Description: hypothetical protein BC011824 [Homo sapiens]
  misc_feature (1)..(30): Homolog of NCBI NO: 19923945 NR Description: hypothetical protein BC011824 [Homo sapiens]
  misc_feature (179)..(245): Homolog of NCBI NO: 22204218 NR Description: SI:dZ211O13.3 (novel protein) [Danio rerio]
  misc_feature (1)..(30): Homolog of NCBI NO: 22204218 NR Description: SI:dZ211O13.3 (novel protein) [Danio rerio]
  misc_feature (179)..(245): Homolog of NCBI NO: 22204386 NR Description: SI:dZ72B14.5 (novel protein) [Danio rerio]
  misc_feature (1)..(30): Homolog of NCBI NO: 22204386 NR Description: SI:dZ72B14.5 (novel protein) [Danio rerio]
  misc_feature (1)..(250): Homolog of NCBI NO: 30689567 NR Description: expressed protein [Arabidopsis thaliana]
  misc_feature (1)..(250): Homolog of NCBI NO: 9759207 NR Description: gene_id:MXC17.5~unknown protein [Arabidopsis
MKAAIQLSKAGNAAIIVDPSSMQIVAKATDHTHKHDTPEEGNTFSEANADVTCSWNASTDDDNNLSLPGSFLPKLNSLNMEIPCINPWGWMKKRTCEQKPSPCDGCSAWHPLRHAPMAAIENAAVRDRTMFPSSISITKPDSDGSPENCCDNEPAKRLKTDTKDNEKPASESSGGDLFETSRPYLCTGFDIYLVWEPCTMCAMALVHHRFKRVFYAFPNPVAGALGGVYRLHGERSLNHHYNVFRVSVPEAYLNGLNCYSKEC

SEQ ID NO: 110149 - protein, 242 aa, Zea mays subsp. mays
  misc_feature (1)..(242): Ceres Seq. ID no. 15179415
  misc_feature (130)..(194): Pfam Name: Cytidine and deoxycytidylate deaminase Pfam Description: Cytidine and deoxycytidylate deaminase
  misc_feature (159)..(238): Homolog of NCBI NO: 39584760 NR Description: Hypothetical protein CBG13218 [Caenorhabditis
  misc_feature (163)..(225): Homolog of NCBI NO: 25144639 NR Description: nitrogen fixation protein like (3M326)
  misc_feature (89)..(224): Homolog of NCBI NO: 23508743 NR Description: hypothetical protein [Plasmodium falciparum 3D7]
  misc_feature (130)..(229): Homolog of NCBI NO: 19922544 NR Description: CG10927-PA [Drosophila melanogaster]
  misc_feature (128)..(225): Homolog of NCBI NO: 31199497 NR Description: ENSANGP00000021467 [Anopheles gambiae]
  misc_feature (155)..(224): Homolog of NCBI NO: 19923945 NR Description: hypothetical protein BC011824 [Homo sapiens]
  misc_feature (158)..(224): Homolog of NCBI NO: 22204218 NR Description: SI:dZ211O13.3 (novel protein) [Danio rerio]
  misc_feature (158)..(224): Homolog of NCBI NO: 22204386 NR Description: SI:dZ72B14.5 (novel protein) [Danio rerio]
  misc_feature (1)..(229): Homolog of NCBI NO: 30689567 NR Description: expressed protein [Arabidopsis thaliana]
  misc_feature (1)..(229): Homolog of NCBI NO: 9759207 NR Description: gene_id:MXC17.5~unknown protein [Arabidopsis
MQIVAKATDHTHKHDTPEEGNTFSEANADVTCSWNASTDDDNNLSLPGSFLPKLNSLNMEIPCINPWGWMKKRTCEQKPSPCDGCSAWHPLRHAPMAAIENAAVRDRTMFPSSISITKPDSDGSPENCCDNEPAKRLKTDTKDNEKPASESSGGDLFETSRPYLCTGFDIYLVWEPCTMCAMALVHHRFKRVFYAFPNPVAGALGGVYRLHGERSLNHHYNVFRVSVPEAYLNGLNCYSKEC

SEQ ID NO: 110150 - DNA, 860 bp, Zea mays subsp. mays
  misc_feature (1)..(860): Ceres Seq. ID no. 15179231
aaaagcgtaacatttctcttaattacaaagacacctctaagaatacttctcacaatcacgagactgagatgtcggatgaaatacctccgaaagggatcctcaagagcgaagctctgagacagtacatcttggagacctcagcatatccaagagagcatgagctgctcaaggagcttcggaaagtaacagaagagaaatttgggaacttaatcgaaatggtgattccagtggatgagggcatttttctatcgatgcttttaaagatcataaacgctaagaacactcttgagctcggtgttttcactggttactctcttctcaccacggcccttgctttgcctgaagatggtcgcattactgcaattgatattgacaaggaagcctatgaagtgggattagagtttatgaagaaagcaggtgttgatcacaagatcaatttcatctattgcgatggtatggaggtcttagacaaattggttaacgacaaccaggagtttgatttcatatttgctgatgctgacaagccaaactacctcaacttccttgagagatttctgaaattggtgaaggttggaggaatcattgcattcgacaacaccttgtggtttagttttgtggttgaggaagaagagagcgttcctgagtttatgagggaatcaagagcggctcttatagaatttaataagaaattggctttggatcctcgagtggaaatctctcagatctccgttggagatggtgtcactctatgcagacgccttgtgtgagcaaaagactatttaaatatatatattttttttttgataatcgactatttaaatattaagaccaaagttaggaataaaactgttagatgctcc

SEQ ID NO: 110151 - protein, 254 aa, Zea mays subsp. mays
  misc_feature (1)..(254): Ceres Seq. ID no. 15179232
  misc_feature (43)..(253): Pfam Name: O-methyltransferase Pfam Description: O-methyltransferase
  misc_feature (18)..(253): Homolog of NCBI NO: 3023437 NR Description: Caffeoyl-CoA O-methyltransferase
  misc_feature (26)..(253): Homolog of NCBI NO: 37720881 NR Description: O-methyltransferase [Mesembryanthemum
  misc_feature (20)..(253): Homolog of NCBI NO: 30580341 NR Description: Caffeoyl-CoA O-methyltransferase
  misc_feature (71)..(254): Homolog of NCBI NO: 15221807 NR Description: caffeoyl-CoA 3-O-methyltransferase, putative
  misc_feature (23)..(253): Homolog of NCBI NO: 3023432 NR Description: Caffeoyl-CoA O-methyltransferase
  misc_feature (23)..(254): Homolog of NCBI NO: 18408913 NR Description: caffeoyl-CoA 3-O-methyltransferase, putative
  misc_feature (23)..(254): Homolog of NCBI NO: 30580370 NR Description: Putative caffeoyl-CoA O-methyltransferase
  misc_feature (43)..(254): Homolog of NCBI NO: 682728 NR Description: S-adenosyl-L-methionine:trans-caffeoyl-Coenzyme A
  misc_feature (43)..(254): Homolog of NCBI NO: 18408911 NR Description: caffeoyl-CoA 3-O-methyltransferase, putative
  misc_feature (23)..(254): Homolog of NCBI NO: 30580369 NR Description: Putative caffeoyl-CoA O-methyltransferase
KRNISLNYKDTSKNTSHNHETEMSDEIPPKGILKSEALRQYILETSAYPREHELLKELRKVTEEKFGNLIEMVIPVDEGIFLSMLLKIINAKNTLELGVFTGYSLLTTALALPEDGRITAIDIDKEAYEVGLEFMKKAGVDHKINFIYCDGMEVLDKLVNDNQEFDFIFADADKPNYLNFLERFLKLVKVGGIIAFDNTLWFSFVVEEEESVPEFMRESRAALIEFNKKLALDPRVEISQISVGDGVTLCRRLV

SEQ ID NO: 110152 - protein, 232 aa, Zea mays subsp. mays
  misc_feature (1)..(232): Ceres Seq. ID no. 15179233
  misc_feature (21)..(231): Pfam Name: O-methyltransferase Pfam Description: O-methyltransferase
  misc_feature (1)..(231): Homolog of NCBI NO: 3023437 NR Description: Caffeoyl-CoA O-methyltransferase
  misc_feature (4)..(231): Homolog of NCBI NO: 37720881 NR Description: O-methyltransferase [Mesembryanthemum
  misc_feature (1)..(231): Homolog of NCBI NO: 30580341 NR Description: Caffeoyl-CoA O-methyltransferase
  misc_feature (49)..(232): Homolog of NCBI NO: 15221807 NR Description: caffeoyl-CoA 3-O-methyltransferase, putative
  misc_feature (1)..(231): Homolog of NCBI NO: 3023432 NR Description: Caffeoyl-CoA O-methyltransferase
  misc_feature (1)..(232): Homolog of NCBI NO: 18408913 NR Description: caffeoyl-CoA 3-O-methyltransferase, putative
  misc_feature (1)..(232): Homolog of NCBI NO: 30580370 NR Description: Putative caffeoyl-CoA O-methyltransferase
  misc_feature (21)..(232): Homolog of NCBI NO: 682728 NR Description: S-adenosyl-L-methionine:trans-caffeoyl-Coenzyme A
  misc_feature (21)..(232): Homolog of NCBI NO: 18408911 NR Description: caffeoyl-CoA 3-O-methyltransferase, putative
  misc_feature (1)..(232): Homolog of NCBI NO: 30580369 NR Description: Putative caffeoyl-CoA O-methyltransferase
MSDEIPPKGILKSEALRQYILETSAYPREHELLKELRKVTEEKFGNLIEMVIPVDEGIFLSMLLKIINAKNTLELGVFTGYSLLTTALALPEDGRITAIDIDKEAYEVGLEFMKKAGVDHKINFIYCDGMEVLDKLVNDNQEFDFIFADADKPNYLNFLERFLKLVKVGGIIAFDNTLWFSFVVEEEESVPEFMRESRAALIEFNKKLALDPRVEISQISVGDGVTLCRRLV

SEQ ID NO: 110153 - protein, 183 aa, Zea mays subsp. mays
  misc_feature (1)..(183): Ceres Seq. ID no. 15179234
  misc_feature (1)..(182): Pfam Name: O-methyltransferase Pfam Description: O-methyltransferase
  misc_feature (1)..(182): Homolog of NCBI NO: 3023437 NR Description: Caffeoyl-CoA O-methyltransferase
  misc_feature (1)..(182): Homolog of NCBI NO: 37720881 NR Description: O-methyltransferase [Mesembryanthemum
  misc_feature (1)..(182): Homolog of NCBI NO: 30580341 NR Description: Caffeoyl-CoA O-methyltransferase
  misc_feature (1)..(183): Homolog of NCBI NO: 15221807 NR Description: caffeoyl-CoA 3-O-methyltransferase, putative
  misc_feature (1)..(182): Homolog of NCBI NO: 3023432 NR Description: Caffeoyl-CoA O-methyltransferase
  misc_feature (1)..(183): Homolog of NCBI NO: 18408913 NR Description: caffeoyl-CoA 3-O-methyltransferase, putative
  misc_feature (1)..(183): Homolog of NCBI NO: 30580370 NR Description: Putative caffeoyl-CoA O-methyltransferase
  misc_feature (1)..(183): Homolog of NCBI NO: 682728 NR Description: S-adenosyl-L-methionine:trans-caffeoyl-Coenzyme A
  misc_feature (1)..(183): Homolog of NCBI NO: 18408911 NR Description: caffeoyl-CoA 3-O-methyltransferase, putative
  misc_feature (1)..(183): Homolog of NCBI NO: 30580369 NR Description: Putative caffeoyl-CoA O-methyltransferase
MVIPVDEGIFLSMLLKIINAKNTLELGVFTGYSLLTTALALPEDGRITAIDIDKEAYEVGLEFMKKAGVDHKINFIYCDGMEVLDKLVNDNQEFDFIFADADKPNYLNFLERFLKLVKVGGIIAFDNTLWFSFVVEEEESVPEFMRESRAALIEFNKKLALDPRVEISQISVGDGVTLCRRLV

SEQ ID NO: 110154 - DNA, 1142 bp, Zea mays subsp. mays
  misc_feature (1)..(1142): Ceres Seq. ID no. 15179235
cttatgtttatgtcttcttcttctctccatctccttccaaagtctctctctctctctatcgcctttctctctctctctctctccacttccgaccacatcgggtctcagaaacccattgatgcggacctcgatctttctccactagctacagatctacacccttacacaaaccgtatatacatacacactttgtatctctctgtaaaatctatggccgccgtctcctctaaccctcgcaccgtcgaagagatcttcaaggattacaccgctcgtcgctccgccctcctccgtgctctaactaaagatgttgatgatttctactctcaatgcgatccggagaaggagaatttgtgtttgtatggacatccgaatgagtcgtgggaagtgaatctaccggcggaggaagttcctcctgagcttccggagcctgcgcttggtattaatttcgctagagatggtatgcagaggaaggattggctctcgcttgttgctgttcatagtgattgttggttgctctctgtttctttctactttggtgctcgccttaaccgcaacgagaggaagcggttgttcagtctgatcaacgatctcccaactctcttcgatgtagtgactggtaggaaacccatcaaagacaacaagccaagctcagattctggaagcaaatccagaaacggcactaagagatcaatagaagggcagacaaagagtccaacaccaagaccgatggaagagagctacgaggacgaggaagaagaagaagacgagcacggagacactctctgcggtatctgtggaggcaattatacgcaagatgagttctggatttgctgtgatgtttgtgaacgttggtaccatggaaaatgcgtgaagatcacccctgccaaagcagacagcatcaagcagtataaatgccctccttgctgtgcaaagaaaggaagacagtgattatgatcatcatcatcatcatcatctcccagagagactggttctcatgtcttaatattaatcatcctttttcttgtttcattaaccttttaatttcaaagcatacaaaaactctctctttagatcaccggaaagggattccaagaagttgagagagtgtagcaactgtttgagtatttttattcatataagag

SEQ ID NO: 110155 - protein, 315 aa, Zea mays subsp. mays
  misc_feature (1)..(315): Ceres Seq. ID no. 15179236
  misc_feature (261)..(311): Pfam Name: PHD-finger Pfam Description: PHD-finger
  misc_feature (77)..(285): Homolog of NCBI NO: 14192880 NR Description: Putative nucleic acid binding protein [Oryza
  misc_feature (78)..(312): Homolog of NCBI NO: 15223786 NR Description: nucleic acid binding protein (alfin-1) -related
  misc_feature (77)..(314): Homolog of NCBI NO: 30687843 NR Description: zinc finger protein - like [Arabidopsis thaliana]
  misc_feature (77)..(314): Homolog of NCBI NO: 15239624 NR Description: nucleic acid binding protein - like [Arabidopsis
  misc_feature (72)..(315): Homolog of NCBI NO: 29124114 NR Description: putative PHD-type zinc finger protein
  misc_feature (72)..(315): Homolog of NCBI NO: 28876028 NR Description: putative PHD-finger domain containing protein
  misc_feature (77)..(314): Homolog of NCBI NO: 15229157 NR Description: nucleic acid binding protein-related [Arabidopsis
  misc_feature (71)..(315): Homolog of NCBI NO: 34900462 NR Description: putative nucleic acid binding protein
  misc_feature (71)..(315): Homolog of NCBI NO: 15239180 NR Description: nucleic acid binding protein-related [Arabidopsis
  misc_feature (72)..(315): Homolog of NCBI NO: 15229696 NR Description: nucleic acid binding protein -related
LMFMSSSSLHLLPKSLSLSIAFLSLSLSTSDHIGSQKPIDADLDLSPLATDLHPYTNRIYIHTLYLSVKSMAAVSSNPRTVEEIFKDYTARRSALLRALTKDVDDFYSQCDPEKENLCLYGHPNESWEVNLPAEEVPPELPEPALGINFARDGMQRKDWLSLVAVHSDCWLLSVSFYFGARLNRNERKRLFSLINDLPTLFDVVTGRKPIKDNKPSSDSGSKSRNGTKRSIEGQTKSPTPRPMEESYEDEEEEEDEHGDTLCGICGGNYTQDEFWICCDVCERWYHGKCVKITPAKADSIKQYKCPPCCAKKGRQ

SEQ ID NO: 110156 - protein, 314 aa, Zea mays subsp. mays
  misc_feature (1)..(314): Ceres Seq. ID no. 15179237
  misc_feature (260)..(310): Pfam Name: PHD-finger Pfam Description: PHD-finger
  misc_feature (70)..(314): Homolog of NCBI NO: 34900462 NR Description: putative nucleic acid binding protein
  misc_feature (70)..(314): Homolog of NCBI NO: 15239180 NR Description: nucleic acid binding protein-related [Arabidopsis
  misc_feature (77)..(311): Homolog of NCBI NO: 15223786 NR Description: nucleic acid binding protein (alfin-1) -related
  misc_feature (76)..(313): Homolog of NCBI NO: 15239624 NR Description: nucleic acid binding protein - like [Arabidopsis
  misc_feature (71)..(314): Homolog of NCBI NO: 28876028 NR Description: putative PHD-finger domain containing protein
  misc_feature (76)..(313): Homolog of NCBI NO: 15229157 NR Description: nucleic acid binding protein-related [Arabidopsis
  misc_feature (71)..(314): Homolog of NCBI NO: 29124114 NR Description: putative PHD-type zinc finger protein
  misc_feature (76)..(313): Homolog of NCBI NO: 30687843 NR Description: zinc finger protein - like [Arabidopsis thaliana]
  misc_feature (76)..(284): Homolog of NCBI NO: 14192880 NR Description: Putative nucleic acid binding protein [Oryza
  misc_feature (71)..(314): Homolog of NCBI NO: 15229696 NR Description: nucleic acid binding protein -related
MFMSSSSLHLLPKSLSLSIAFLSLSLSTSDHIGSQKPIDADLDLSPLATDLHPYTNRIYIHTLYLSVKSMAAVSSNPRTVEEIFKDYTARRSALLRALTKDVDDFYSQCDPEKENLCLYGHPNESWEVNLPAEEVPPELPEPALGINFARDGMQRKDWLSLVAVHSDCWLLSVSFYFGARLNRNERKRLFSLINDLPTLFDVVTGRKPIKDNKPSSDSGSKSRNGTKRSIEGQTKSPTPRPMEESYEDEEEEEDEHGDTLCGICGGNYTQDEFWICCDVCERWYHGKCVKITPAKADSIKQYKCPPCCAKKGRQ

SEQ ID NO: 110157 - protein, 312 aa, Zea mays subsp. mays
  misc_feature (1)..(312): Ceres Seq. ID no. 15179238
  misc_feature (258)..(308): Pfam Name: PHD-finger Pfam Description: PHD-finger
  misc_feature (74)..(282): Homolog of NCBI NO: 14192880 NR Description: Putative nucleic acid binding protein [Oryza
  misc_feature (75)..(309): Homolog of NCBI NO: 15223786 NR Description: nucleic acid binding protein (alfin-1) -related
  misc_feature (74)..(311): Homolog of NCBI NO: 30687843 NR Description: zinc finger protein - like [Arabidopsis thaliana]
  misc_feature (74)..(311): Homolog of NCBI NO: 15239624 NR Description: nucleic acid binding protein - like [Arabidopsis
  misc_feature (69)..(312): Homolog of NCBI NO: 29124114 NR Description: putative PHD-type zinc finger protein
  misc_feature (69)..(312): Homolog of NCBI NO: 28876028 NR Description: putative PHD-finger domain containing protein
  misc_feature (74)..(311): Homolog of NCBI NO: 15229157 NR Description: nucleic acid binding protein-related [Arabidopsis
  misc_feature (68)..(312): Homolog of NCBI NO: 34900462 NR Description: putative nucleic acid binding protein
  misc_feature (68)..(312): Homolog of NCBI NO: 15239180 NR Description: nucleic acid binding protein-related [Arabidopsis
  misc_feature (69)..(312): Homolog of NCBI NO: 15229696 NR Description: nucleic acid binding protein -related
MSSSSLHLLPKSLSLSIAFLSLSLSTSDHIGSQKPIDADLDLSPLATDLHPYTNRIYIHTLYLSVKSMAAVSSNPRTVEEIFKDYTARRSALLRALTKDVDDFYSQCDPEKENLCLYGHPNESWEVNLPAEEVPPELPEPALGINFARDGMQRKDWLSLVAVHSDCWLLSVSFYFGARLNRNERKRLFSLINDLPTLFDVVTGRKPIKDNKPSSDSGSKSRNGTKRSIEGQTKSPTPRPMEESYEDEEEEEDEHGDTLCGICGGNYTQDEFWICCDVCERWYHGKCVKITPAKADSIKQYKCPPCCAKKGRQ

SEQ ID NO: 110158 - DNA, 1013 bp, Zea mays subsp. mays
  misc_feature (1)..(1013): Ceres Seq. ID no. 15179183
aaagccaacacatctctactgtctccggcgagatctcaatttttgatccttcacggtggcgtcgacgtccgggcaacaacaagctctctcgagaagaaagccttcgccaccatctccatctcctccttcctctgcttcgcctctacgtgctcctcctccttcagcgaggaaacctatccccgaattccccttttatcagcagaactggttcatcgctcttctcttcgtgatggctatgggattcttctccctcgctctcttcctcttcctcagcgtcgattcagattccggctacacgtctgcctccgccgccgccgcttcgggtaaagaaggcgtcgagattacgtatggaagtgcgatgaagctgatgcacgagaagacaaaggttcgactgcattctcacgatgtgccctatggatccggcagtgggcagcagtcagtcactggctttcctggcgtcgttgattccaacagctactggattgttaaacctgtgcctgggacaacagcaaagcaaggtgatgccgtcatgagtggagctaccattagattgcagcacatgaagacccggaaatggctccacagtcacttgcatgcatctcctatatcaggcaacttagaggttagctgttttggagatgattcaaattccgatactggggatcactggaagcttataatcgaagggagcgggaagacatggaaacaagaccaaagagtccgacttcaacacatagacactagtggctacctccatagccatgacaaaaagtaccagcgtatagccggtggtcagcaagaggtgtgtggaatcagggaaaagcgggcagataatgtttggttggcagcagaaggagtctaccttcccgttgatgagagtagcagcagcaagtaaggtgaagagttgtgttaacttatctctgaggagtctttgaatctcatcttttactttctaaactcataaacaagaaaatacatatattttgctgatcttcgattgtcggtctaacttt

SEQ ID NO: 110159 - protein, 221 aa, Zea mays subsp. mays
  misc_feature (1)..(221): Ceres Seq. ID no. 15179184
  misc_feature (97)..(152): Pfam Name: MIR domain Pfam Description: MIR domain
  misc_feature (26)..(216): Homolog of NCBI NO: 2137796 NR Description: stromal cell-derived factor 2 - mouse
  misc_feature (26)..(216): Homolog of NCBI NO: 38571762 NR Description: Unknown (protein for IMAGE:5693309) [Mus musculus]
  misc_feature (26)..(216): Homolog of NCBI NO: 30584855 NR Description: Homo sapiens stromal cell-derived factor 2
  misc_feature (26)..(216): Homolog of NCBI NO: 14141195 NR Description: stromal cell-derived factor 2 precursor [Homo
  misc_feature (38)..(220): Homolog of NCBI NO: 29840881 NR Description: similar to GenBank Accession Number AE003603
  misc_feature (1)..(221): Homolog of NCBI NO: 31241809 NR Description: ENSANGP00000013320 [Anopheles gambiae]
  misc_feature (24)..(220): Homolog of NCBI NO: 24644197 NR Description: CG11999-PA [Drosophila melanogaster]
  misc_feature (47)..(218): Homolog of NCBI NO: 25412278 NR Description: hypothetical protein At2g25110 [imported] -
  misc_feature (1)..(218): Homolog of NCBI NO: 21593658 NR Description: unknown [Arabidopsis thaliana]
  misc_feature (1)..(218): Homolog of NCBI NO: 18400721 NR Description: expressed protein [Arabidopsis thaliana]
MAMGFFSLALFLFLSVDSDSGYTSASAAAASGKEGVEITYGSAMKLMHEKTKVRLHSHDVPYGSGSGQQSVTGFPGVVDSNSYWIVKPVPGTTAKQGDAVMSGATIRLQHMKTRKWLHSHLHASPISGNLEVSCFGDDSNSDTGDHWKLIIEGSGKTWKQDQRVRLQHIDTSGYLHSHDKKYQRIAGGQQEVCGIREKRADNVWLAAEGVYLPVDESSSSK

SEQ ID NO: 110160 - protein, 219 aa, Zea mays subsp. mays
  misc_feature (1)..(219): Ceres Seq. ID no. 15179185
  misc_feature (95)..(150): Pfam Name: MIR domain Pfam Description: MIR domain
  misc_feature (24)..(214): Homolog of NCBI NO: 2137796 NR Description: stromal cell-derived factor 2 - mouse
  misc_feature (24)..(214): Homolog of NCBI NO: 38571762 NR Description: Unknown (protein for IMAGE:5693309) [Mus musculus]
  misc_feature (24)..(214): Homolog of NCBI NO: 30584855 NR Description: Homo sapiens stromal cell-derived factor 2
  misc_feature (24)..(214): Homolog of NCBI NO: 14141195 NR Description: stromal cell-derived factor 2 precursor [Homo
  misc_feature (36)..(218): Homolog of NCBI NO: 29840881 NR Description: similar to GenBank Accession Number AE003603
  misc_feature (1)..(219): Homolog of NCBI NO: 31241809 NR Description: ENSANGP00000013320 [Anopheles gambiae]
  misc_feature (22)..(218): Homolog of NCBI NO: 24644197 NR Description: CG11999-PA [Drosophila melanogaster]
  misc_feature (45)..(216): Homolog of NCBI NO: 25412278 NR Description: hypothetical protein At2g25110 [imported] -
  misc_feature (1)..(216): Homolog of NCBI NO: 21593658 NR Description: unknown [Arabidopsis thaliana]
  misc_feature (1)..(216): Homolog of NCBI NO: 18400721 NR Description: expressed protein [Arabidopsis thaliana]
MGFFSLALFLFLSVDSDSGYTSASAAAASGKEGVEITYGSAMKLMHEKTKVRLHSHDVPYGSGSGQQSVTGFPGVVDSNSYWIVKPVPGTTAKQGDAVMSGATIRLQHMKTRKWLHSHLHASPISGNLEVSCFGDDSNSDTGDHWKLIIEGSGKTWKQDQRVRLQHIDTSGYLHSHDKKYQRIAGGQQEVCGIREKRADNVWLAAEGVYLPVDESSSSK

SEQ ID NO: 110161 - protein, 178 aa, Zea mays subsp. mays
  misc_feature (1)..(178): Ceres Seq. ID no. 15179186
  misc_feature (54)..(109): Pfam Name: MIR domain Pfam Description: MIR domain
  misc_feature (1)..(173): Homolog of NCBI NO: 2137796 NR Description: stromal cell-derived factor 2 - mouse
  misc_feature (1)..(173): Homolog of NCBI NO: 38571762 NR Description: Unknown (protein for IMAGE:5693309) [Mus musculus]
  misc_feature (1)..(173): Homolog of NCBI NO: 30584855 NR Description: Homo sapiens stromal cell-derived factor 2
  misc_feature (1)..(173): Homolog of NCBI NO: 14141195 NR Description: stromal cell-derived factor 2 precursor [Homo
  misc_feature (1)..(177): Homolog of NCBI NO: 29840881 NR Description: similar to GenBank Accession Number AE003603
  misc_feature (1)..(178): Homolog of NCBI NO: 31241809 NR Description: ENSANGP00000013320 [Anopheles gambiae]
  misc_feature (1)..(177): Homolog of NCBI NO: 24644197 NR Description: CG11999-PA [Drosophila melanogaster]
  misc_feature (4)..(175): Homolog of NCBI NO: 25412278 NR Description: hypothetical protein At2g25110 [imported] -
  misc_feature (1)..(175): Homolog of NCBI NO: 21593658 NR Description: unknown [Arabidopsis thaliana]
  misc_feature (1)..(175): Homolog of NCBI NO: 18400721 NR Description: expressed protein [Arabidopsis thaliana]
MKLMHEKTKVRLHSHDVPYGSGSGQQSVTGFPGVVDSNSYWIVKPVPGTTAKQGDAVMSGATIRLQHMKTRKWLHSHLHASPISGNLEVSCFGDDSNSDTGDHWKLIIEGSGKTWKQDQRVRLQHIDTSGYLHSHDKKYQRIAGGQQEVCGIREKRADNVWLAAEGVYLPVDESSSSK

SEQ ID NO: 110162 - DNA, 975 bp, Zea mays subsp. mays
  misc_feature (1)..(975): Ceres Seq. ID no. 15178920
aatatcaactcatcacatttattttctcactctttcttttttattcatctctctctagctaaaattatataactctcgaacttgtggatatctaaataaataatattaaaatggagaaaataggaggaataagtagtggaggtacgggatcatcaggagaagcagaagtgcgaaaaggaccgtggacgatggaagaagatcttattcttatcaattatatcgccaaccacggcgatggcgtttggaactctctcgccaaatctgcaggtctaaaacgcaccggaaaaagttgccgccttcggtggctcaactatctccgccctgacgtacgacgtggaaacatcacgccggaggaacaacttaccatcatggaacttcatgctaagtggggaaacaggtggtccaaaatcgctaaacaccttccaggaagaaccgacaatgagataaagaatttctggaggacaagaatccaaaaatacatcaaacaaaccgatgtgacagcaacaacgacgtcctccgttggatctcatcacagctcagaaattaacgatcaagttgcaagtacgtcgaaccataatgtcttttgtacacaagatcaagcgatggagacatattctcctacaactacgtcctatcaacataccaatatggatttcaactatggtaacttctctgcggctgcggcaactgtgactgcgactacaacggcagattattcaattccaatgactgttgatgatcaaaacggtgaaaactattggggcatggatgatatttggtcatcaatgcatttactcaatggtaattgattagtcaaaatggatcagaaatatggaatattaatttgagatttgtgatttttaggagtactgtaattagtacatgacatgtatatggtttttgcctcgctgcttagaggtttggggatataatttatatgtaatattaatgatctaaatccttgatatatatttg

SEQ ID NO: 110163 - protein, 232 aa, Zea mays subsp. mays
  misc_feature (1)..(232): Ceres Seq. ID no. 15178921
  misc_feature (22)..(69): Pfam Name: Myb-like DNA-binding domain Pfam Description: Myb-like DNA-binding domain
  misc_feature (13)..(143): Homolog of NCBI NO: 13537530 NR Description: LhMyb [Lilium hybrid division I]
  misc_feature (14)..(152): Homolog of NCBI NO: 82306 NR Description: myb-related protein 305 - garden snapdragon
  misc_feature (14)..(182): Homolog of NCBI NO: 82311 NR Description: myb-related protein 340 - garden snapdragon
  misc_feature (14)..(182): Homolog of NCBI NO: 40643882 NR Description: MYB8 protein [Gerbera hybrid cv. 'Terra Regina']
  misc_feature (14)..(232): Homolog of NCBI NO: 7438338 NR Description: Myb26 protein - garden pea
  misc_feature (86)..(232): Homolog of NCBI NO: 11358682 NR Description: probable transcription factor MYB21
  misc_feature (8)..(232): Homolog of NCBI NO: 15242669 NR Description: myb family transcription factor [Arabidopsis
  misc_feature (8)..(232): Homolog of NCBI NO: 21554734 NR Description: putative transcription factor MYB24 [Arabidopsis
  misc_feature (1)..(232): Homolog of NCBI NO: 2280528 NR Description: ATMYB3 [Arabidopsis thaliana]
  misc_feature (1)..(232): Homolog of NCBI NO: 30688935 NR Description: myb family transcription factor (ATMYB3)
MEKIGGISSGGTGSSGEAEVRKGPWTMEEDLILINYIANHGDGVWNSLAKSAGLKRTGKSCRLRWLNYLRPDVRRGNITPEEQLTIMELHAKWGNRWSKIAKHLPGRTDNEIKNFWRTRIQKYIKQTDVTATTTSSVGSHHSSEINDQVASTSNHNVFCTQDQAMETYSPTTTSYQHTNMDFNYGNFSAAAATVTATTTADYSIPMTVDDQNGENYWGMDDIWSSMHLLNGN

SEQ ID NO: 110164 - protein, 206 aa, Zea mays subsp. mays
  misc_feature (1)..(206): Ceres Seq. ID no. 15178922
  misc_feature (1)..(43): Pfam Name: Myb-like DNA-binding domain Pfam Description: Myb-like DNA-binding domain
  misc_feature (1)..(117): Homolog of NCBI NO: 13537530 NR Description: LhMyb [Lilium hybrid division I]
  misc_feature (1)..(126): Homolog of NCBI NO: 82306 NR Description: myb-related protein 305 - garden snapdragon
  misc_feature (1)..(156): Homolog of NCBI NO: 82311 NR Description: myb-related protein 340 - garden snapdragon
  misc_feature (1)..(156): Homolog of NCBI NO: 40643882 NR Description: MYB8 protein [Gerbera hybrid cv. 'Terra Regina']
  misc_feature (1)..(206): Homolog of NCBI NO: 7438338 NR Description: Myb26 protein - garden pea
  misc_feature (60)..(206): Homolog of NCBI NO: 11358682 NR Description: probable transcription factor MYB21
  misc_feature (1)..(206): Homolog of NCBI NO: 15242669 NR Description: myb family transcription factor [Arabidopsis
  misc_feature (1)..(206): Homolog of NCBI NO: 21554734 NR Description: putative transcription factor MYB24 [Arabidopsis
  misc_feature (1)..(206): Homolog of NCBI NO: 2280528 NR Description: ATMYB3 [Arabidopsis thaliana]
  misc_feature (1)..(206): Homolog of NCBI NO: 30688935 NR Description: myb family transcription factor (ATMYB3)
MEEDLILINYIANHGDGVWNSLAKSAGLKRTGKSCRLRWLNYLRPDVRRGNITPEEQLTIMELHAKWGNRWSKIAKHLPGRTDNEIKNFWRTRIQKYIKQTDVTATTTSSVGSHHSSEINDQVASTSNHNVFCTQDQAMETYSPTTTSYQHTNMDFNYGNFSAAAATVTATTTADYSIPMTVDDQNGENYWGMDDIWSSMHLLNGN

SEQ ID NO: 110165 - protein, 146 aa, Zea mays subsp. mays
  misc_feature (1)..(146): Ceres Seq. ID no. 15178923
  misc_feature (1)..(57): Homolog of NCBI NO: 13537530 NR Description: LhMyb [Lilium hybrid division I]
  misc_feature (1)..(66): Homolog of NCBI NO: 82306 NR Description: myb-related protein 305 - garden snapdragon
  misc_feature (1)..(96): Homolog of NCBI NO: 82311 NR Description: myb-related protein 340 - garden snapdragon
  misc_feature (1)..(96): Homolog of NCBI NO: 40643882 NR Description: MYB8 protein [Gerbera hybrid cv. 'Terra Regina']
  misc_feature (1)..(146): Homolog of NCBI NO: 7438338 NR Description: Myb26 protein - garden pea
  misc_feature (1)..(146): Homolog of NCBI NO: 11358682 NR Description: probable transcription factor MYB21
  misc_feature (1)..(146): Homolog of NCBI NO: 15242669 NR Description: myb family transcription factor [Arabidopsis
  misc_feature (1)..(146): Homolog of NCBI NO: 21554734 NR Description: putative transcription factor MYB24 [Arabidopsis
  misc_feature (1)..(146): Homolog of NCBI NO: 2280528 NR Description: ATMYB3 [Arabidopsis thaliana]
  misc_feature (1)..(146): Homolog of NCBI NO: 30688935 NR Description: myb family transcription factor (ATMYB3)
MELHAKWGNRWSKIAKHLPGRTDNEIKNFWRTRIQKYIKQTDVTATTTSSVGSHHSSEINDQVASTSNHNVFCTQDQAMETYSPTTTSYQHTNMDFNYGNFSAAAATVTATTTADYSIPMTVDDQNGENYWGMDDIWSSMHLLNGN

SEQ ID NO: 110166 - DNA, 1283 bp, Zea mays subsp. mays
  misc_feature (1)..(1283): Ceres Seq. ID no. 15178832
aaataatgaaaaggggttaatagtctgcgtggatcttcagccgtttcagacacaatacccagaattttcgagctgaaaaattttgttcttctgcgttcccatcgagtttatcctctactctgtgtgcccctttgaatattcatacgacgacgcgtgattttggttttgaatagatagattagaagcaaggattggctatggaggatgcaaacgcgattaggtattggtgtcacatgtgctctcgatccgtgaatccagtcatcgaaggcgacgtaatcaactgcaacttctgccaaagcggattcgtcgaagaaatggacgaaactccagaacaggccaccaatgatcaccctcatcaagcttctgagtctctctgggctcccatcttgctcgggatgatgaacgatcatgatcagcatcagagagcctctgtcgaaaacgaagatgacaacaatgatgacgacgatgatgatggtcagattaacgatggagagttcgatttggaacggcacctggaagagatcatgaggagaaggaggagacactctgccgcgatcctcgatcttctccaagggatccgagccgggttatcggttgaatccgaaaacaaccaggataataacaatcaagataacgagcttgttgtcttgatcaactcctttaaccagaggataaggatccaagactccgtcgacgctagtgccgttccttctggatctttaggcgactattttatcggacctgggttcgagatgttgcttcagcgtttagctgagaatgatcccaacaacaggtacgggacgcctcccgcgacgaaggaagctgttgagtcgttggagacggttatggtggaggaaagtttggtgcagtgtactgtgtgtttggatgattttgagattggggttgaggcgaaagagatgccgtgtaagcataagtttcacagcgagtgtttgttgccgtggcttgagcttcatagctcgtgtcctgtgtgtagatatttgcttcctacgggggatgatgatggggaagctaagactgatggggagacgtcgagtaatgtttctatggagaacaatggaacatcggtggactcgagttcgaacaatccgtcggttaatgattgagggttagagtgtgaggggtcggtttggtgaagggtttgtgattagttggatgttactttggctgcagtacatagttttctcaggttttgttgaaagttggattttcaagttgttttttttgtttgacttttttttttctgattgtttcgagttttgatt

SEQ ID NO: 110167 - protein, 308 aa, Zea mays subsp. mays
  misc_feature (1)..(308): Ceres Seq. ID no. 15178833
  misc_feature (225)..(265): Pfam Name: Zinc finger, C3HC4 type (RING finger) Pfam Description: Zinc finger, C3HC4 type (RING finger)
  misc_feature (1)..(280): Homolog of NCBI NO: 34903272 NR Description: unnamed protein product [Oryza sativa (japonica
  misc_feature (173)..(286): Homolog of NCBI NO: 15231003 NR Description: expressed protein [Arabidopsis thaliana]
  misc_feature (173)..(286): Homolog of NCBI NO: 11994207 NR Description: gene_id:MPN9.20~unknown protein [Arabidopsis
  misc_feature (90)..(304): Homolog of NCBI NO: 32129334 NR Description: unknown protein [Oryza sativa (japonica
  misc_feature (58)..(308): Homolog of NCBI NO: 22328949 NR Description: expressed protein [Arabidopsis thaliana]
  misc_feature (58)..(308): Homolog of NCBI NO: 7486783 NR Description: hypothetical protein M3E9.170 - Arabidopsis
  misc_feature (69)..(302): Homolog of NCBI NO: 15241188 NR Description: expressed protein [Arabidopsis thaliana]
  misc_feature (1)..(303): Homolog of NCBI NO: 18405411 NR Description: expressed protein [Arabidopsis thaliana]
  misc_feature (1)..(307): Homolog of NCBI NO: 38454178 NR Description: At3g13430 [Arabidopsis thaliana]
  misc_feature (1)..(307): Homolog of NCBI NO: 15231238 NR Description: expressed protein [Arabidopsis thaliana]
MEDANAIRYWCHMCSRSVNPVIEGDVINCNFCQSGFVEEMDETPEQATNDHPHQASESLWAPILLGMMNDHDQHQRASVENEDDNNDDDDDDGQINDGEFDLERHLEEIMRRRRRHSAAILDLLQGIRAGLSVESENNQDNNNQDNELVVLINSFNQRIRIQDSVDASAVPSGSLGDYFIGPGFEMLLQRLAENDPNNRYGTPPATKEAVESLETVMVEESLVQCTVCLDDFEIGVEAKEMPCKHKFHSECLLPWLELHSSCPVCRYLLPTGDDDGEAKTDGETSSNVSMENNGTSVDSSSNNPSVND

SEQ ID NO: 110168 - protein, 296 aa, Zea mays subsp. mays
  misc_feature (1)..(296): Ceres Seq. ID no. 15178834
  misc_feature (213)..(253): Pfam Name: Zinc finger, C3HC4 type (RING finger) Pfam Description: Zinc finger, C3HC4 type (RING finger)
  misc_feature (57)..(290): Homolog of NCBI NO: 15241188 NR Description: expressed protein [Arabidopsis thaliana]
  misc_feature (1)..(291): Homolog of NCBI NO: 18405411 NR Description: expressed protein [Arabidopsis thaliana]
  misc_feature (1)..(268): Homolog of NCBI NO: 34903272 NR Description: unnamed protein product [Oryza sativa (japonica
  misc_feature (161)..(274): Homolog of NCBI NO: 11994207 NR Description: gene_id:MPN9.20~unknown protein [Arabidopsis
  misc_feature (46)..(296): Homolog of NCBI NO: 22328949 NR Description: expressed protein [Arabidopsis thaliana]
  misc_feature (46)..(296): Homolog of NCBI NO: 7486783 NR Description: hypothetical protein M3E9.170 - Arabidopsis
  misc_feature (78)..(292): Homolog of NCBI NO: 32129334 NR Description: unknown protein [Oryza sativa (japonica
  misc_feature (161)..(274): Homolog of NCBI NO: 15231003 NR Description: expressed protein [Arabidopsis thaliana]
  misc_feature (1)..(295): Homolog of NCBI NO: 38454178 NR Description: At3g13430 [Arabidopsis thaliana]
  misc_feature (1)..(295): Homolog of NCBI NO: 15231238 NR Description: expressed protein [Arabidopsis thaliana]
MCSRSVNPVIEGDVINCNFCQSGFVEEMDETPEQATNDHPHQASESLWAPILLGMMNDHDQHQRASVENEDDNNDDDDDDGQINDGEFDLERHLEEIMRRRRRHSAAILDLLQGIRAGLSVESENNQDNNNQDNELVVLINSFNQRIRIQDSVDASAVPSGSLGDYFIGPGFEMLLQRLAENDPNNRYGTPPATKEAVESLETVMVEESLVQCTVCLDDFEIGVEAKEMPCKHKFHSECLLPWLELHSSCPVCRYLLPTGDDDGEAKTDGETSSNVSMENNGTSVDSSSNNPSVND

SEQ ID NO: 110169 - protein, 269 aa, Zea mays subsp. mays
  misc_feature (1)..(269): Ceres Seq. ID no. 15178835
  misc_feature (186)..(226): Pfam Name: Zinc finger, C3HC4 type (RING finger) Pfam Description: Zinc finger, C3HC4 type (RING finger)
  misc_feature (1)..(241): Homolog of NCBI NO: 34903272 NR Description: unnamed protein product [Oryza sativa (japonica
  misc_feature (134)..(247): Homolog of NCBI NO: 15231003 NR Description: expressed protein [Arabidopsis thaliana]
  misc_feature (134)..(247): Homolog of NCBI NO: 11994207 NR Description: gene_id:MPN9.20~unknown protein [Arabidopsis
  misc_feature (51)..(265): Homolog of NCBI NO: 32129334 NR Description: unknown protein [Oryza sativa (japonica
  misc_feature (19)..(269): Homolog of NCBI NO: 22328949 NR Description: expressed protein [Arabidopsis thaliana]
  misc_feature (19)..(269): Homolog of NCBI NO: 7486783 NR Description: hypothetical protein M3E9.170 - Arabidopsis
  misc_feature (30)..(263): Homolog of NCBI NO: 15241188 NR Description: expressed protein [Arabidopsis thaliana]
  misc_feature (1)..(264): Homolog of NCBI NO: 18405411 NR Description: expressed protein [Arabidopsis thaliana]
  misc_feature (1)..(268): Homolog of NCBI NO: 38454178 NR Description: At3g13430 [Arabidopsis thaliana]
  misc_feature (1)..(268): Homolog of NCBI NO: 15231238 NR Description: expressed protein [Arabidopsis thaliana]
MDETPEQATNDHPHQASESLWAPILLGMMNDHDQHQRASVENEDDNNDDDDDDGQINDGEFDLERHLEEIMRRRRRHSAAILDLLQGIRAGLSVESENNQDNNNQDNELVVLINSFNQRIRIQDSVDASAVPSGSLGDYFIGPGFEMLLQRLAENDPNNRYGTPPATKEAVESLETVMVEESLVQCTVCLDDFEIGVEAKEMPCKHKFHSECLLPWLELHSSCPVCRYLLPTGDDDGEAKTDGETSSNVSMENNGTSVDSSSNNPSVND

SEQ ID NO: 110170 - DNA, 1159 bp, Zea mays subsp. mays
  misc_feature (1)..(1159): Ceres Seq. ID no. 15179499
attatttgttcttggcttcgaagcagctctttcctctcgacttgtatctgttctccccaaaccccttccgattcgatcaaccctcgtcgtcttccagacttttcgattttggaagaatgagtcaggcaggagtagatgttccagcgaagggtgggttcagcttcgatctgtgtaagaggaatgatatgcttatccaaaagggtcttaaagctccctcctttttgaagaccggtactaccatcgtcggtttgatcttcaaggatggtgtgatactaggcgctgatacacgagcaacggagggacctatcgttgctgataagaactgtgagaagattcactacatggcacctaacatttattgctgtggtgctggtaccgctgctgacactgaagctgtaactgatatggtcagctcgcagttgaggttgcatcgttaccagactggccgagactctcgggttatcactgctttgacccttctcaaaaaacatcttttcagctatcaaggtcatgtctctgctgctcttgtccttggtggagtcgatatcaccgggcctcatctgcataccatatacccacacggttcaactgacacactaccatttgctacaatgggttctggttctcttgctgctatgtccgtctttgaggcaaagtacaaagaaggtctaactagggatgaaggaatcaagctggtcgctgaagccatatgctcgggaatattcaacgacctgggtagtggtagcaacgtggacatctgcgtgatcacaaaggggcacaaggaatatctcaggaactacatggaaccaaacccaagaacctatgtcagcagcaaaggttattcattcaccaagaaaaccgaggttcttcgcacgaaaatcaccccattgatggagcgagttgagattacagaagtgggtgaagctatggaagaatgaatgaatctctctcaagtctctttgcttttgtattcatctttaccaagatcttataacattgtgtgcgttagacatattagtcttgtctttctttaccaatgttgttgaaggattatccaaaatcttttcttaccaatcttaaggatttcaatgctattagacttcgaaatttctttgttcggaatcttatgaaacgaattttctaaaagttattctctcct

SEQ ID NO: 110171 - protein, 311 aa, Zea mays subsp. mays
  misc_feature (1)..(311): Ceres Seq. ID no. 15179500
  misc_feature (74)..(255): Pfam Name: Proteasome A-type and B-type Pfam Description: Proteasome A-type and B-type
  misc_feature (44)..(239): Homolog of NCBI NO: 14594921 NR Description: putative beta proteasome subunit [Nicotiana
  misc_feature (45)..(301): Homolog of NCBI NO: 24664391 NR Description: Proteasome beta2 subunit CG3329-PA [Drosophila
  misc_feature (95)..(311): Homolog of NCBI NO: 2511576 NR Description: multicatalytic endopeptidase [Arabidopsis
  misc_feature (42)..(311): Homolog of NCBI NO: 8671504 NR Description: beta 2 subunit of 20S proteasome
  misc_feature (39)..(286): Homolog of NCBI NO: 30688785 NR Description: 20S proteasome beta subunit B (PBB1) [Arabidopsis
  misc_feature (39)..(311): Homolog of NCBI NO: 21593337 NR Description: 20S proteasome beta subunit PBB2 [Arabidopsis
  misc_feature (39)..(311): Homolog of NCBI NO: 20260224 NR Description: 20S proteasome beta subunit PBB2 [Arabidopsis
  misc_feature (39)..(311): Homolog of NCBI NO: 2511578 NR Description: multicatalytic endopeptidase [Arabidopsis
  misc_feature (39)..(311): Homolog of NCBI NO: 15237451 NR Description: 20S proteasome beta subunit B (PBB2) [Arabidopsis
  misc_feature (39)..(311): Homolog of NCBI NO: 18405364 NR Description: 20S proteasome beta subunit B (PBB1) [Arabidopsis
YLFLASKQLFPLDLYLFSPNPFRFDQPSSSSRLFDFGRMSQAGVDVPAKGGFSFDLCKRNDMLIQKGLKAPSFLKTGTTIVGLIFKDGVILGADTRATEGPIVADKNCEKIHYMAPNIYCCGAGTAADTEAVTDMVSSQLRLHRYQTGRDSRVITALTLLKKHLFSYQGHVSAALVLGGVDITGPHLHTIYPHGSTDTLPFATMGSGSLAAMSVFEAKYKEGLTRDEGIKLVAEAICSGIFNDLGSGSNVDICVITKGHKEYLRNYMEPNPRTYVSSKGYSFTKKTEVLRTKITPLMERVEITEVGEAMEE

SEQ ID NO: 110172 - protein, 273 aa, Zea mays subsp. mays
  misc_feature (1)..(273): Ceres Seq. ID no. 15179501
  misc_feature (36)..(217): Pfam Name: Proteasome A-type and B-type Pfam Description: Proteasome A-type and B-type
  misc_feature (6)..(201): Homolog of NCBI NO: 14594921 NR Description: putative beta proteasome subunit [Nicotiana
  misc_feature (7)..(263): Homolog of NCBI NO: 24664391 NR Description: Proteasome beta2 subunit CG3329-PA [Drosophila
  misc_feature (57)..(273): Homolog of NCBI NO: 2511576 NR Description: multicatalytic endopeptidase [Arabidopsis
  misc_feature (4)..(273): Homolog of NCBI NO: 8671504 NR Description: beta 2 subunit of 20S proteasome
  misc_feature (1)..(248): Homolog of NCBI NO: 30688785 NR Description: 20S proteasome beta subunit B (PBB1) [Arabidopsis
  misc_feature (1)..(273): Homolog of NCBI NO: 21593337 NR Description: 20S proteasome beta subunit PBB2 [Arabidopsis
  misc_feature (1)..(273): Homolog of NCBI NO: 20260224 NR Description: 20S proteasome beta subunit PBB2 [Arabidopsis
  misc_feature (1)..(273): Homolog of NCBI NO: 2511578 NR Description: multicatalytic endopeptidase [Arabidopsis
  misc_feature (1)..(273): Homolog of NCBI NO: 15237451 NR Description: 20S proteasome beta subunit B (PBB2) [Arabidopsis
  misc_feature (1)..(273): Homolog of NCBI NO: 18405364 NR Description: 20S proteasome beta subunit B (PBB1) [Arabidopsis
MSQAGVDVPAKGGFSFDLCKRNDMLIQKGLKAPSFLKTGTTIVGLIFKDGVILGADTRATEGPIVADKNCEKIHYMAPNIYCCGAGTAADTEAVTDMVSSQLRLHRYQTGRDSRVITALTLLKKHLFSYQGHVSAALVLGGVDITGPHLHTIYPHGSTDTLPFATMGSGSLAAMSVFEAKYKEGLTRDEGIKLVAEAICSGIFNDLGSGSNVDICVITKGHKEYLRNYMEPNPRTYVSSKGYSFTKKTEVLRTKITPLMERVEITEVGEAMEE

SEQ ID NO: 110173 - protein, 250 aa, Zea mays subsp. mays
  misc_feature (1)..(250): Ceres Seq. ID no. 15179502
  misc_feature (13)..(194): Pfam Name: Proteasome A-type and B-type Pfam Description: Proteasome A-type and B-type
  misc_feature (1)..(178): Homolog of NCBI NO: 14594921 NR Description: putative beta proteasome subunit [Nicotiana
  misc_feature (1)..(240): Homolog of NCBI NO: 24664391 NR Description: Proteasome beta2 subunit CG3329-PA [Drosophila
  misc_feature (34)..(250): Homolog of NCBI NO: 2511576 NR Description: multicatalytic endopeptidase [Arabidopsis
  misc_feature (1)..(250): Homolog of NCBI NO: 8671504 NR Description: beta 2 subunit of 20S proteasome
  misc_feature (1)..(225): Homolog of NCBI NO: 30688785 NR Description: 20S proteasome beta subunit B (PBB1) [Arabidopsis
  misc_feature (1)..(250): Homolog of NCBI NO: 21593337 NR Description: 20S proteasome beta subunit PBB2 [Arabidopsis
  misc_feature (1)..(250): Homolog of NCBI NO: 20260224 NR Description: 20S proteasome beta subunit PBB2 [Arabidopsis
  misc_feature (1)..(250): Homolog of NCBI NO: 2511578 NR Description: multicatalytic endopeptidase [Arabidopsis
  misc_feature (1)..(250): Homolog of NCBI NO: 15237451 NR Description: 20S proteasome beta subunit B (PBB2) [Arabidopsis
  misc_feature (1)..(250): Homolog of NCBI NO: 18405364 NR Description: 20S proteasome beta subunit B (PBB1) [Arabidopsis
MLIQKGLKAPSFLKTGTTIVGLIFKDGVILGADTRATEGPIVADKNCEKIHYMAPNIYCCGAGTAADTEAVTDMVSSQLRLHRYQTGRDSRVITALTLLKKHLFSYQGHVSAALVLGGVDITGPHLHTIYPHGSTDTLPFATMGSGSLAAMSVFEAKYKEGLTRDEGIKLVAEAICSGIFNDLGSGSNVDICVITKGHKEYLRNYMEPNPRTYVSSKGYSFTKKTEVLRTKITPLMERVEITEVGEAMEE

SEQ ID NO: 110174 - DNA, 2148 bp, Zea mays subsp. mays
  misc_feature (1)..(2148): Ceres Seq. ID no. 15179416
agagttcttgtagtcttctcggcctcccgctaaccgccatccaccacaccgagccccaaggcccccaactcccgagccctcggacctccatccctgttcccatggctgtgcctccccggtgggcgaacctcgacatcgacctggtgacggaaatcatgaaccgcgccccgtgcgtaatcgaccgcgcgcgaatggccgccgtctgccaggcgtggctcgaggctgtcgcgcgggcagagcctctgacatttcagctcccgtcgctcctcctcccgcccgcggacgtgactggcgtctactgctacctcagcggcttccgcgaccacaacatgtttcccgggccccgctacttcggctcgtacgacggcggctggttcttcctcgcctacggccagactcgcgggcaccggctgttcaacatccgcaccggagaatcctacgagctacccgacgggctcgcggatatcttcactaacgatatccacagcatggtcgtcctcgccgccaccctctcgttcccgcctcatcacccgggatgcgccgccgcgggcatcgtcacctaccagccggacctcgacgcgccgcgccaacgccacttcgcgttctggcgcccaggggataggatggccgtctgcgacgttgtgcccgccgtgccaattgagccgggtttggaaccggaggacgtcgtgtactaccgggactccttccatttcctcacacaaggtgggcatatcctcgtgtgcagtccgatctttgatggtgaggggcatatcccaggagcgcttttagagttaatgcgcttccaggaagcgtggtgcactgacgagcagttcgtccgcgctcgctacctcgtggtatcccgcggggagctgctggtggtcgtcaggctcgctgcccaccatcacgcgccgacttcgtcgttcaaagtattccgggtgattctaaagtctaagacctgccggttcgaggaggttgcattgtgtggccggatgctgttcttggggcgaggatgctccaggtcatacgaggtgagtcagtacccggggttcaaggacagcatcttcttcttggacgataggagcttctacgacgacgccgagatgatgttcggcggagtcaatgagaggcagtattcttgcaacgacatcggtaggtggtcgccggaagggctgctgccttcccacgtcgaattctacttcccggagcgggttccttcttacaactctcctccagcttggcttctcccttgagatattaactgaaaatgtatgcactgtttggttcgcatatttgaaccaaacggcacccagatgtgttctgtttgttgcgtctagcattccaactattctgtactttgtgctactctatgtgaaatgtgcagaaaagttggaatgccagacgccacttcacagatcaatgcttatgtgcaaagtgctaaggtggatggtgtcatcactgatttccctgggactgctcacagatacaaactgaactcctgcacgagcatgggaaagaacatgccactattcatgcagcctccgcaaccaggtggcctcctttcaaccattctcccagatgcacagccaccagcagcagcgccaatgccgctcttgacggacgctgacgtcgcagaaccagccctacctccggtcagcaacaccaccacgactgcatcgccttcgcatgccgccctcagaatgcgaacccatgtcttgagcatcaccacattgctgatgctatgtgcttccctcctcatctgaagatagtcctgctcaacatcatacgcggcgtggcgcattagagctgaggattttcacattgagctgctaatagcaattctttccaccacctttatgtagctattttttttcttgttctgtctggtgttttggaggatggatggatgttcagcttgatacctcaacggtggcacttgagcgtgctgccagctgtctctaggtacattttggtacatacgtgtggtgatacattgtccatgtcaccgtttctactgccaacctgcctgtggagggcaaaatattccctacaaacatacagtttagggtctgtcttggatacacctcaatcctatcagggtgttctatgattcggtaaggctgtctccaatagatctgtatattgttatac

SEQ ID NO: 110175 - protein, 415 aa, Zea mays subsp. mays
  misc_feature (1)..(415): Ceres Seq. ID no. 15179417
  misc_feature (40)..(81): Pfam Name: F-box domain Pfam Description: F-box domain
  misc_feature (34)..(253): Homolog of NCBI NO: 34909984 NR Description: P0490D09.16 [Oryza sativa (japonica
  misc_feature (34)..(150): Homolog of NCBI NO: 34909986 NR Description: P0490D09.17 [Oryza sativa (japonica
  misc_feature (165)..(415): Homolog of NCBI NO: 34909984 NR Description: P0490D09.16 [Oryza sativa (japonica
  misc_feature (34)..(415): Homolog of NCBI NO: 34911048 NR Description: P0007F06.19 [Oryza sativa (japonica
  misc_feature (325)..(414): Homolog of NCBI NO: 34909986 NR Description: P0490D09.17 [Oryza sativa (japonica
  misc_feature (116)..(340): Homolog of NCBI NO: 34909986 NR Description: P0490D09.17 [Oryza sativa (japonica
  misc_feature (224)..(415): Homolog of NCBI NO: 34894448 NR Description: OSJNBa0025P13.19 [Oryza sativa (japonica
  misc_feature (2)..(193): Homolog of NCBI NO: 34894448 NR Description: OSJNBa0025P13.19 [Oryza sativa (japonica
  misc_feature (34)..(128): Homolog of NCBI NO: 34909978 NR Description: P0490D09.13 [Oryza sativa (japonica
  misc_feature (179)..(415): Homolog of NCBI NO: 34909978 NR Description: P0490D09.13 [Oryza sativa (japonica
SSCSLLGLPLTAIHHTEPQGPQLPSPRTSIPVPMAVPPRWANLDIDLVTEIMNRAPCVIDRARMAAVCQAWLEAVARAEPLTFQLPSLLLPPADVTGVYCYLSGFRDHNMFPGPRYFGSYDGGWFFLAYGQTRGHRLFNIRTGESYELPDGLADIFTNDIHSMVVLAATLSFPPHHPGCAAAGIVTYQPDLDAPRQRHFAFWRPGDRMAVCDVVPAVPIEPGLEPEDVVYYRDSFHFLTQGGHILVCSPIFDGEGHIPGALLELMRFQEAWCTDEQFVRARYLVVSRGELLVVVRLAAHHHAPTSSFKVFRVILKSKTCRFEEVALCGRMLFLGRGCSRSYEVSQYPGFKDSIFFLDDRSFYDDAEMMFGGVNERQYSCNDIGRWSPEGLLPSHVEFYFPERVPSYNSPPAWLLP

SEQ ID NO: 110176 - protein, 382 aa, Zea mays subsp. mays
  misc_feature (1)..(382): Ceres Seq. ID no. 15179418
  misc_feature (7)..(48): Pfam Name: F-box domain Pfam Description: F-box domain
  misc_feature (1)..(220): Homolog of NCBI NO: 34909984 NR Description: P0490D09.16 [Oryza sativa (japonica
  misc_feature (1)..(117): Homolog of NCBI NO: 34909986 NR Description: P0490D09.17 [Oryza sativa (japonica
  misc_feature (132)..(382): Homolog of NCBI NO: 34909984 NR Description: P0490D09.16 [Oryza sativa (japonica
  misc_feature (1)..(382): Homolog of NCBI NO: 34911048 NR Description: P0007F06.19 [Oryza sativa (japonica
  misc_feature (292)..(381): Homolog of NCBI NO: 34909986 NR Description: P0490D09.17 [Oryza sativa (japonica
  misc_feature (83)..(307): Homolog of NCBI NO: 34909986 NR Description: P0490D09.17 [Oryza sativa (japonica
  misc_feature (191)..(382): Homolog of NCBI NO: 34894448 NR Description: OSJNBa0025P13.19 [Oryza sativa (japonica
  misc_feature (1)..(160): Homolog of NCBI NO: 34894448 NR Description: OSJNBa0025P13.19 [Oryza sativa (japonica
  misc_feature (1)..(95): Homolog of NCBI NO: 34909978 NR Description: P0490D09.13 [Oryza sativa (japonica
  misc_feature (146)..(382): Homolog of NCBI NO: 34909978 NR Description: P0490D09.13 [Oryza sativa (japonica
MAVPPRWANLDIDLVTEIMNRAPCVIDRARMAAVCQAWLEAVARAEPLTFQLPSLLLPPADVTGVYCYLSGFRDHNMFPGPRYFGSYDGGWFFLAYGQTRGHRLFNIRTGESYELPDGLADIFTNDIHSMVVLAATLSFPPHHPGCAAAGIVTYQPDLDAPRQRHFAFWRPGDRMAVCDVVPAVPIEPGLEPEDVVYYRDSFHFLTQGGHILVCSPIFDGEGHIPGALLELMRFQEAWCTDEQFVRARYLVVSRGELLVVVRLAAHHHAPTSSFKVFRVILKSKTCRFEEVALCGRMLFLGRGCSRSYEVSQYPGFKDSIFFLDDRSFYDDAEMMFGGVNERQYSCNDIGRWSPEGLLPSHVEFYFPERVPSYNSPPAWLLP

SEQ ID NO: 110177 - protein, 364 aa, Zea mays subsp. mays
  misc_feature (1)..(364): Ceres Seq. ID no. 15179419
  misc_feature (1)..(202): Homolog of NCBI NO: 34909984 NR Description: P0490D09.16 [Oryza sativa (japonica
  misc_feature (1)..(99): Homolog of NCBI NO: 34909986 NR Description: P0490D09.17 [Oryza sativa (japonica
  misc_feature (114)..(364): Homolog of NCBI NO: 34909984 NR Description: P0490D09.16 [Oryza sativa (japonica
  misc_feature (1)..(364): Homolog of NCBI NO: 34911048 NR Description: P0007F06.19 [Oryza sativa (japonica
  misc_feature (274)..(363): Homolog of NCBI NO: 34909986 NR Description: P0490D09.17 [Oryza sativa (japonica
  misc_feature (65)..(289): Homolog of NCBI NO: 34909986 NR Description: P0490D09.17 [Oryza sativa (japonica
  misc_feature (173)..(364): Homolog of NCBI NO: 34894448 NR Description: OSJNBa0025P13.19 [Oryza sativa (japonica
  misc_feature (1)..(142): Homolog of NCBI NO: 34894448 NR Description: OSJNBa0025P13.19 [Oryza sativa (japonica
  misc_feature (1)..(77): Homolog of NCBI NO: 34909978 NR Description: P0490D09.13 [Oryza sativa (japonica
  misc_feature (128)..(364): Homolog of NCBI NO: 34909978 NR Description: P0490D09.13 [Oryza sativa (japonica
MNRAPCVIDRARMAAVCQAWLEAVARAEPLTFQLPSLLLPPADVTGVYCYLSGFRDHNMFPGPRYFGSYDGGWFFLAYGQTRGHRLFNIRTGESYELPDGLADIFTNDIHSMVVLAATLSFPPHHPGCAAAGIVTYQPDLDAPRQRHFAFWRPGDRMAVCDVVPAVPIEPGLEPEDVVYYRDSFHFLTQGGHILVCSPIFDGEGHIPGALLELMRFQEAWCTDEQFVRARYLVVSRGELLVVVRLAAHHHAPTSSFKVFRVILKSKTCRFEEVALCGRMLFLGRGCSRSYEVSQYPGFKDSIFFLDDRSFYDDAEMMFGGVNERQYSCNDIGRWSPEGLLPSHVEFYFPERVPSYNSPPAWLLP

SEQ ID NO: 110178 - DNA, 1322 bp, Zea mays subsp. mays
  misc_feature (1)..(1322): Ceres Seq. ID no. 15179420
acaagacagcagaggcactagttatcacatccaccataacatgaccatggctaccgcctcagcttcgctagctctcatgttcgcctgcagccttctccttgcaggcacggcgttcagtgatgataccatagccatacccttgttggagcggttcaaagcctggcaggctgaatacaaccgcacctatgcgaccccagaggaattccagcaacgcttcatgatctacagcgagaacgtccggttcatcaagaccatgaaccagctgtcgaccgggagctcatatgagctcggtgagaaccagttcaccgacctcaccgaggaggagttcaaggacacatatcttatgaagctcgacgagcagccccctgcagctgaggccatgggaccgaccgtcggcaccatgagcacagcaggcatgtccaacggcaacaacaccggcgaggctcccaacagtgtggactggaggaccaagggagcagtgacgcgggtcaaggaccagcaacaatgtggctcttgctgggcgtttgcaacggtggcgtccatcgaaggtgtgcaccagataaagacaggtcgtctggtgtcgctgtcggagcaagagatcgtggactgcgaccgtgggggcaacgacaacggctgtcgtggcggttcccctagatccgccatggagtgggtcacccgcaacggcggcctgaccacggagtcggactacccgtacgtgggcagccagagacaatgcatgagcggcaagcttggtcaccacgcggccaggatccgtggctaccaggcggtgcagcgcaataacgaggccgagctggagcgcgccgtggcggaacggccggtcgccgtgttcatcgacgcgagcagggccttccagttctacaagagcggggtcttctcgggcccctgcgacaccaccaccgtcaatcacgtcgtcacggtggtcgggtacggatcaaccggcagcgacagcggcggacgcaagtactggatcgtcaagaactcgtggggtcagggatggggagagaatggctacgtgcggatggcgaggcgtgtcagggctcgggagggcatgtgcgccatcgccatagagccctactacccggtgatgtgatctctccgtactagttaccggctgcctcctgatcctaaacaagctagtatgcttggagaatgatgcatgcatatgatgcatggaattaaataaactacaactcaacgagacggtgtgtgtgctgcgctgcgctatgccgatcgatgttatcgtttgtttgctaatgtaacatctaatctaaagtcttaaaaggcgctcggttttgaggctg

SEQ ID NO: 110179 - protein, 369 aa, Zea mays subsp. mays
  misc_feature (1)..(369): Ceres Seq. ID no. 15179421
  misc_feature (149)..(367): Pfam Name: Papain family cysteine protease Pfam Description: Papain family cysteine protease
  misc_feature (22)..(367): Homolog of NCBI NO: 37780051 NR Description: cysteine protease 12 [Trifolium repens]
  misc_feature (22)..(367): Homolog of NCBI NO: 37780045 NR Description: cysteine protease 5 [Trifolium repens]
  misc_feature (20)..(367): Homolog of NCBI NO: 34329348 NR Description: putative cysteine proteinase [Medicago truncatula]
  misc_feature (26)..(369): Homolog of NCBI NO: 7435828 NR Description: fruit bromelain (EC 3.4.22.33) FB18 precursor -
  misc_feature (47)..(367): Homolog of NCBI NO: 40806498 NR Description: putative cysteine protease 1 [Iris hollandica]
  misc_feature (14)..(367): Homolog of NCBI NO: 38345008 NR Description: OSJNBa0052O21.11 [Oryza sativa (japonica
  misc_feature (46)..(369): Homolog of NCBI NO: 7489849 NR Description: fruit bromelain (EC 3.4.22.33) FB1035 precursor -
  misc_feature (22)..(368): Homolog of NCBI NO: 10336513 NR Description: cysteine proteinase [Astragalus sinicus]
  misc_feature (16)..(367): Homolog of NCBI NO: 24285904 NR Description: cysteine proteinase precursor [Ipomoea batatas]
  misc_feature (22)..(367): Homolog of NCBI NO: 13491750 NR Description: cysteine protease [Ipomoea batatas]
QDSRGTSYHIHHNMTMATASASLALMFACSLLLAGTAFSDDTIAIPLLERFKAWQAEYNRTYATPEEFQQRFMIYSENVRFIKTMNQLSTGSSYELGENQFTDLTEEEFKDTYLMKLDEQPPAAEAMGPTVGTMSTAGMSNGNNTGEAPNSVDWRTKGAVTRVKDQQQCGSCWAFATVASIEGVHQIKTGRLVSLSEQEIVDCDRGGNDNGCRGGSPRSAMEWVTRNGGLTTESDYPYVGSQRQCMSGKLGHHAARIRGYQAVQRNNEAELERAVAERPVAVFIDASRAFQFYKSGVFSGPCDTTTVNHVVTVVGYGSTGSDSGGRKYWIVKNSWGQGWGENGYVRMARRVRAREGMCAIAIEPYYPVM

SEQ ID NO: 110180 - protein, 356 aa, Zea mays subsp. mays
  misc_feature (1)..(356): Ceres Seq. ID no. 15179422
  misc_feature (136)..(354): Pfam Name: Papain family cysteine protease Pfam Description: Papain family cysteine protease
  misc_feature (33)..(356): Homolog of NCBI NO: 7489849 NR Description: fruit bromelain (EC 3.4.22.33) FB1035 precursor -
  misc_feature (34)..(354): Homolog of NCBI NO: 40806498 NR Description: putative cysteine protease 1 [Iris hollandica]
  misc_feature (1)..(354): Homolog of NCBI NO: 38345008 NR Description: OSJNBa0052O21.11 [Oryza sativa (japonica
  misc_feature (9)..(355): Homolog of NCBI NO: 10336513 NR Description: cysteine proteinase [Astragalus sinicus]
  misc_feature (13)..(356): Homolog of NCBI NO: 7435828 NR Description: fruit bromelain (EC 3.4.22.33) FB18 precursor -
  misc_feature (9)..(354): Homolog of NCBI NO: 37780051 NR Description: cysteine protease 12 [Trifolium repens]
  misc_feature (9)..(354): Homolog of NCBI NO: 37780045 NR Description: cysteine protease 5 [Trifolium repens]
  misc_feature (7)..(354): Homolog of NCBI NO: 34329348 NR Description: putative cysteine proteinase [Medicago truncatula]
  misc_feature (3)..(354): Homolog of NCBI NO: 24285904 NR Description: cysteine proteinase precursor [Ipomoea batatas]
  misc_feature (9)..(354): Homolog of NCBI NO: 13491750 NR Description: cysteine protease [Ipomoea batatas]
MTMATASASLALMFACSLLLAGTAFSDDTIAIPLLERFKAWQAEYNRTYATPEEFQQRFMIYSENVRFIKTMNQLSTGSSYELGENQFTDLTEEEFKDTYLMKLDEQPPAAEAMGPTVGTMSTAGMSNGNNTGEAPNSVDWRTKGAVTRVKDQQQCGSCWAFATVASIEGVHQIKTGRLVSLSEQEIVDCDRGGNDNGCRGGSPRSAMEWVTRNGGLTTESDYPYVGSQRQCMSGKLGHHAARIRGYQAVQRNNEAELERAVAERPVAVFIDASRAFQFYKSGVFSGPCDTTTVNHVVTVVGYGSTGSDSGGRKYWIVKNSWGQGWGENGYVRMARRVRAREGMCAIAIEPYYPVM

SEQ ID NO: 110181 - protein, 354 aa, Zea mays subsp. mays
  misc_feature (1)..(354): Ceres Seq. ID no. 15179423
  misc_feature (134)..(352): Pfam Name: Papain family cysteine protease Pfam Description: Papain family cysteine protease
  misc_feature (31)..(354): Homolog of NCBI NO: 7489849 NR Description: fruit bromelain (EC 3.4.22.33) FB1035 precursor -
  misc_feature (32)..(352): Homolog of NCBI NO: 40806498 NR Description: putative cysteine protease 1 [Iris hollandica]
  misc_feature (1)..(352): Homolog of NCBI NO: 38345008 NR Description: OSJNBa0052O21.11 [Oryza sativa (japonica
  misc_feature (7)..(353): Homolog of NCBI NO: 10336513 NR Description: cysteine proteinase [Astragalus sinicus]
  misc_feature (11)..(354): Homolog of NCBI NO: 7435828 NR Description: fruit bromelain (EC 3.4.22.33) FB18 precursor -
  misc_feature (7)..(352): Homolog of NCBI NO: 37780051 NR Description: cysteine protease 12 [Trifolium repens]
  misc_feature (7)..(352): Homolog of NCBI NO: 37780045 NR Description: cysteine protease 5 [Trifolium repens]
  misc_feature (5)..(352): Homolog of NCBI NO: 34329348 NR Description: putative cysteine proteinase [Medicago truncatula]
  misc_feature (1)..(352): Homolog of NCBI NO: 24285904 NR Description: cysteine proteinase precursor [Ipomoea batatas]
  misc_feature (7)..(352): Homolog of NCBI NO: 13491750 NR Description: cysteine protease [Ipomoea batatas]
MATASASLALMFACSLLLAGTAFSDDTIAIPLLERFKAWQAEYNRTYATPEEFQQRFMIYSENVRFIKTMNQLSTGSSYELGENQFTDLTEEEFKDTYLMKLDEQPPAAEAMGPTVGTMSTAGMSNGNNTGEAPNSVDWRTKGAVTRVKDQQQCGSCWAFATVASIEGVHQIKTGRLVSLSEQEIVDCDRGGNDNGCRGGSPRSAMEWVTRNGGLTTESDYPYVGSQRQCMSGKLGHHAARIRGYQAVQRNNEAELERAVAERPVAVFIDASRAFQFYKSGVFSGPCDTTTVNHVVTVVGYGSTGSDSGGRKYWIVKNSWGQGWGENGYVRMARRVRAREGMCAIAIEPYYPVM

SEQ ID NO: 110182 - DNA, 1931 bp, Zea mays subsp. mays
  misc_feature (1)..(1931): Ceres Seq. ID no. 15176035
cccaagggtcggctaggtctaggtggtctccaagctttccgcctttccacgccaccattctccccacccgcgcgcctcagcaatccccatccagcatcgccgtttcgccgcggcaccgacacctcgccggccatgggcgcgtcctcctcgactggcaacccgtccccagaggcgcacgagcagcgggagcaggagactctcgcctccgccgccctctccctcccgctcctccgcgccgccttctcccgctccgccgccaacgcgctgccggatgccctcgcgccgccgcccgcctcctttcgtctgcccggatccccggcgccgccgccgccgcacttccacggcatcctcggggggctcggccccgccatcgcctcccaattcttcggccacggagctgccgcggtgacggacgggggcgccgggtgggtccagttcctcagggggttcaaccgctgctgcgcgcgcgtgacggcctcccgctcgctcgcactgctcctccgcgtgtacgctgccgcctgcgccggcgcgggggcaccctgcggcgtccagctccagccggacgagggcggtggtgacgaggatgggaaggtcgtgggggagctcgcgccggaggagatcgcagtgttcctctgggtgtgctgggtcatggcgtggagcgcttcggcctcgagggtggtcagtgacggaggagataaatcggagcccgtcacggtgctcctcccggacgtgacgcacctggtgctgtcggcgctcgtctcggcgggcgtcgtcacggatgatgcaggcgtttggggctgggacgtctccagcggtgggaagggggtgaaggtccaggagttcatgtcgtgggtgctgtccacgcctttcggccttgggaactgcctctcgcggtatgtgcgggacaaattccggtccctggctgctgactctgtggaggagagctctgtttcaactgttagcacaacctttgacacttctgatgtttatctgctaacacgggggagagcatgggcaattgccctcagcctaagaaacaagttgagtgaaaagctgctgtcagcttctgttattggaatggacacagaagacctcctttataggtcatctgttcatggaaaaggactgagccggttctggtcttgtgttgaggggtacaaagggccaatgctgattctactttcagcattctcaaaaggtggtggtgagaatgttgattctgatcgaagatgggtgattggtgtattgaccgaggagggatttgagaacaaagataccttttatggtagctctgggttcctttgtgccgcacatccaatattccgcatgctaccaccatctggcaaggaaaagaacttcatgtactgccacctacatcctcagataagagcttatgaagcgaatccaaagcccgttggcttagcatttggtggaacaattggaaatgagaggatctttcttgatgaagacttctcgggagttttagtacgacaccatgctgttgataaaacttatcaacatggctctctcatccccaatcagggttatttgcctgttgaggcttcagtgcttgatgttgaggtatgggggctgggtggagaagcaacgaaacgacagcagaatatgtacaagaagagggaggacatcttctcagagcagcgaagaaaggttgatctcaaaacttttgctagctgggaagactctccagagaagatgatgatggacatgatgtcggacccaaacacggttcgacgggaagaccggtgattttggtttgcagcctccggggatgtacagacgacagcgtttgttgcacataggagtattttgcttgcgcatttggctgggtcacacgctttatttaggttgaagtactaaaagaagatttgtacagaacgtaattcccaataaatgaaatggagattctggac

SEQ ID NO: 110183 - protein, 588 aa, Zea mays subsp. mays
  misc_feature (1)..(588): Ceres Seq. ID no. 15176036
  misc_feature (45)..(588): Homolog of NCBI NO: 15010732 NR Description: AT5g39590/MIJ24_60 [Arabidopsis thaliana]
  misc_feature (45)..(588): Homolog of NCBI NO: 15241814 NR Description: expressed protein [Arabidopsis thaliana]
  misc_feature (45)..(588): Homolog of NCBI NO: 27450531 NR Description: hypothetical protein [Prunus persica]
  misc_feature (45)..(588): Homolog of NCBI NO: 38346079 NR Description: OSJNBa0084K01.19 [Oryza sativa (japonica
PKGRLGLGGLQAFRLSTPPFSPPARLSNPHPASPFRRGTDTSPAMGASSSTGNPSPEAHEQREQETLASAALSLPLLRAAFSRSAANALPDALAPPPASFRLPGSPAPPPPHFHGILGGLGPAIASQFFGHGAAAVTDGGAGWVQFLRGFNRCCARVTASRSLALLLRVYAAACAGAGAPCGVQLQPDEGGGDEDGKVVGELAPEEIAVFLWVCWVMAWSASASRVVSDGGDKSEPVTVLLPDVTHLVLSALVSAGVVTDDAGVWGWDVSSGGKGVKVQEFMSWVLSTPFGLGNCLSRYVRDKFRSLAADSVEESSVSTVSTTFDTSDVYLLTRGRAWAIALSLRNKLSEKLLSASVIGMDTEDLLYRSSVHGKGLSRFWSCVEGYKGPMLILLSAFSKGGGENVDSDRRWVIGVLTEEGFENKDTFYGSSGFLCAAHPIFRMLPPSGKEKNFMYCHLHPQIRAYEANPKPVGLAFGGTIGNERIFLDEDFSGVLVRHHAVDKTYQHGSLIPNQGYLPVEASVLDVEVWGLGGEATKRQQNMYKKREDIFSEQRRKVDLKTFASWEDSPEKMMMDMMSDPNTVRREDR

SEQ ID NO: 110184 - protein, 544 aa, Zea mays subsp. mays
  misc_feature (1)..(544): Ceres Seq. ID no. 15176037
  misc_feature (1)..(544): Homolog of NCBI NO: 15010732 NR Description: AT5g39590/MIJ24_60 [Arabidopsis thaliana]
  misc_feature (1)..(544): Homolog of NCBI NO: 15241814 NR Description: expressed protein [Arabidopsis thaliana]
  misc_feature (1)..(544): Homolog of NCBI NO: 27450531 NR Description: hypothetical protein [Prunus persica]
  misc_feature (1)..(544): Homolog of NCBI NO: 38346079 NR Description: OSJNBa0084K01.19 [Oryza sativa (japonica
MGASSSTGNPSPEAHEQREQETLASAALSLPLLRAAFSRSAANALPDALAPPPASFRLPGSPAPPPPHFHGILGGLGPAIASQFFGHGAAAVTDGGAGWVQFLRGFNRCCARVTASRSLALLLRVYAAACAGAGAPCGVQLQPDEGGGDEDGKVVGELAPEEIAVFLWVCWVMAWSASASRVVSDGGDKSEPVTVLLPDVTHLVLSALVSAGVVTDDAGVWGWDVSSGGKGVKVQEFMSWVLSTPFGLGNCLSRYVRDKFRSLAADSVEESSVSTVSTTFDTSDVYLLTRGRAWAIALSLRNKLSEKLLSASVIGMDTEDLLYRSSVHGKGLSRFWSCVEGYKGPMLILLSAFSKGGGENVDSDRRWVIGVLTEEGFENKDTFYGSSGFLCAAHPIFRMLPPSGKEKNFMYCHLHPQIRAYEANPKPVGLAFGGTIGNERIFLDEDFSGVLVRHHAVDKTYQHGSLIPNQGYLPVEASVLDVEVWGLGGEATKRQQNMYKKREDIFSEQRRKVDLKTFASWEDSPEKMMMDMMSDPNTVRREDR

SEQ ID NO: 110185 - protein, 372 aa, Zea mays subsp. mays
  misc_feature (1)..(372): Ceres Seq. ID no. 15176038
  misc_feature (1)..(372): Homolog of NCBI NO: 15010732 NR Description: AT5g39590/MIJ24_60 [Arabidopsis thaliana]
  misc_feature (1)..(372): Homolog of NCBI NO: 15241814 NR Description: expressed protein [Arabidopsis thaliana]
  misc_feature (1)..(372): Homolog of NCBI NO: 27450531 NR Description: hypothetical protein [Prunus persica]
  misc_feature (1)..(372): Homolog of NCBI NO: 38346079 NR Description: OSJNBa0084K01.19 [Oryza sativa (japonica
MAWSASASRVVSDGGDKSEPVTVLLPDVTHLVLSALVSAGVVTDDAGVWGWDVSSGGKGVKVQEFMSWVLSTPFGLGNCLSRYVRDKFRSLAADSVEESSVSTVSTTFDTSDVYLLTRGRAWAIALSLRNKLSEKLLSASVIGMDTEDLLYRSSVHGKGLSRFWSCVEGYKGPMLILLSAFSKGGGENVDSDRRWVIGVLTEEGFENKDTFYGSSGFLCAAHPIFRMLPPSGKEKNFMYCHLHPQIRAYEANPKPVGLAFGGTIGNERIFLDEDFSGVLVRHHAVDKTYQHGSLIPNQGYLPVEASVLDVEVWGLGGEATKRQQNMYKKREDIFSEQRRKVDLKTFASWEDSPEKMMMDMMSDPNTVRREDR

SEQ ID NO: 110186 - DNA, 774 bp, Zea mays subsp. mays
  misc_feature (1)..(774): Ceres Seq. ID no. 15179490
gcagattaaatttctaacgacagtcatgtctccgtcaacggcgtcgagtttcgtcggctccatcttagcggttgacgccgccgtctctaccgcgattcacacggcggcgaagccattcctcccgccgttcatcctccttctcctggaaatctccgccgatttccgattctccttcccggtctccctatccctcctcctctcccctccactgcgcccgttcctcatccccttcctcctcggcctcctcctcgatctaatcttcgtcggaatcgtgaagctgatcttccgccgcccacgtcccgcttacaatcatccctcgatgtccgcagcagtatcggccgatcattactcgtttccctccggccacgcgtcccgcgtcttcttcgtcgccgcctcggttcacttcttcacttctgaagctcaagtggtttctccgagctactctttcttagacgggtgggtgagggatcgtggagagggagttgtgaaaggagaggtcttggtgggtgtgtggatctgggctacggtgactgctgtgtcgaggattctgttagggaggcattacgtgctcgacgtagctgctggtgcttgcttgggtgttctagaagctctctttgctcttcggtttctgagattcgaacagatcttggggtggtggtaagaacattgttattgttgttgatgtaatgtttgtgacatcaattgatttttttttcgattacattgtcaaaaacaatggttacttttatgtttcatgaattcaaagtttgtgtc

SEQ ID NO: 110187 - protein, 219 aa, Zea mays subsp. mays
  misc_feature (1)..(219): Ceres Seq. ID no. 15179491
  misc_feature (66)..(215): Pfam Name: PAP2 superfamily Pfam Description: PAP2 superfamily
  misc_feature (170)..(200): Homolog of NCBI NO: 22760264 NR Description: unnamed protein product [Homo sapiens]
  misc_feature (9)..(125): Homolog of NCBI NO: 22760264 NR Description: unnamed protein product [Homo sapiens]
  misc_feature (170)..(202): Homolog of NCBI NO: 23273743 NR Description: Unknown (protein for MGC:33278) [Homo sapiens]
  misc_feature (71)..(125): Homolog of NCBI NO: 23273743 NR Description: Unknown (protein for MGC:33278) [Homo sapiens]
  misc_feature (170)..(202): Homolog of NCBI NO: 12855379 NR Description: unnamed protein product [Mus musculus]
  misc_feature (9)..(130): Homolog of NCBI NO: 12855379 NR Description: unnamed protein product [Mus musculus]
  misc_feature (167)..(204): Homolog of NCBI NO: 24583289 NR Description: CG31717-PA [Drosophila melanogaster]
  misc_feature (48)..(129): Homolog of NCBI NO: 24583289 NR Description: CG31717-PA [Drosophila melanogaster]
  misc_feature (10)..(215): Homolog of NCBI NO: 12247468 NR Description: PnFL-1 [Ipomoea nil]
  misc_feature (9)..(216): Homolog of NCBI NO: 15235691 NR Description: phosphatidic acid phosphatase (PAP2)-related
QIKFLTTVMSPSTASSFVGSILAVDAAVSTAIHTAAKPFLPPFILLLLEISADFRFSFPVSLSLLLSPPLRPFLIPFLLGLLLDLIFVGIVKLIFRRPRPAYNHPSMSAAVSADHYSFPSGHASRVFFVAASVHFFTSEAQVVSPSYSFLDGWVRDRGEGVVKGEVLVGVWIWATVTAVSRILLGRHYVLDVAAGACLGVLEALFALRFLRFEQILGWW

SEQ ID NO: 110188 - protein, 211 aa, Zea mays subsp. mays
  misc_feature (1)..(211): Ceres Seq. ID no. 15179492
  misc_feature (58)..(207): Pfam Name: PAP2 superfamily Pfam Description: PAP2 superfamily
  misc_feature (162)..(192): Homolog of NCBI NO: 22760264 NR Description: unnamed protein product [Homo sapiens]
  misc_feature (1)..(117): Homolog of NCBI NO: 22760264 NR Description: unnamed protein product [Homo sapiens]
  misc_feature (162)..(194): Homolog of NCBI NO: 23273743 NR Description: Unknown (protein for MGC:33278) [Homo sapiens]
  misc_feature (63)..(117): Homolog of NCBI NO: 23273743 NR Description: Unknown (protein for MGC:33278) [Homo sapiens]
  misc_feature (162)..(194): Homolog of NCBI NO: 12855379 NR Description: unnamed protein product [Mus musculus]
  misc_feature (1)..(122): Homolog of NCBI NO: 12855379 NR Description: unnamed protein product [Mus musculus]
  misc_feature (159)..(196): Homolog of NCBI NO: 24583289 NR Description: CG31717-PA [Drosophila melanogaster]
  misc_feature (40)..(121): Homolog of NCBI NO: 24583289 NR Description: CG31717-PA [Drosophila melanogaster]
  misc_feature (2)..(207): Homolog of NCBI NO: 12247468 NR Description: PnFL-1 [Ipomoea nil]
  misc_feature (1)..(208): Homolog of NCBI NO: 15235691 NR Description: phosphatidic acid phosphatase (PAP2)-related
MSPSTASSFVGSILAVDAAVSTAIHTAAKPFLPPFILLLLEISADFRFSFPVSLSLLLSPPLRPFLIPFLLGLLLDLIFVGIVKLIFRRPRPAYNHPSMSAAVSADHYSFPSGHASRVFFVAASVHFFTSEAQVVSPSYSFLDGWVRDRGEGVVKGEVLVGVWIWATVTAVSRILLGRHYVLDVAAGACLGVLEALFALRFLRFEQILGWW

SEQ ID NO: 110189 - protein, 113 aa, Zea mays subsp. mays
  misc_feature (1)..(113): Ceres Seq. ID no. 15179493
  misc_feature (1)..(109): Pfam Name: PAP2 superfamily Pfam Description: PAP2 superfamily
  misc_feature (64)..(94): Homolog of NCBI NO: 22760264 NR Description: unnamed protein product [Homo sapiens]
  misc_feature (1)..(19): Homolog of NCBI NO: 22760264 NR Description: unnamed protein product [Homo sapiens]
  misc_feature (64)..(96): Homolog of NCBI NO: 23273743 NR Description: Unknown (protein for MGC:33278) [Homo sapiens]
  misc_feature (1)..(19): Homolog of NCBI NO: 23273743 NR Description: Unknown (protein for MGC:33278) [Homo sapiens]
  misc_feature (64)..(96): Homolog of NCBI NO: 12855379 NR Description: unnamed protein product [Mus musculus]
  misc_feature (1)..(24): Homolog of NCBI NO: 12855379 NR Description: unnamed protein product [Mus musculus]
  misc_feature (61)..(98): Homolog of NCBI NO: 24583289 NR Description: CG31717-PA [Drosophila melanogaster]
  misc_feature (1)..(23): Homolog of NCBI NO: 24583289 NR Description: CG31717-PA [Drosophila melanogaster]
  misc_feature (1)..(109): Homolog of NCBI NO: 12247468 NR Description: PnFL-1 [Ipomoea nil]
  misc_feature (1)..(110): Homolog of NCBI NO: 15235691 NR Description: phosphatidic acid phosphatase (PAP2)-related
MSAAVSADHYSFPSGHASRVFFVAASVHFFTSEAQVVSPSYSFLDGWVRDRGEGVVKGEVLVGVWIWATVTAVSRILLGRHYVLDVAAGACLGVLEALFALRFLRFEQILGWW

SEQ ID NO: 110190 - DNA, 1878 bp, Zea mays subsp. mays
  misc_feature (1)..(1878): Ceres Seq. ID no. 15179397
ctcctcttctccagcgtccgatccccgtttcccacgaatcccactctactcctccatctgcggcctcctccatgctcctgcccccttctctctcctccttgcttccccgcgcgcacgtttttacaagggtttcggcggaggcgaccggtcgccgacgatggcggacgacagcggcagccacgagggcggcggcggcggcggcgacgacgtccgggagcaggacatgttcttgcctattaccaacatcacccggatcatgaagaaggccgtcccggccaatgccaagatcactaaggacgctaaggagataatgcagtactgcgtctccgagttcatattctttgtgacgagcgaggcgagggagaaaagcaaaaaggaggagcgtaagagaatcaacgtggacgatttgctctggtcagtggatacggcaggattcgagtacgtggagcttctcaggatttgcctacaaaagtacagagagacggggaagtgcacggtgtacacgacgtgatcaggttattaacctgtaacaccttagtgagaaaacattgagcacttggcaggtagtacgcaatcagtttaagaaactgcaaactgcaagctcctgggcaactagtgttgttgctgtgaacaaggtgatagtaaggtgtctacaaaggctggcgagggctctttaaataaggatgcagttagtacccatggtggcaccagtaactcaagcaaccagcatggagtttacaaccaagagatggtaccaccacagcatggagttaacaacaaagagatggacgatatgtcgccacagttggttcaccatggagtttacaaccttgagatggataatatgctgtcacagttggatcaacatgaagtttacaaccaagggatggatgatatgccagcacatttggttcaacatggagtttataaccaagggatatgcgatatgacgccacagttggttcaacatggagtttacaaccaagggatgagcgatatgccaccaaagcatggagtttacaaccaagcgatgaatgatatgccgacacagttagttcaacatggagtttacaaccaagagatggatgatatgctgccacagttggttcaacatggagtttacaaccaagggatgagtgatatgtcgccacagttggttcaacatggaggttacaaccaagagatggatgatatgacgccacagttggttccgcacggagtttacaaccaagggatgagcgatatgctgccgcagttggttcaacatggagttcacaaccaagagatggacgatatgccgccacagttggttcaacatggagtttacaaccaagagatcaatgatatgcagccacagttggttcaacatggactttacaatggagaaatggatgatatgccgccacagttggttcaacatggagttgacaaccaagagatggacgatatgccaccacatttggtccaacatggagtttacaaccaagaggtggacaatatggtgccacatttggttcagcatggagtttacaaccaagggatgagcgatatgctgccacagttggttccacatggagtttacaaccaagagatggataatataacgccacagttggttcagcatggagtttacaaccaagggatggacgatatgccgccacagttggttcaacatggagtttgcaaccaagggatggtcaatatgcaactgcagtttgttcaacatggagtttgcaaccaagggatggacgatatacctccatagctaagagatgttaacctactagaagatactggggtaaataaccttggacccgcttttttaagagaatgtgagttgtgccattctatttaattatataattctttggtttaagc

SEQ ID NO: 110191 - protein, 338 aa, Zea mays subsp. mays
  misc_feature (1)..(338): Ceres Seq. ID no. 15179398
  misc_feature (106)..(338): Homolog of NCBI NO: 37545275 NR Description: similar to acidic repetitive protein arp1 -
  misc_feature (89)..(338): Homolog of NCBI NO: 37545275 NR Description: similar to acidic repetitive protein arp1 -
MVPPQHGVNNKEMDDMSPQLVHHGVYNLEMDNMLSQLDQHEVYNQGMDDMPAHLVQHGVYNQGICDMTPQLVQHGVYNQGMSDMPPKHGVYNQAMNDMPTQLVQHGVYNQEMDDMLPQLVQHGVYNQGMSDMSPQLVQHGGYNQEMDDMTPQLVPHGVYNQGMSDMLPQLVQHGVHNQEMDDMPPQLVQHGVYNQEINDMQPQLVQHGLYNGEMDDMPPQLVQHGVDNQEMDDMPPHLVQHGVYNQEVDNMVPHLVQHGVYNQGMSDMLPQLVPHGVYNQEMDNITPQLVQHGVYNQGMDDMPPQLVQHGVCNQGMVNMQLQFVQHGVCNQGMDDIPP

SEQ ID NO: 110192 - protein, 326 aa, Zea mays subsp. mays
  misc_feature (1)..(326): Ceres Seq. ID no. 15179399
  misc_feature (94)..(326): Homolog of NCBI NO: 37545275 NR Description: similar to acidic repetitive protein arp1 -
  misc_feature (77)..(326): Homolog of NCBI NO: 37545275 NR Description: similar to acidic repetitive protein arp1 -
MDDMSPQLVHHGVYNLEMDNMLSQLDQHEVYNQGMDDMPAHLVQHGVYNQGICDMTPQLVQHGVYNQGMSDMPPKHGVYNQAMNDMPTQLVQHGVYNQEMDDMLPQLVQHGVYNQGMSDMSPQLVQHGGYNQEMDDMTPQLVPHGVYNQGMSDMLPQLVQHGVHNQEMDDMPPQLVQHGVYNQEINDMQPQLVQHGLYNGEMDDMPPQLVQHGVDNQEMDDMPPHLVQHGVYNQEVDNMVPHLVQHGVYNQGMSDMLPQLVPHGVYNQEMDNITPQLVQHGVYNQGMDDMPPQLVQHGVCNQGMVNMQLQFVQHGVCNQGMDDIPP

SEQ ID NO: 110193 - protein, 323 aa, Zea mays subsp. mays
  misc_feature (1)..(323): Ceres Seq. ID no. 15179400
  misc_feature (91)..(323): Homolog of NCBI NO: 37545275 NR Description: similar to acidic repetitive protein arp1 -
  misc_feature (74)..(323): Homolog of NCBI NO: 37545275 NR Description: similar to acidic repetitive protein arp1 -
MSPQLVHHGVYNLEMDNMLSQLDQHEVYNQGMDDMPAHLVQHGVYNQGICDMTPQLVQHGVYNQGMSDMPPKHGVYNQAMNDMPTQLVQHGVYNQEMDDMLPQLVQHGVYNQGMSDMSPQLVQHGGYNQEMDDMTPQLVPHGVYNQGMSDMLPQLVQHGVHNQEMDDMPPQLVQHGVYNQEINDMQPQLVQHGLYNGEMDDMPPQLVQHGVDNQEMDDMPPHLVQHGVYNQEVDNMVPHLVQHGVYNQGMSDMLPQLVPHGVYNQEMDNITPQLVQHGVYNQGMDDMPPQLVQHGVCNQGMVNMQLQFVQHGVCNQGMDDIPP

SEQ ID NO: 110194 - DNA, 972 bp, Zea mays subsp. mays
  misc_feature (1)..(972): Ceres Seq. ID no. 15176807
atcattcaggtcttcgtctttttcgtctctctctgttctctccatcgctgaacattcagatcgctagctggtcgtgcatctaatctactactattatatttcttcatcttcccatagttgagatcttaaccaaaaaaaaatgaacaaaaacacacggatcgatatcccctcttcgtcttcaccatccttagcttccgcagacggtgagctccacgaagacgacatcttcgcaatcgacataactcacgcgcctcgtccttctccgacgcagcaacaacacccacctgctcgtcaccttcaaagaagcaaaagcagtttgaaaaacgtggaagcttccggtatcctcgctgctctccccgagccttcaggaggaaacagttacctcaaccacgtctttcaccacaaacccgcctctgttctctccacttcagtctcctccacagcttcttcctcgtcttcttcaggcggcggtgcttccgctcgaaccatccccgccgctcctaaaccgcctcaagagaggcttccgtttacgtcttcttttatgaacggagggaagtttcctcagtcggctccagttcgagttccgtcggcgatgatgaatcgtcataagaaggagtttaagttgactgatgtggtggatgttgatgatgatgaggaaggggagatgcttccgcctcacgagatggtagctcgttctttggctcagtcttcgttgctgtcttgctcggtgcttgaaggagcaggaagaacacttaaagggagagatctccggcaggtaaggaatgctgttttcagaagaaccggttttattgattgaatttctctttttttcattctttgatttgttgtccccaattgaaccggttttatttggtttacagaaacattccaatgtattgttcatatatgttgtctacattacacgatttgttgtttacttcatattaatcagattgatgtgattgtttgctt

SEQ ID NO: 110195 - protein, 225 aa, Zea mays subsp. mays
  misc_feature (1)..(225): Ceres Seq. ID no. 15176808
  misc_feature (20)..(225): Pfam Name: Protein of unknown function, DUF584 Pfam Description: Protein of unknown function, DUF584
  misc_feature (132)..(225): Homolog of NCBI NO: 18412629 NR Description: expressed protein [Arabidopsis thaliana]
  misc_feature (137)..(225): Homolog of NCBI NO: 27476087 NR Description: Hypothetical protein [Oryza sativa (japonica
  misc_feature (135)..(223): Homolog of NCBI NO: 7487830 NR Description: hypothetical protein T8O5.180 - Arabidopsis
  misc_feature (97)..(225): Homolog of NCBI NO: 21741306 NR Description: OSJNBb0103I08.8 [Oryza sativa (japonica
  misc_feature (10)..(225): Homolog of NCBI NO: 37534318 NR Description: putative prolyl 4-hydroxylase alpha subunit-like
  misc_feature (95)..(219): Homolog of NCBI NO: 34908520 NR Description: P0423B08.9 [Oryza sativa (japonica
  misc_feature (10)..(225): Homolog of NCBI NO: 38346328 NR Description: OJ000126_13.10 [Oryza sativa (japonica
  misc_feature (1)..(225): Homolog of NCBI NO: 15983450 NR Description: AT3g15040/K15M2_18 [Arabidopsis thaliana]
  misc_feature (1)..(225): Homolog of NCBI NO: 21594619 NR Description: unknown [Arabidopsis thaliana]
  misc_feature (1)..(225): Homolog of NCBI NO: 18400614 NR Description: expressed protein [Arabidopsis thaliana]
MNKNTRIDIPSSSSPSLASADGELHEDDIFAIDITHAPRPSPTQQQHPPARHLQRSKSSLKNVEASGILAALPEPSGGNSYLNHVFHHKPASVLSTSVSSTASSSSSSGGGASARTIPAAPKPPQERLPFTSSFMNGGKFPQSAPVRVPSAMMNRHKKEFKLTDVVDVDDDEEGEMLPPHEMVARSLAQSSLLSCSVLEGAGRTLKGRDLRQVRNAVFRRTGFID

SEQ ID NO: 110196 - DNA, 1769 bp, Zea mays subsp. mays
  misc_feature (1)..(1769): Ceres Seq. ID no. 15180029
accgttctcttctccctaatcctggtaatcagtagtagccactagcgctgctgccgttctcttcccctacccgacacaagctccaccacctctatctaccacacgccaccactgtaggagctcctccacgatcatcccgccctagagccataataattcgttgaagaggagggggttcttagaaccagagggcggctacctgtgaaggatacccgtgctgctggctgctgctgttcctcgagctagagccgtgtgtgggctgtgcagattgcagagcgcagcttccagtctcagcattgctttcaatggggaggcactcctgctgttacaagcagaagctgaggaaggggctctggtctcctgaggaagatgagaagctcatgatccacataaccaagcacgggcatggctgctggagcactgtccccaagcttgcagggcttcagaggtgtggcaagagctgcaggctgaggtggataaattacctgaggcctgaccttaaaagaggtgcattctctgaggaggaggaagacctcatcgtcgaacttcatgctgtactggggaacaggtggtctcagattgcaacaaggttgcctggaagaactgacaacgagatcaagaatctctggaactcgagcatcaagaagaagctccggcagaaaggcattgaccccaacacccacaagccgctccttgtcgaggttgaacgcagcaaagcagctccagcgaccagtaccgagagaacctctgagtccaatgatgttgacccttcaagtggcgccgcacttggcaactcgagccatcttcttctcagcgagacagcacaatcaccacagctgccagcgctcggtaagcatcgcagagaaactactagcctggcacatctaagggtgccgcccaaggagttgttccttgaccagctggcttctggtcatgagaacctcactggctgccgcacagcaggcccagttccaaatttccctttccaacagctgatgtgctacaacaatgaatttggcaacaagaatggtgctagtaacaattcactctggtttaaccacaatgagacaagtggcagcaccatttccactgtgatgccaccagtttcgccatcaactctctcgacatcaacagggctcaataggtcaccagacaacccacactcgggaggcactgccattcagagcacccagttctactgggacgctgctaatcctagcagctgcagcagtagaggaagcagcggaagcaacggcttgggatttgagctgcaaagcacaagctcgcttctggagagtagtgttttcccatggacagaattaacaccagataagaatagccaagttcagcttggggaagaactcaagtggcccgacttgctccacggaacattcacagacacacatgcaaccatgcagaaccttagccagtcactgtacgaagatgttatcaaagccgagagccaattcaacatagagggcctctgtgcagcctggtctcaaaatctgcagccacagcaacacctgcaggtatcagatttgtatgacaaggatttgcaaaggatgtccttgtcttttgagaatatctagacagcatgtttcagcatgcagggaacagagaaatagcagaaagctgagtcaatgaagccttaaaaaatacaatatttcttcacagattcatttgaaggctatgtggaggtgtgttttacgtaggtacattcttatgatgaaacagagatcaatactgataactgttcaccagtgtaaatc

SEQ ID NO: 110197 - protein, 427 aa, Zea mays subsp. mays
  misc_feature (1)..(427): Ceres Seq. ID no. 15180030
  misc_feature (14)..(61): Pfam Name: Myb-like DNA-binding domain Pfam Description: Myb-like DNA-binding domain
  misc_feature (1)..(44): Homolog of NCBI NO: 7446174 NR Description: transcription factor MYB4 - Arabidopsis thaliana
  misc_feature (45)..(176): Homolog of NCBI NO: 7446174 NR Description: transcription factor MYB4 - Arabidopsis thaliana
  misc_feature (1)..(147): Homolog of NCBI NO: 15234262 NR Description: myb family transcription factor [Arabidopsis
  misc_feature (1)..(176): Homolog of NCBI NO: 30690317 NR Description: myb transcription factor (ATMYB4) [Arabidopsis
  misc_feature (1)..(176): Homolog of NCBI NO: 2280530 NR Description: ATMYB4 [Arabidopsis thaliana]
  misc_feature (1)..(151): Homolog of NCBI NO: 15223612 NR Description: myb family transcription factor [Arabidopsis
  misc_feature (1)..(176): Homolog of NCBI NO: 28628949 NR Description: MYB2 [Dendrobium sp. XMW-2002-2]
  misc_feature (1)..(160): Homolog of NCBI NO: 25294104 NR Description: hypothetical protein [imported] - Arabidopsis
  misc_feature (1)..(160): Homolog of NCBI NO: 22329445 NR Description: myb family transcription factor [Arabidopsis
  misc_feature (1)..(427): Homolog of NCBI NO: 34902542 NR Description: putative transcription factor (myb)
MGRHSCCYKQKLRKGLWSPEEDEKLMIHITKHGHGCWSTVPKLAGLQRCGKSCRLRWINYLRPDLKRGAFSEEEEDLIVELHAVLGNRWSQIATRLPGRTDNEIKNLWNSSIKKKLRQKGIDPNTHKPLLVEVERSKAAPATSTERTSESNDVDPSSGAALGNSSHLLLSETAQSPQLPALGKHRRETTSLAHLRVPPKELFLDQLASGHENLTGCRTAGPVPNFPFQQLMCYNNEFGNKNGASNNSLWFNHNETSGSTISTVMPPVSPSTLSTSTGLNRSPDNPHSGGTAIQSTQFYWDAANPSSCSSRGSSGSNGLGFELQSTSSLLESSVFPWTELTPDKNSQVQLGEELKWPDLLHGTFTDTHATMQNLSQSLYEDVIKAESQFNIEGLCAAWSQNLQPQQHLQVSDLYDKDLQRMSLSFENI

SEQ ID NO: 110198 - protein, 402 aa, Zea mays subsp. mays
  misc_feature (1)..(402): Ceres Seq. ID no. 15180031
  misc_feature (1)..(36): Pfam Name: Myb-like DNA-binding domain Pfam Description: Myb-like DNA-binding domain
  misc_feature (1)..(19): Homolog of NCBI NO: 7446174 NR Description: transcription factor MYB4 - Arabidopsis thaliana
  misc_feature (20)..(151): Homolog of NCBI NO: 7446174 NR Description: transcription factor MYB4 - Arabidopsis thaliana
  misc_feature (1)..(122): Homolog of NCBI NO: 15234262 NR Description: myb family transcription factor [Arabidopsis
  misc_feature (1)..(151): Homolog of NCBI NO: 30690317 NR Description: myb transcription factor (ATMYB4) [Arabidopsis
  misc_feature (1)..(151): Homolog of NCBI NO: 2280530 NR Description: ATMYB4 [Arabidopsis thaliana]
  misc_feature (1)..(126): Homolog of NCBI NO: 15223612 NR Description: myb family transcription factor [Arabidopsis
  misc_feature (1)..(151): Homolog of NCBI NO: 28628949 NR Description: MYB2 [Dendrobium sp. XMW-2002-2]
  misc_feature (1)..(135): Homolog of NCBI NO: 25294104 NR Description: hypothetical protein [imported] - Arabidopsis
  misc_feature (1)..(135): Homolog of NCBI NO: 22329445 NR Description: myb family transcription factor [Arabidopsis
  misc_feature (1)..(402): Homolog of NCBI NO: 34902542 NR Description: putative transcription factor (myb)
MIHITKHGHGCWSTVPKLAGLQRCGKSCRLRWINYLRPDLKRGAFSEEEEDLIVELHAVLGNRWSQIATRLPGRTDNEIKNLWNSSIKKKLRQKGIDPNTHKPLLVEVERSKAAPATSTERTSESNDVDPSSGAALGNSSHLLLSETAQSPQLPALGKHRRETTSLAHLRVPPKELFLDQLASGHENLTGCRTAGPVPNFPFQQLMCYNNEFGNKNGASNNSLWFNHNETSGSTISTVMPPVSPSTLSTSTGLNRSPDNPHSGGTAIQSTQFYWDAANPSSCSSRGSSGSNGLGFELQSTSSLLESSVFPWTELTPDKNSQVQLGEELKWPDLLHGTFTDTHATMQNLSQSLYEDVIKAESQFNIEGLCAAWSQNLQPQQHLQVSDLYDKDLQRMSLSFENI

SEQ ID NO: 110199 - DNA, 857 bp, Zea mays subsp. mays
  misc_feature (1)..(857): Ceres Seq. ID no. 15178299
gaaccaactatcctcaggggacttaagaaacaaaaaaaactttctcgccttcttctagaaacaacaccttctcttccaattagagtctctcaaaaaaaaaatggcggttacatcttctagaaccagatcaaccgcttctgcgctacgctctccgtcttcaccaggcttcgcttcctccacaagctccaccttctcctcccgtactttcttcagcaaccaacatcatcaacatcaaccccacagatccgcgtcccctacgcgcgttaacctcttcgcatcctccccgctaaaacaatcatcgttccgttactcgatcgacaacaccagatccatcgccgtttcgaagcccagcggcggcaacaagatccccgattcgaggaggagatgcatgtgctcgccgacgactcaccccggatcgttccggtgcagtttacacaagaacgtcgcgaatccccacgggcaaggcgccgcgacggcggcggcgtatccgacgaacagtttgaatatgaggagatcggcgatgacgaattctctggtgaggatcggtggggttgaaggcgagtgggtgagaagagcgttgacgacgctgataaggcctttttcgcatcagctgaaaaggaggtttgcttatcagcctaggcctagtcggttatcgtcgatgtcgaaggctgatgatctttgatcgggtttgttattgaatcggagacgaaaacgaccccgtcttgaagttttttgttttgttgcgtgaagatgaattgtacatagtacttcatttgctatcgaaaaatatctagaattgaagaacagtaatagaagtggttatttaaaattaaatggaacaaagggacttggttttt

SEQ ID NO: 110200 - protein, 193 aa, Zea mays subsp. mays
  misc_feature (1)..(193): Ceres Seq. ID no. 15178300
  misc_feature (32)..(183): Homolog of NCBI NO: 15241329 NR Description: hypothetical protein [Arabidopsis thaliana]
  misc_feature (1)..(193): Homolog of NCBI NO: 24461857 NR Description: CTV.15 [Poncirus trifoliata]
  misc_feature (14)..(192): Homolog of NCBI NO: 15238947 NR Description: expressed protein [Arabidopsis thaliana]
  misc_feature (17)..(193): Homolog of NCBI NO: 21618161 NR Description: serine-rich protein [Arabidopsis thaliana]
  misc_feature (17)..(193): Homolog of NCBI NO: 15238753 NR Description: serine-rich protein [Arabidopsis thaliana]
MAVTSSRTRSTASALRSPSSPGFASSTSSTFSSRTFFSNQHHQHQPHRSASPTRVNLFASSPLKQSSFRYSIDNTRSIAVSKPSGGNKIPDSRRRCMCSPTTHPGSFRCSLHKNVANPHGQGAATAAAYPTNSLNMRRSAMTNSLVRIGGVEGEWVRRALTTLIRPFSHQLKRRFAYQPRPSRLSSMSKADDL

SEQ ID NO: 110201 - protein, 97 aa, Zea mays subsp. mays
  misc_feature (1)..(97): Ceres Seq. ID no. 15178301
  misc_feature (1)..(87): Homolog of NCBI NO: 15241329 NR Description: hypothetical protein [Arabidopsis thaliana]
  misc_feature (1)..(97): Homolog of NCBI NO: 24461857 NR Description: CTV.15 [Poncirus trifoliata]
  misc_feature (1)..(96): Homolog of NCBI NO: 15238947 NR Description: expressed protein [Arabidopsis thaliana]
  misc_feature (1)..(97): Homolog of NCBI NO: 21618161 NR Description: serine-rich protein [Arabidopsis thaliana]
  misc_feature (1)..(97): Homolog of NCBI NO: 15238753 NR Description: serine-rich protein [Arabidopsis thaliana]
MCSPTTHPGSFRCSLHKNVANPHGQGAATAAAYPTNSLNMRRSAMTNSLVRIGGVEGEWVRRALTTLIRPFSHQLKRRFAYQPRPSRLSSMSKADDL

SEQ ID NO: 110202 - DNA, 1157 bp, Zea mays subsp. mays
  misc_feature (1)..(1157): Ceres Seq. ID no. 15176155
acaacattctcacgcagccctaaaactccttcgcctccctctctcgaatctctcttcctccttcatcatcaaaatggaattctggggagttgaggttagggcagggaagccacttaaagtgaaacctgatgaagactgtctcatccacctttcacaggcatctcttgataaagggaagaagggtgaaaccgccgtcttgtacgtgaccgttgacgggaagaagcttgtgattggaacacttgttcaagacaccatcccccagatcagctttgatctggtctttgagaaggagtttgagctctcacactcgtccaaaggaagcgtccacttcatcggctacaagtctcccaacatcgacgaagaggaggatttcccttgtgactcggaagaggaagaggaggaagttgaggttcctgctacttcaactgtcactacaaacggagcaacacctacttcgagtgttgttactgttgactcaaagccaaaggctgcggctaaggctaagcctgctgtagtgaagcctgaatcagacgaggatgatgatgagtctgacgaggaggatgattctgaagatgatggatctgactctgagaaagggatggatgttgatgaggatgattctgaggatgagaaagatgattctgaggaggaggaagaggatacccctaagaagcctgagacaagcaacaagaagaggccgattgaatctgcaacacctgtctctgctaagaagactaaaccagcagtagcagctacccctcagaaatcagaggagaagaagggagggcacacagctacaccacacccagctaaaaagggaggaaagagtcctatgaatgctaaccagagccccaaatctggaggtcaatcatccggatctggtggtaacaagaagccattcaacaactctggcaagcaatttggttctaacaacaagggcaacaaggggaagggaaagggcagcagagcctaagtgaagtgagatgttttgattttttagtagatgctctgtgagctgagatgaaagagatcggttttatttttatgtttatcctaagattttattctccttgtgggaattgctattttatgttattgcaacttttaaccttatggaattcagtattttgagaatggaaactcggaatgcaatcatg

SEQ ID NO: 110203 - protein, 323 aa, Zea mays subsp. mays
  misc_feature (1)..(323): Ceres Seq. ID no. 15176156
  misc_feature (119)..(221): Pfam Name: Nucleoplasmin Pfam Description: Nucleoplasmin
  misc_feature (25)..(307): Homolog of NCBI NO: 7716950 NR Description: histone deacetylase 2 isoform c [Zea mays]
  misc_feature (25)..(316): Homolog of NCBI NO: 7716948 NR Description: histone deacetylase 2 isoform b [Zea mays]
  misc_feature (25)..(302): Homolog of NCBI NO: 7804960 NR Description: putative histone deacetylase HD2 [Oryza sativa]
  misc_feature (25)..(303): Homolog of NCBI NO: 7489751 NR Description: histone deacetylase (EC 3.5.1.-) HD2-p39,
  misc_feature (116)..(320): Homolog of NCBI NO: 30688581 NR Description: histone deacetylase-related protein [Arabidopsis
  misc_feature (25)..(320): Homolog of NCBI NO: 30688577 NR Description: histone deacetylase-related protein [Arabidopsis
  misc_feature (25)..(320): Homolog of NCBI NO: 25352191 NR Description: probable histone deacetylase (EC 3.5.1.-)
QHSHAALKLLRLPLSNLSSSFIIKMEFWGVEVRAGKPLKVKPDEDCLIHLSQASLDKGKKGETAVLYVTVDGKKLVIGTLVQDTIPQISFDLVFEKEFELSHSSKGSVHFIGYKSPNIDEEEDFPCDSEEEEEEVEVPATSTVTTNGATPTSSVVTVDSKPKAAAKAKPAVVKPESDEDDDESDEEDDSEDDGSDSEKGMDVDEDDSEDEKDDSEEEEEDTPKKPETSNKKRPIESATPVSAKKTKPAVAATPQKSEEKKGGHTATPHPAKKGGKSPMNANQSPKSGGQSSGSGGNKKPFNNSGKQFGSNNKGNKGKGKGSRA

SEQ ID NO: 110204 - protein, 299 aa, Zea mays subsp. mays
  misc_feature (1)..(299): Ceres Seq. ID no. 15176157
  misc_feature (95)..(197): Pfam Name: Nucleoplasmin Pfam Description: Nucleoplasmin
  misc_feature (1)..(283): Homolog of NCBI NO: 7716950 NR Description: histone deacetylase 2 isoform c [Zea mays]
  misc_feature (1)..(292): Homolog of NCBI NO: 7716948 NR Description: histone deacetylase 2 isoform b [Zea mays]
  misc_feature (1)..(278): Homolog of NCBI NO: 7804960 NR Description: putative histone deacetylase HD2 [Oryza sativa]
  misc_feature (1)..(279): Homolog of NCBI NO: 7489751 NR Description: histone deacetylase (EC 3.5.1.-) HD2-p39,
  misc_feature (92)..(296): Homolog of NCBI NO: 30688581 NR Description: histone deacetylase-related protein [Arabidopsis
  misc_feature (1)..(296): Homolog of NCBI NO: 30688577 NR Description: histone deacetylase-related protein [Arabidopsis
  misc_feature (1)..(296): Homolog of NCBI NO: 25352191 NR Description: probable histone deacetylase (EC 3.5.1.-)
MEFWGVEVRAGKPLKVKPDEDCLIHLSQASLDKGKKGETAVLYVTVDGKKLVIGTLVQDTIPQISFDLVFEKEFELSHSSKGSVHFIGYKSPNIDEEEDFPCDSEEEEEEVEVPATSTVTTNGATPTSSVVTVDSKPKAAAKAKPAVVKPESDEDDDESDEEDDSEDDGSDSEKGMDVDEDDSEDEKDDSEEEEEDTPKKPETSNKKRPIESATPVSAKKTKPAVAATPQKSEEKKGGHTATPHPAKKGGKSPMNANQSPKSGGQSSGSGGNKKPFNNSGKQFGSNNKGNKGKGKGSRA

SEQ ID NO: 110205 - DNA, 901 bp, Zea mays subsp. mays
  misc_feature (1)..(901): Ceres Seq. ID no. 15177482
aaccacacactgccttgttcatctcgaacataaatcaagagcatatcattctttgtgagctttattgatctaaaccaatggcgaactcgacgattcttcttgattactggccaagcatgttctgtatgagggctagagtcgcgttgagggagaaaggtgttgtgttcgaggccagagaagaggatctcacgaacaagagccctttgctcctccagagtaatccgattcacaagaaggtcccggttctgatccacaacggtaaaccggtttgcgagtccctcaatgttgtccagtacgtggacgaggcttggtctgacaagaacccattcttcccttctgatccttacgggaaagctcaggctaggttttgggctgatttcgtggacaagaagtttagtgatgcccaattcaagatatggggaaagaaaggtgaggaacaagcagcaggggtgaaggagtttattgaggcagtgaagattcttgaagctgagcttggagacaaaccttactttggtggagatagctttggatatgtagacattgcactgattacattctacagttggttcggagcatacgagaagtttggtaacttcagcatcgaggcagagagtccaaaactgattgcttgggctaagaggtgtatggagaaagagagtgtgtctaagtctctccctgaccaagagaaaattgttgcgtacgccgctgagtttaggaagaataatctctgatctgaataaaaccttgtttgtgccttctgtttcggatgatgctgtagtctgtttttaactttggtttttgtgtgtttcctaataatgcgtgagggcaagcgtcggcctttgtgtggtggtgttgtatggatcctgagtaatgcatttttaaataaaatatattttcaaat

SEQ ID NO: 110206 - protein, 217 aa, Zea mays subsp. mays; identical to SEQ ID NO: 56461
  misc_feature (1)..(217): Ceres Seq. ID no. 15177483
  misc_feature (85)..(193): Pfam Name: Glutathione S-transferase, C-terminal domain Pfam Description: Glutathione S-transferase, C-terminal domain
  misc_feature (1)..(214): Homolog of NCBI NO: 15218304 NR Description: glutathione transferase, putative [Arabidopsis
  misc_feature (1)..(214): Homolog of NCBI NO: 8052535 NR Description: F3F9.13 [Arabidopsis thaliana]
  misc_feature (1)..(214): Homolog of NCBI NO: 7447307 NR Description: glutathione transferase (EC 2.5.1.18) - papaya
  misc_feature (1)..(168): Homolog of NCBI NO: 8052534 NR Description: F3F9.11 [Arabidopsis thaliana]
  misc_feature (1)..(214): Homolog of NCBI NO: 15220041 NR Description: glutathione transferase, putative [Arabidopsis
  misc_feature (1)..(214): Homolog of NCBI NO: 8052534 NR Description: F3F9.11 [Arabidopsis thaliana]
  misc_feature (1)..(214): Homolog of NCBI NO: 21592644 NR Description: glutathione transferase, putative [Arabidopsis
  misc_feature (1)..(214): Homolog of NCBI NO: 18411929 NR Description: glutathione transferase, putative [Arabidopsis
  misc_feature (1)..(217): Homolog of NCBI NO: 21592638 NR Description: 2,4-D inducible glutathione S-transferase,
  misc_feature (1)..(217): Homolog of NCBI NO: 15218311 NR Description: glutathione transferase, putative [Arabidopsis

SEQ ID NO: 110207 - protein, 204 aa, Zea mays subsp. mays; identical to SEQ ID NO: 56462
  misc_feature (1)..(204): Ceres Seq. ID no. 15177484
  misc_feature (72)..(180): Pfam Name: Glutathione S-transferase, C-terminal domain Pfam Description: Glutathione S-transferase, C-terminal domain
  misc_feature (1)..(201): Homolog of NCBI NO: 15218304 NR Description: glutathione transferase, putative [Arabidopsis
  misc_feature (1)..(201): Homolog of NCBI NO: 8052535 NR Description: F3F9.13 [Arabidopsis thaliana]
  misc_feature (1)..(201): Homolog of NCBI NO: 7447307 NR Description: glutathione transferase (EC 2.5.1.18) - papaya
  misc_feature (1)..(155): Homolog of NCBI NO: 8052534 NR Description: F3F9.11 [Arabidopsis thaliana]
  misc_feature (1)..(201): Homolog of NCBI NO: 15220041 NR Description: glutathione transferase, putative [Arabidopsis
  misc_feature (1)..(201): Homolog of NCBI NO: 8052534 NR Description: F3F9.11 [Arabidopsis thaliana]
  misc_feature (1)..(201): Homolog of NCBI NO: 21592644 NR Description: glutathione transferase, putative [Arabidopsis
  misc_feature (1)..(201): Homolog of NCBI NO: 18411929 NR Description: glutathione transferase, putative [Arabidopsis
  misc_feature (1)..(204): Homolog of NCBI NO: 21592638 NR Description: 2,4-D inducible glutathione S-transferase,
  misc_feature (1)..(204): Homolog of NCBI NO: 15218311 NR Description: glutathione transferase, putative [Arabidopsis

SEQ ID NO: 110208 - protein, 201 aa, Zea mays subsp. mays; identical to SEQ ID NO: 56463
  misc_feature (1)..(201): Ceres Seq. ID no. 15177485
  misc_feature (69)..(177): Pfam Name: Glutathione S-transferase, C-terminal domain Pfam Description: Glutathione S-transferase, C-terminal domain
  misc_feature (1)..(198): Homolog of NCBI NO: 15218304 NR Description: glutathione transferase, putative [Arabidopsis
  misc_feature (1)..(198): Homolog of NCBI NO: 8052535 NR Description: F3F9.13 [Arabidopsis thaliana]
  misc_feature (1)..(198): Homolog of NCBI NO: 7447307 NR Description: glutathione transferase (EC 2.5.1.18) - papaya
  misc_feature (1)..(152): Homolog of NCBI NO: 8052534 NR Description: F3F9.11 [Arabidopsis thaliana]
  misc_feature (1)..(198): Homolog of NCBI NO: 15220041 NR Description: glutathione transferase, putative [Arabidopsis
  misc_feature (1)..(198): Homolog of NCBI NO: 8052534 NR Description: F3F9.11 [Arabidopsis thaliana]
  misc_feature (1)..(198): Homolog of NCBI NO: 21592644 NR Description: glutathione transferase, putative [Arabidopsis
  misc_feature (1)..(198): Homolog of NCBI NO: 18411929 NR Description: glutathione transferase, putative [Arabidopsis
  misc_feature (1)..(201): Homolog of NCBI NO: 21592638 NR Description: 2,4-D inducible glutathione S-transferase,
  misc_feature (1)..(201): Homolog of NCBI NO: 15218311 NR Description: glutathione transferase, putative [Arabidopsis

SEQ ID NO: 110209 - DNA, 686 bp, Zea mays subsp. mays
  misc_feature (1)..(686): Ceres Seq. ID no. 15176141
gtgtgcactgtgcttcatcatctcctcctcctatcgtctacatttgtttcttggcgtacacgtttctacaggttaccagaaacctaacaatgagccaacctcccgtcggtgttcctcctcctcaaggttatccgccggagggatattcaaaagatgcttatccaccgcaaggatatcctcatcctcctcagcagggatatccgccacaaggctaccctccgcagcagggatatccgccgcaaggctaccctccacaaggctatccaccgcagcaaggttatccaccacagcagggatatcctccgcaagggtatcctcctccgtatgcgcctcaatatcctccgccaccgacgcagcagcatcagccacaaaagtccggtcctgggtgtctagaaggatgtcttgctgctctgtgctgttgctgtctcttggatgcttgcttctgactggagtatgtgctctcagagcttttgatttatttgcaagaaaactgtttagcaacacaagaaccttaagtaacttatgggatataaaaatgatggattgctgatactataatctcttgtctattcgctatctttcgttatgtttttgtcttcttgagttcataaattatgtttctatccacgttctagctcaggtttggatttaagactaatgggaatgtaaattgcttggtatgaatg

SEQ ID NO: 110210 - protein, 182 aa, Zea mays subsp. mays
  misc_feature (1)..(182): Ceres Seq. ID no. 15176142
CALCFIISSSYRLHLFLGVHVSTGYQKPNNEPTSRRCSSSSRLSAGGIFKRCLSTARISSSSSAGISATRLPSAAGISAARLPSTRLSTAARLSTTAGISSARVSSSVCASISSATDAAASATKVRSWVSRRMSCCSVLLLSLGCLLLTGVCALRAFDLFARKLFSNTRTLSNLWDIKMMDC

SEQ ID NO: 110211 - protein, 147 aa, Zea mays subsp. mays
  misc_feature (1)..(147): Ceres Seq. ID no. 15176143
  misc_feature (6)..(117): Pfam Name: Extensin-like region Pfam Description: Extensin-like region
  misc_feature (33)..(114): Homolog of NCBI NO: 6469591 NR Description: unknown [Eufolliculina uhligi]
  misc_feature (33)..(127): Homolog of NCBI NO: 6469591 NR Description: unknown [Eufolliculina uhligi]
  misc_feature (33)..(127): Homolog of NCBI NO: 113965 NR Description: Annexin A7 (Annexin VII) (Synexin)
  misc_feature (33)..(132): Homolog of NCBI NO: 671859 NR Description: annexin VII [Dictyostelium discoideum]
  misc_feature (33)..(132): Homolog of NCBI NO: 113965 NR Description: Annexin A7 (Annexin VII) (Synexin)
  misc_feature (30)..(132): Homolog of NCBI NO: 167666 NR Description: annexin VII
  misc_feature (54)..(147): Homolog of NCBI NO: 40538901 NR Description: expressed protein [Oryza sativa (japonica
  misc_feature (32)..(147): Homolog of NCBI NO: 15229624 NR Description: proline-rich protein family [Arabidopsis
  misc_feature (32)..(147): Homolog of NCBI NO: 21554421 NR Description: unknown [Arabidopsis thaliana]
  misc_feature (54)..(147): Homolog of NCBI NO: 15227350 NR Description: proline-rich protein family [Arabidopsis
VHCASSSPPPIVYICFLAYTFLQVTRNLTMSQPPVGVPPPQGYPPEGYSKDAYPPQGYPHPPQQGYPPQGYPPQQGYPPQGYPPQGYPPQQGYPPQQGYPPQGYPPPYAPQYPPPPTQQHQPQKSGPGCLEGCLAALCCCCLLDACF

SEQ ID NO: 110212 - protein, 118 aa, Zea mays subsp. mays
  misc_feature (1)..(118): Ceres Seq. ID no. 15176144
  misc_feature (1)..(86): Pfam Name: Extensin-like region Pfam Description: Extensin-like region
  misc_feature (4)..(85): Homolog of NCBI NO: 6469591 NR Description: unknown [Eufolliculina uhligi]
  misc_feature (4)..(98): Homolog of NCBI NO: 6469591 NR Description: unknown [Eufolliculina uhligi]
  misc_feature (4)..(98): Homolog of NCBI NO: 113965 NR Description: Annexin A7 (Annexin VII) (Synexin)
  misc_feature (4)..(103): Homolog of NCBI NO: 671859 NR Description: annexin VII [Dictyostelium discoideum]
  misc_feature (4)..(103): Homolog of NCBI NO: 113965 NR Description: Annexin A7 (Annexin VII) (Synexin)
  misc_feature (1)..(103): Homolog of NCBI NO: 167666 NR Description: annexin VII
  misc_feature (25)..(118): Homolog of NCBI NO: 40538901 NR Description: expressed protein [Oryza sativa (japonica
  misc_feature (3)..(118): Homolog of NCBI NO: 15229624 NR Description: proline-rich protein family [Arabidopsis
  misc_feature (3)..(118): Homolog of NCBI NO: 21554421 NR Description: unknown [Arabidopsis thaliana]
  misc_feature (25)..(118): Homolog of NCBI NO: 15227350 NR Description: proline-rich protein family [Arabidopsis
MSQPPVGVPPPQGYPPEGYSKDAYPPQGYPHPPQQGYPPQGYPPQQGYPPQGYPPQGYPPQQGYPPQQGYPPQGYPPPYAPQYPPPPTQQHQPQKSGPGCLEGCLAALCCCCLLDACF

SEQ ID NO: 110213 - DNA, 898 bp, Zea mays subsp. mays
  misc_feature (1)..(898): Ceres Seq. ID no. 15178302
ctagattcttctgtaaccttcgtgtatttcctttttgccagcttcctcgtgaacacggtaaaacctttcacaaacatatataaatctctaagcctttcttcgtctgtttgcatctaaattttttcaacttccttctctttcgtcttcttctcagttaaagatccttcgtttcactcttacgatctttgtttacgtgatgtcttcggaggcggaggagtttgcagagttttcggctttgttcgagaggatgatccgacgaggcgaaggtctctctcgattcttacctctgatcttagctctagccggtgaagccgacgaggacggtgaatcaaccgatcagacggcgacacatagagagatcgtcatcgatccggtgaacaggagagtggtgatgatcagatcagctttgggggagttcttgaacggcgacttttcagagaaacaagggaggtcgccggcgtcgaaattgtcggtggagagcttgccacgtgtcgtgatcgggaaagatgaggagagaagaggctcgtgtccgatctgtctcgaggagtggtcggaaggtgacgtggcggcggagatgccgtgtaagcacaggttccactcgaagtgcgtggaggagtggctggggagacacgccacgtgtccgctgtgtaggtacgagatgcctgttgaagaagtggaggaagagaagaaagtaggggtttggattgggttctctgttggtaacggcgaaaggagaaacggagaagaagacggaggaggaagaagcgagggtggctcgaacactcgagatgaaacagaggcttaggtttcagttttagaaagaaacttgtgtatattcttttcgttttttttctttccattgtctttccaatttcaataaaagattggttgatgaact

SEQ ID NO: 110214 - protein, 202 aa, Zea mays subsp. mays
  misc_feature (1)..(202): Ceres Seq. ID no. 15178303
  misc_feature (111)..(151): Pfam Name: Zinc finger, C3HC4 type (RING finger) Pfam Description: Zinc finger, C3HC4 type (RING finger)
  misc_feature (84)..(166): Homolog of NCBI NO: 18921323 NR Description: putative zinc finger protein [Oryza sativa]
  misc_feature (76)..(183): Homolog of NCBI NO: 15232595 NR Description: expressed protein [Arabidopsis thaliana]
  misc_feature (87)..(165): Homolog of NCBI NO: 12846584 NR Description: unnamed protein product [Mus musculus]
  misc_feature (87)..(165): Homolog of NCBI NO: 34855987 NR Description: similar to RIKEN cDNA 2500002L14; EST C77350
  misc_feature (87)..(165): Homolog of NCBI NO: 7706039 NR Description: hypothetical protein LOC51255 [Homo sapiens]
  misc_feature (35)..(165): Homolog of NCBI NO: 29477113 NR Description: Similar to hypothetical protein LOC51255 [Danio
  misc_feature (76)..(188): Homolog of NCBI NO: 34903272 NR Description: unnamed protein product [Oryza sativa (japonica
  misc_feature (4)..(192): Homolog of NCBI NO: 21554312 NR Description: unknown [Arabidopsis thaliana]
  misc_feature (4)..(192): Homolog of NCBI NO: 18396059 NR Description: zinc finger (C3HC4-type RING finger) protein
  misc_feature (1)..(181): Homolog of NCBI NO: 15223679 NR Description: zinc finger (C3HC4-type RING finger) protein
MSSEAEEFAEFSALFERMIRRGEGLSRFLPLILALAGEADEDGESTDQTATHREIVIDPVNRRVVMIRSALGEFLNGDFSEKQGRSPASKLSVESLPRVVIGKDEERRGSCPICLEEWSEGDVAAEMPCKHRFHSKCVEEWLGRHATCPLCRYEMPVEEVEEEKKVGVWIGFSVGNGERRNGEEDGGGRSEGGSNTRDETEA

SEQ ID NO: 110215 - protein, 185 aa, Zea mays subsp. mays
  misc_feature (1)..(185): Ceres Seq. ID no. 15178304
  misc_feature (94)..(134): Pfam Name: Zinc finger, C3HC4 type (RING finger) Pfam Description: Zinc finger, C3HC4 type (RING finger)
  misc_feature (18)..(148): Homolog of NCBI NO: 29477113 NR Description: Similar to hypothetical protein LOC51255 [Danio
  misc_feature (59)..(171): Homolog of NCBI NO: 34903272 NR Description: unnamed protein product [Oryza sativa (japonica
  misc_feature (1)..(175): Homolog of NCBI NO: 21554312 NR Description: unknown [Arabidopsis thaliana]
  misc_feature (59)..(166): Homolog of NCBI NO: 15232595 NR Description: expressed protein [Arabidopsis thaliana]
  misc_feature (70)..(148): Homolog of NCBI NO: 34855987 NR Description: similar to RIKEN cDNA 2500002L14; EST C77350
  misc_feature (70)..(148): Homolog of NCBI NO: 7706039 NR Description: hypothetical protein LOC51255 [Homo sapiens]
  misc_feature (70)..(148): Homolog of NCBI NO: 12846584 NR Description: unnamed protein product [Mus musculus]
  misc_feature (67)..(149): Homolog of NCBI NO: 18921323 NR Description: putative zinc finger protein [Oryza sativa]
  misc_feature (1)..(175): Homolog of NCBI NO: 18396059 NR Description: zinc finger (C3HC4-type RING finger) protein
  misc_feature (1)..(164): Homolog of NCBI NO: 15223679 NR Description: zinc finger (C3HC4-type RING finger) protein
MIRRGEGLSRFLPLILALAGEADEDGESTDQTATHREIVIDPVNRRVVMIRSALGEFLNGDFSEKQGRSPASKLSVESLPRVVIGKDEERRGSCPICLEEWSEGDVAAEMPCKHRFHSKCVEEWLGRHATCPLCRYEMPVEEVEEEKKVGVWIGFSVGNGERRNGEEDGGGRSEGGSNTRDETEA

SEQ ID NO: 110216 - protein, 137 aa, Zea mays subsp. mays
  misc_feature (1)..(137): Ceres Seq. ID no. 15178305
  misc_feature (46)..(86): Pfam Name: Zinc finger, C3HC4 type (RING finger) Pfam Description: Zinc finger, C3HC4 type (RING finger)
  misc_feature (19)..(101): Homolog of NCBI NO: 18921323 NR Description: putative zinc finger protein [Oryza sativa]
  misc_feature (11)..(118): Homolog of NCBI NO: 15232595 NR Description: expressed protein [Arabidopsis thaliana]
  misc_feature (22)..(100): Homolog of NCBI NO: 12846584 NR Description: unnamed protein product [Mus musculus]
  misc_feature (22)..(100): Homolog of NCBI NO: 34855987 NR Description: similar to RIKEN cDNA 2500002L14; EST C77350
  misc_feature (22)..(100): Homolog of NCBI NO: 7706039 NR Description: hypothetical protein LOC51255 [Homo sapiens]
  misc_feature (1)..(100): Homolog of NCBI NO: 29477113 NR Description: Similar to hypothetical protein LOC51255 [Danio
  misc_feature (11)..(123): Homolog of NCBI NO: 34903272 NR Description: unnamed protein product [Oryza sativa (japonica
  misc_feature (1)..(127): Homolog of NCBI NO: 21554312 NR Description: unknown [Arabidopsis thaliana]
  misc_feature (1)..(127): Homolog of NCBI NO: 18396059 NR Description: zinc finger (C3HC4-type RING finger) protein
  misc_feature (1)..(116): Homolog of NCBI NO: 15223679 NR Description: zinc finger (C3HC4-type RING finger) protein
MIRSALGEFLNGDFSEKQGRSPASKLSVESLPRVVIGKDEERRGSCPICLEEWSEGDVAAEMPCKHRFHSKCVEEWLGRHATCPLCRYEMPVEEVEEEKKVGVWIGFSVGNGERRNGEEDGGGRSEGGSNTRDETEA

SEQ ID NO: 110217 - DNA, 642 bp, Zea mays subsp. mays
  misc_feature (1)..(642): Ceres Seq. ID no. 15177455
aatatcggctagggatgacgacgaggatggcaggattcggcgaggaagaaagtgggatctcagacagtgagatcatagagggttttctgcggccaaagattgaaggagaagcagtggcgattccgggattgatagtggaattgggggaggagttgtacactcgagagccatggctccttccgcagacagcccatcccatccttaaccctcgagagtggctctacttggggaaaccgaatcgaaataatttccccgttgatcacgaagggtgttgggttcgcattggaagtgccatcttgatccgatccgaggagactgatgaaataattgggggaacgtcgagattcagatatcgcttcaggaacaagggggacaaacatgctctgaggtggagtaattggttcatgaaagagtatcgtctctttaacccaacccctcatgttatttgcaagattactgaaaagctgtgctaagataaatttgtttctgttttaatatttttatttttgcaatggactcagattccattccattccttgtgtttcattcgaattttaataaatcaataagttcgggtggtttgattgattctgaatgtgctaatgaaaacctgtgctaagataaatttgtttctgttttaat

SEQ ID NO: 110218 - protein, 156 aa, Zea mays subsp. mays
  misc_feature (1)..(156): Ceres Seq. ID no. 15177456
  misc_feature (20)..(141): Pfam Name: No apical meristem (NAM) protein Pfam Description: No apical meristem (NAM) protein
  misc_feature (14)..(151): Homolog of NCBI NO: 15238786 NR Description: No apical meristem (NAM) protein family
  misc_feature (19)..(141): Homolog of NCBI NO: 18407972 NR Description: No apical meristem (NAM) protein family
YRLGMTTRMAGFGEEESGISDSEIIEGFLRPKIEGEAVAIPGLIVELGEELYTREPWLLPQTAHPILNPREWLYLGKPNRNNFPVDHEGCWVRIGSAILIRSEETDEIIGGTSRFRYRFRNKGDKHALRWSNWFMKEYRLFNPTPHVICKITEKLC

SEQ ID NO: 110219 - protein, 152 aa, Zea mays subsp. mays
  misc_feature (1)..(152): Ceres Seq. ID no. 15177457
  misc_feature (16)..(137): Pfam Name: No apical meristem (NAM) protein Pfam Description: No apical meristem (NAM) protein
  misc_feature (10)..(147): Homolog of NCBI NO: 15238786 NR Description: No apical meristem (NAM) protein family
  misc_feature (15)..(137): Homolog of NCBI NO: 18407972 NR Description: No apical meristem (NAM) protein family
MTTRMAGFGEEESGISDSEIIEGFLRPKIEGEAVAIPGLIVELGEELYTREPWLLPQTAHPILNPREWLYLGKPNRNNFPVDHEGCWVRIGSAILIRSEETDEIIGGTSRFRYRFRNKGDKHALRWSNWFMKEYRLFNPTPHVICKITEKLC

SEQ ID NO: 110220 - protein, 148 aa, Zea mays subsp. mays
  misc_feature (1)..(148): Ceres Seq. ID no. 15177458
  misc_feature (12)..(133): Pfam Name: No apical meristem (NAM) protein Pfam Description: No apical meristem (NAM) protein
  misc_feature (6)..(143): Homolog of NCBI NO: 15238786 NR Description: No apical meristem (NAM) protein family
  misc_feature (11)..(133): Homolog of NCBI NO: 18407972 NR Description: No apical meristem (NAM) protein family
MAGFGEEESGISDSEIIEGFLRPKIEGEAVAIPGLIVELGEELYTREPWLLPQTAHPILNPREWLYLGKPNRNNFPVDHEGCWVRIGSAILIRSEETDEIIGGTSRFRYRFRNKGDKHALRWSNWFMKEYRLFNPTPHVICKITEKLC

SEQ ID NO: 110221 - DNA, 789 bp, Zea mays subsp. mays
  misc_feature (1)..(789): Ceres Seq. ID no. 15179439
atcagaagaagaagtatctttgttttcgctctcttcttctactttcgatctttgacgattagaaaaggaaagtgatggctgccgttaatgggtaccaaggaaacactccggcggcgtcaaagcaatctgctcctccgactaagactgttgatagccaatctgttctcaaaaggctgcaatctgaactaatgggcttgatgatgggtggtgacccgggaatatcggctttcccagaggaagacaacatattctgttggaaagggacaataacaggaagcaaagatactgtgtttgaaggaactgagtacagactctcactctctttctccaatgactatcctttcaagcctcctaagatcaagttccacactggttgcttccaccccaatgttgatctctacggcaatatctgtttggacattcttcaggataaatggtcgtctgcatacgatgtcaggacaatactactatcgattcagagccttttgggagaaccgaacatcagctcaccattgaacactcaagcagcgcagctctggagcaaccaagaagagtataggaagatggttgagaagctctacaagcctcccagtgcatgatagcttcaggatgtgtcattcctttgctctacaatttgtttctgatcatcaacagttttatctgtagcagtttgtgtcattcatttgctctataatttgtttctgatcttcaacagttttacctgagccaaatattgatattgatgtgagcttttcaaaaattaatcagaatgatacacacattcttctt

SEQ ID NO: 110222 - protein, 174 aa, Zea mays subsp. mays; identical to SEQ ID NO: 61167
  misc_feature (1)..(174): Ceres Seq. ID no. 15179440
  misc_feature (11)..(142): Homolog of NCBI NO: 32417826 NR Description: hypothetical protein [Neurospora crassa]
  misc_feature (4)..(170): Homolog of NCBI NO: 31216813 NR Description: ENSANGP00000020629 [Anopheles gambiae]
  misc_feature (22)..(170): Homolog of NCBI NO: 4388942 NR Description: E2-C, An Ubiquitin Conjugating Enzyme Required
  misc_feature (8)..(170): Homolog of NCBI NO: 3915196 NR Description: Ubiquitin-conjugating enzyme E2-C
  misc_feature (9)..(171): Homolog of NCBI NO: 34903234 NR Description: unnamed protein product [Oryza sativa (japonica
  misc_feature (30)..(174): Homolog of NCBI NO: 9454557 NR Description: Putative ubiquitin carrier protein [Arabidopsis
  misc_feature (15)..(174): Homolog of NCBI NO: 25293673 NR Description: hypothetical protein F17J6.3 [imported] -
  misc_feature (1)..(174): Homolog of NCBI NO: 18402475 NR Description: ubiquitin-conjugating enzyme (UBC19) [Arabidopsis
  misc_feature (1)..(174): Homolog of NCBI NO: 21618179 NR Description: E2, ubiquitin-conjugating enzyme, putative
  misc_feature (1)..(174): Homolog of NCBI NO: 18403097 NR Description: ubiquitin-conjugating enzyme (UBC20) [Arabidopsis

SEQ ID NO: 110223 - protein, 136 aa, Zea mays subsp. mays; identical to SEQ ID NO: 61168
  misc_feature (1)..(136): Ceres Seq. ID no. 15179441
  misc_feature (1)..(104): Homolog of NCBI NO: 32417826 NR Description: hypothetical protein [Neurospora crassa]
  misc_feature (1)..(132): Homolog of NCBI NO: 31216813 NR Description: ENSANGP00000020629 [Anopheles gambiae]
  misc_feature (1)..(132): Homolog of NCBI NO: 4388942 NR Description: E2-C, An Ubiquitin Conjugating Enzyme Required
  misc_feature (1)..(132): Homolog of NCBI NO: 3915196 NR Description: Ubiquitin-conjugating enzyme E2-C
  misc_feature (1)..(133): Homolog of NCBI NO: 34903234 NR Description: unnamed protein product [Oryza sativa (japonica
  misc_feature (1)..(136): Homolog of NCBI NO: 9454557 NR Description: Putative ubiquitin carrier protein [Arabidopsis
  misc_feature (1)..(136): Homolog of NCBI NO: 25293673 NR Description: hypothetical protein F17J6.3 [imported] -
  misc_feature (1)..(136): Homolog of NCBI NO: 18402475 NR Description: ubiquitin-conjugating enzyme (UBC19) [Arabidopsis
  misc_feature (1)..(136): Homolog of NCBI NO: 21618179 NR Description: E2, ubiquitin-conjugating enzyme, putative
  misc_feature (1)..(136): Homolog of NCBI NO: 18403097 NR Description: ubiquitin-conjugating enzyme (UBC20) [Arabidopsis

SEQ ID NO: 110224 - protein, 133 aa, Zea mays subsp. mays; identical to SEQ ID NO: 61169
  misc_feature (1)..(133): Ceres Seq. ID no. 15179442
  misc_feature (1)..(101): Homolog of NCBI NO: 32417826 NR Description: hypothetical protein [Neurospora crassa]
  misc_feature (1)..(129): Homolog of NCBI NO: 31216813 NR Description: ENSANGP00000020629 [Anopheles gambiae]
  misc_feature (1)..(129): Homolog of NCBI NO: 4388942 NR Description: E2-C, An Ubiquitin Conjugating Enzyme Required
  misc_feature (1)..(129): Homolog of NCBI NO: 3915196 NR Description: Ubiquitin-conjugating enzyme E2-C
  misc_feature (1)..(130): Homolog of NCBI NO: 34903234 NR Description: unnamed protein product [Oryza sativa (japonica
  misc_feature (1)..(133): Homolog of NCBI NO: 9454557 NR Description: Putative ubiquitin carrier protein [Arabidopsis
  misc_feature (1)..(133): Homolog of NCBI NO: 25293673 NR Description: hypothetical protein F17J6.3 [imported] -
  misc_feature (1)..(133): Homolog of NCBI NO: 18402475 NR Description: ubiquitin-conjugating enzyme (UBC19) [Arabidopsis
  misc_feature (1)..(133): Homolog of NCBI NO: 21618179 NR Description: E2, ubiquitin-conjugating enzyme, putative
  misc_feature (1)..(133): Homolog of NCBI NO: 18403097 NR Description: ubiquitin-conjugating enzyme (UBC20) [Arabidopsis

SEQ ID NO: 110225 - DNA, 931 bp, Zea mays subsp. mays
  misc_feature (1)..(931): Ceres Seq. ID no. 15178935
ttgtccgaaaaaatctcagagctccgctgcaatggaggtcactgcgaacgaaccagatatgagaagctccaaatcctctccgagagtaacgataccgaacttcttcgtgtcgctctcctcggcatttacgcaaacaccttccgtgcgtacgaacaagcccagtttgcggcttctaccaccagcttcagactccgtcaagttgattcaagacttccatcgttctctactctccgcgaccgagaaattcgcaggcttcttccactcgctcgccgctgagaaccctctgtttcaggaagcggttcgcttgtcctccgagtttcgcggtgtttgcgacgagattcgtttgaggaacactacaagggttaggcttgccatgtcggatcacgggtttgcagcggttctgcctggagattcagttgcaggaatggtggttgctaacgggttgataaacttcctcaacatctacaacaccgtacttgttgtccgtctagtactcacctggttccccactgctcctcctgccattgttaaccccctcagcactctatgtgatccatacttgaacatattccggggagtcataccgcctcttggaggattagatttgtctcccattttggccttccttgttctcaacgccttcaccagcagtgctatggcgcttccttgtgagctcccaccagctgaaggagtgacttctccatcatcttgtgagacaaagtggatgaggaggagaaggttgagtagcaaccagaaccaaacaccgagctctgcttaaaccttattaaaaaaacaactcctcttttcttcgcttcaacatgtgacatatacttttcgagtaattttattcatctgcatctctggattctgagttttattttgtgtgtaaattttctttataaaatgaataaaaagaattgttactaaaaac

SEQ ID NO: 110226 - protein, 258 aa, Zea mays subsp. mays
  misc_feature (1)..(258): Ceres Seq. ID no. 15178936
  misc_feature (143)..(216): Homolog of NCBI NO: 18397948 NR Description: expressed protein [Arabidopsis thaliana]
  misc_feature (143)..(216): Homolog of NCBI NO: 21592772 NR Description: unknown [Arabidopsis thaliana]
  misc_feature (143)..(216): Homolog of NCBI NO: 15234345 NR Description: expressed protein [Arabidopsis thaliana]
  misc_feature (152)..(212): Homolog of NCBI NO: 33240375 NR Description: Uncharacterized YGGT family conserved membrane
  misc_feature (152)..(212): Homolog of NCBI NO: 33861467 NR Description: conserved hypothetical membrane protein
  misc_feature (144)..(211): Homolog of NCBI NO: 37523109 NR Description: hypothetical protein [Gloeobacter violaceus]
  misc_feature (148)..(230): Homolog of NCBI NO: 17229553 NR Description: hypothetical protein [Nostoc sp. PCC 7120]
  misc_feature (131)..(211): Homolog of NCBI NO: 22298077 NR Description: ORF_ID:tsr0534~hypothetical protein
  misc_feature (113)..(251): Homolog of NCBI NO: 27436744 NR Description: Hypothetical protein [Oryza sativa (japonica
  misc_feature (11)..(258): Homolog of NCBI NO: 22326932 NR Description: expressed protein [Arabidopsis thaliana]
CPKKSQSSAAMEVTANEPDMRSSKSSPRVTIPNFFVSLSSAFTQTPSVRTNKPSLRLLPPASDSVKLIQDFHRSLLSATEKFAGFFHSLAAENPLFQEAVRLSSEFRGVCDEIRLRNTTRVRLAMSDHGFAAVLPGDSVAGMVVANGLINFLNIYNTVLVVRLVLTWFPTAPPAIVNPLSTLCDPYLNIFRGVIPPLGGLDLSPILAFLVLNAFTSSAMALPCELPPAEGVTSPSSCETKWMRRRRLSSNQNQTPSSA

SEQ ID NO: 110227 - protein, 248 aa, Zea mays subsp. mays
  misc_feature (1)..(248): Ceres Seq. ID no. 15178937
  misc_feature (133)..(206): Homolog of NCBI NO: 18397948 NR Description: expressed protein [Arabidopsis thaliana]
  misc_feature (133)..(206): Homolog of NCBI NO: 21592772 NR Description: unknown [Arabidopsis thaliana]
  misc_feature (133)..(206): Homolog of NCBI NO: 15234345 NR Description: expressed protein [Arabidopsis thaliana]
  misc_feature (142)..(202): Homolog of NCBI NO: 33240375 NR Description: Uncharacterized YGGT family conserved membrane
  misc_feature (142)..(202): Homolog of NCBI NO: 33861467 NR Description: conserved hypothetical membrane protein
  misc_feature (134)..(201): Homolog of NCBI NO: 37523109 NR Description: hypothetical protein [Gloeobacter violaceus]
  misc_feature (138)..(220): Homolog of NCBI NO: 17229553 NR Description: hypothetical protein [Nostoc sp. PCC 7120]
  misc_feature (121)..(201): Homolog of NCBI NO: 22298077 NR Description: ORF_ID:tsr0534~hypothetical protein
  misc_feature (103)..(241): Homolog of NCBI NO: 27436744 NR Description: Hypothetical protein [Oryza sativa (japonica
  misc_feature (1)..(248): Homolog of NCBI NO: 22326932 NR Description: expressed protein [Arabidopsis thaliana]
MEVTANEPDMRSSKSSPRVTIPNFFVSLSSAFTQTPSVRTNKPSLRLLPPASDSVKLIQDFHRSLLSATEKFAGFFHSLAAENPLFQEAVRLSSEFRGVCDEIRLRNTTRVRLAMSDHGFAAVLPGDSVAGMVVANGLINFLNIYNTVLVVRLVLTWFPTAPPAIVNPLSTLCDPYLNIFRGVIPPLGGLDLSPILAFLVLNAFTSSAMALPCELPPAEGVTSPSSCETKWMRRRRLSSNQNQTPSSA

SEQ ID NO: 110228 - protein, 239 aa, Zea mays subsp. mays
  misc_feature (1)..(239): Ceres Seq. ID no. 15178938
  misc_feature (125)..(192): Homolog of NCBI NO: 37523109 NR Description: hypothetical protein [Gloeobacter violaceus]
  misc_feature (129)..(211): Homolog of NCBI NO: 17229553 NR Description: hypothetical protein [Nostoc sp. PCC 7120]
  misc_feature (112)..(192): Homolog of NCBI NO: 22298077 NR Description: ORF_ID:tsr0534~hypothetical protein
  misc_feature (94)..(232): Homolog of NCBI NO: 27436744 NR Description: Hypothetical protein [Oryza sativa (japonica
  misc_feature (1)..(239): Homolog of NCBI NO: 22326932 NR Description: expressed protein [Arabidopsis thaliana]
  misc_feature (124)..(197): Homolog of NCBI NO: 18397948 NR Description: expressed protein [Arabidopsis thaliana]
  misc_feature (124)..(197): Homolog of NCBI NO: 21592772 NR Description: unknown [Arabidopsis thaliana]
  misc_feature (124)..(197): Homolog of NCBI NO: 15234345 NR Description: expressed protein [Arabidopsis thaliana]
  misc_feature (133)..(193): Homolog of NCBI NO: 33240375 NR Description: Uncharacterized YGGT family conserved membrane
  misc_feature (133)..(193): Homolog of NCBI NO: 33861467 NR Description: conserved hypothetical membrane protein
MRSSKSSPRVTIPNFFVSLSSAFTQTPSVRTNKPSLRLLPPASDSVKLIQDFHRSLLSATEKFAGFFHSLAAENPLFQEAVRLSSEFRGVCDEIRLRNTTRVRLAMSDHGFAAVLPGDSVAGMVVANGLINFLNIYNTVLVVRLVLTWFPTAPPAIVNPLSTLCDPYLNIFRGVIPPLGGLDLSPILAFLVLNAFTSSAMALPCELPPAEGVTSPSSCETKWMRRRRLSSNQNQTPSSA

SEQ ID NO: 110229 - DNA, 951 bp, Zea mays subsp. mays
  misc_feature (1)..(951): Ceres Seq. ID no. 15174380
aaactctccaccttcactctctaccttcctgacgtgactcctctctctctctctccctccatcaatggccaccacaaactctctccaacaccaccaccactcctcctcttcttaccaccgtcacaatctccatccccagtctcacgtcgtaccatcttctctctccctcaaacacccctcctccaccgccacattctcctcactcatctgctcctcctcctcctcctccgtcgtctccgccgctctcaccacaaacgcctcctccgtaaccgcagaaacctccaccgagttcgacgtcctagcgacccacctcaccaaccaagacttccgcaaagcagacgaagaaacccgtcgccttctcatccagatagccggagaagccgccgtgaaacgcggctacgtcttcttctccgaggtgaaatcaatctccgtccaagatcttcaagccatcgacaacctctggaccaaacacagcgacgggaggttcggatacagcgtgcaacgcaaactctggttgaaagtcaagaaagacttcacgagattcttcattaaagtcgagtggatgaagcttctcgatacggaggtggttcagtacaactacagagctttccctgacgagttccagtgggagcttaacgacgaaacgcctcttggacacttgccgctcacaaacgcgttaagaggaacgcagcttctgaaatgcgttttgagccatcctgcgtttgagatagatggcgatgacatcgaggaagcgggagaagctgagaacagaggtgtgggtggtaaagcaaagacaaaagacacgacagtgtttaaaactgattacagcttctgatgtctttttttttttttaatttatatttgcttctcaatgggattatgaatgtatgaacatgatcaaatcgttagttaatgaatataaacctaaggtctttattggtttatcaatgt

SEQ ID NO: 110230 - protein, 256 aa, Zea mays subsp. mays
  misc_feature (1)..(256): Ceres Seq. ID no. 15174381
  misc_feature (83)..(220): Homolog of NCBI NO: 16329174 NR Description: hypothetical protein [Synechocystis sp. PCC 6803]
  misc_feature (67)..(218): Homolog of NCBI NO: 33865601 NR Description: conserved hypothetical protein [Synechococcus sp.
  misc_feature (44)..(221): Homolog of NCBI NO: 11465668 NR Description: ORF238 [Porphyra purpurea]
  misc_feature (68)..(220): Homolog of NCBI NO: 17229318 NR Description: hypothetical protein [Nostoc sp. PCC 7120]
  misc_feature (69)..(227): Homolog of NCBI NO: 33861481 NR Description: conserved hypothetical protein
  misc_feature (70)..(220): Homolog of NCBI NO: 22299137 NR Description: ORF_ID:tlr1594~hypothetical protein
  misc_feature (48)..(220): Homolog of NCBI NO: 23042866 NR Description: hypothetical protein [Trichodesmium erythraeum
  misc_feature (1)..(256): Homolog of NCBI NO: 32816239 NR Description: GUN4 mutant [Arabidopsis thaliana]
  misc_feature (1)..(256): Homolog of NCBI NO: 15231674 NR Description: expressed protein [Arabidopsis thaliana]
  misc_feature (1)..(256): Homolog of NCBI NO: 17380924 NR Description: unknown protein [Arabidopsis thaliana]
MATTNSLQHHHHSSSSYHRHNLHPQSHVVPSSLSLKHPSSTATFSSLICSSSSSSVVSAALTTNASSVTAETSTEFDVLATHLTNQDFRKADEETRRLLIQIAGEAAVKRGYVFFSEVKSISVQDLQAIDNLWTKHSDGRFGYSVQRKLWLKVKKDFTRFFIKVEWMKLLDTEVVQYNYRAFPDEFQWELNDETPLGHLPLTNALRGTQLLKCVLSHPAFEIDGDDIEEAGEAENRGVGGKAKTKDTTVFKTDYSF

SEQ ID NO: 110231 - protein, 183 aa, Zea mays subsp. mays
  misc_feature (1)..(183): Ceres Seq. ID no. 15174382
KLSTFTLYLPDVTPLSLSPSINGHHKLSPTPPPLLLFLPPSQSPSPVSRRTIFSLPQTPLLHRHILLTHLLLLLLLRRLRRSHHKRLLRNRRNLHRVRRPSDPPHQPRLPQSRRRNPSPSHPDSRRSRRETRLRLLLRGEINLRPRSSSHRQPLDQTQRREVRIQRATQTLVESQERLHEILH

SEQ ID NO: 110232 - DNA, 783 bp, Zea mays subsp. mays
  misc_feature (1)..(783): Ceres Seq. ID no. 15178906
cttcttcttcttcttcttcttcttcgcctctctctagctaaaagctatcgcgcgaattgatcgatccctgacaagatccattcatccaccatcgggcgccatggaggattccacggccacgacgacgacgtcttcgactcatcattatttcaccattttcacgaattaccctctcatctcctccctcacggctttcaccatcgctcaattcatcaaactcttcacctcctggtatagggaaaggagatgggatctcaaacagcttattggctccggaggaatgccttcttctcattcagctaccgttactgctctcgctgtagcaatcggtttacaagagggcttcggtggttctcatttcgctattgctttgatcttagcttctgttgtgatgtatgatgctactggtgtcaggttacacgctggtcgccaagctgaggttctcaatcagattgtctacgaacttcctgcagaacatcccttggctgaaagcagaccattgcgtgaacttctcggccatacccctccccaggtcattgctggtggaatgcttggaagtgtcacagcagtcactggatatttatttaccagggtagctactagctaacgtaaacgaaccaatcatagacgcaactcgcctgcttcattgcctagtgaaaccactcgacagtggacagaaccgaagcagatttacattcaaagccttagtttgattcactacatatataatcgtattcatgaactttctatttgaaatgtaaagaaaacttgaatcatcataac

SEQ ID NO: 110233 - protein, 168 aa, Zea mays subsp. mays
  misc_feature (1)..(168): Ceres Seq. ID no. 15178907
  misc_feature (18)..(161): Pfam Name: Divergent PAP2 family Pfam Description: Divergent PAP2 family
  misc_feature (22)..(168): Homolog of NCBI NO: 29150195 NR Description: putative protein [Oryza sativa (indica
  misc_feature (22)..(157): Homolog of NCBI NO: 38344227 NR Description: OJ991113_30.3 [Oryza sativa (japonica
  misc_feature (13)..(156): Homolog of NCBI NO: 30686309 NR Description: expressed protein [Arabidopsis thaliana]
  misc_feature (1)..(145): Homolog of NCBI NO: 12324675 NR Description: unknown protein [Arabidopsis thaliana]
  misc_feature (1)..(166): Homolog of NCBI NO: 15220480 NR Description: F12A21.27 [Arabidopsis thaliana]
  misc_feature (1)..(145): Homolog of NCBI NO: 26449729 NR Description: unknown protein [Arabidopsis thaliana]
  misc_feature (1)..(145): Homolog of NCBI NO: 9743358 NR Description: F21J9.1 [Arabidopsis thaliana]
  misc_feature (1)..(168): Homolog of NCBI NO: 7486375 NR Description: hypothetical protein F3I6.29 - Arabidopsis
  misc_feature (1)..(168): Homolog of NCBI NO: 21555270 NR Description: unknown [Arabidopsis thaliana]
  misc_feature (1)..(168): Homolog of NCBI NO: 18395459 NR Description: expressed protein [Arabidopsis thaliana]
MEDSTATTTTSSTHHYFTIFTNYPLISSLTAFTIAQFIKLFTSWYRERRWDLKQLIGSGGMPSSHSATVTALAVAIGLQEGFGGSHFAIALILASVVMYDATGVRLHAGRQAEVLNQIVYELPAEHPLAESRPLRELLGHTPPQVIAGGMLGSVTAVTGYLFTRVATS

SEQ ID NO: 110234 - protein, 108 aa, Zea mays subsp. mays
  misc_feature (1)..(108): Ceres Seq. ID no. 15178908
  misc_feature (1)..(101): Pfam Name: Divergent PAP2 family Pfam Description: Divergent PAP2 family
  misc_feature (1)..(108): Homolog of NCBI NO: 29150195 NR Description: putative protein [Oryza sativa (indica
  misc_feature (1)..(97): Homolog of NCBI NO: 38344227 NR Description: OJ991113_30.3 [Oryza sativa (japonica
  misc_feature (1)..(96): Homolog of NCBI NO: 30686309 NR Description: expressed protein [Arabidopsis thaliana]
  misc_feature (1)..(85): Homolog of NCBI NO: 12324675 NR Description: unknown protein [Arabidopsis thaliana]
  misc_feature (1)..(106): Homolog of NCBI NO: 15220480 NR Description: F12A21.27 [Arabidopsis thaliana]
  misc_feature (1)..(85): Homolog of NCBI NO: 26449729 NR Description: unknown protein [Arabidopsis thaliana]
  misc_feature (1)..(85): Homolog of NCBI NO: 9743358 NR Description: F21J9.1 [Arabidopsis thaliana]
  misc_feature (1)..(108): Homolog of NCBI NO: 7486375 NR Description: hypothetical protein F3I6.29 - Arabidopsis
  misc_feature (1)..(108): Homolog of NCBI NO: 21555270 NR Description: unknown [Arabidopsis thaliana]
  misc_feature (1)..(108): Homolog of NCBI NO: 18395459 NR Description: expressed protein [Arabidopsis thaliana]
MPSSHSATVTALAVAIGLQEGFGGSHFAIALILASVVMYDATGVRLHAGRQAEVLNQIVYELPAEHPLAESRPLRELLGHTPPQVIAGGMLGSVTAVTGYLFTRVATS

SEQ ID NO: 110235 - DNA, 752 bp, Zea mays subsp. mays; identical to SEQ ID NO: 109864
  misc_feature (1)..(752): Ceres Seq. ID no. 15177467

SEQ ID NO: 110236 - protein, 203 aa, Zea mays subsp. mays; identical to SEQ ID NO: 109865
  misc_feature (1)..(203): Ceres Seq. ID no. 15177468
  misc_feature (67)..(140): Pfam Name: Protease inhibitor/seed storage/LTP family Pfam Description: Protease inhibitor/seed storage/LTP family
  misc_feature (67)..(140): Pfam Name: Protease inhibitor/seed storage/LTP family Pfam Description: Protease inhibitor/seed storage/LTP family
  misc_feature (67)..(171): Homolog of NCBI NO: 30696757 NR Description: protease inhibitor/seed storage/lipid transfer
  misc_feature (67)..(162): Homolog of NCBI NO: 15221585 NR Description: protease inhibitor/seed storage/lipid transfer
  misc_feature (61)..(201): Homolog of NCBI NO: 7484433 NR Description: lipid transfer protein - Norway spruce
  misc_feature (24)..(201): Homolog of NCBI NO: 25553588 NR Description: OJ1656_E11.14 [Oryza sativa (japonica
  misc_feature (60)..(144): Homolog of NCBI NO: 25406275 NR Description: hypothetical protein F6D5.6 [imported] -
  misc_feature (67)..(171): Homolog of NCBI NO: 30696757 NR Description: protease inhibitor/seed storage/lipid transfer
  misc_feature (61)..(201): Homolog of NCBI NO: 7484433 NR Description: lipid transfer protein - Norway spruce
  misc_feature (60)..(144): Homolog of NCBI NO: 25406275 NR Description: hypothetical protein F6D5.6 [imported] -
  misc_feature (24)..(203): Homolog of NCBI NO: 15221052 NR Description: lipid transfer protein family [Arabidopsis
  misc_feature (24)..(162): Homolog of NCBI NO: 18410388 NR Description: lipid transfer protein family [Arabidopsis
  misc_feature (24)..(162): Homolog of NCBI NO: 21593596 NR Description: lipid transfer protein, putative [Arabidopsis
  misc_feature (24)..(140): Homolog of NCBI NO: 25406276 NR Description: probable lipid transfer protein F6D5.5
  misc_feature (60)..(163): Homolog of NCBI NO: 15219496 NR Description: protease inhibitor/seed storage/lipid transfer
  misc_feature (24)..(201): Homolog of NCBI NO: 25553588 NR Description: OJ1656_E11.14 [Oryza sativa (japonica
  misc_feature (67)..(162): Homolog of NCBI NO: 15221585 NR Description: protease inhibitor/seed storage/lipid transfer
  misc_feature (60)..(163): Homolog of NCBI NO: 15219496 NR Description: protease inhibitor/seed storage/lipid transfer
  misc_feature (24)..(140): Homolog of NCBI NO: 25406276 NR Description: probable lipid transfer protein F6D5.5
  misc_feature (24)..(162): Homolog of NCBI NO: 21593596 NR Description: lipid transfer protein, putative [Arabidopsis
  misc_feature (24)..(162): Homolog of NCBI NO: 18410388 NR Description: lipid transfer protein family [Arabidopsis
  misc_feature (24)..(203): Homolog of NCBI NO: 15221052 NR Description: lipid transfer protein family [Arabidopsis

SEQ ID NO: 110237 - protein, 180 aa, Zea mays subsp. mays; identical to SEQ ID NO: 109866
  misc_feature (1)..(180): Ceres Seq. ID no. 15177469
  misc_feature (44)..(117): Pfam Name: Protease inhibitor/seed storage/LTP family Pfam Description: Protease inhibitor/seed storage/LTP family
  misc_feature (44)..(117): Pfam Name: Protease inhibitor/seed storage/LTP family Pfam Description: Protease inhibitor/seed storage/LTP family
  misc_feature (44)..(148): Homolog of NCBI NO: 30696757 NR Description: protease inhibitor/seed storage/lipid transfer
  misc_feature (44)..(139): Homolog of NCBI NO: 15221585 NR Description: protease inhibitor/seed storage/lipid transfer
  misc_feature (38)..(178): Homolog of NCBI NO: 7484433 NR Description: lipid transfer protein - Norway spruce
  misc_feature (1)..(178): Homolog of NCBI NO: 25553588 NR Description: OJ1656_E11.14 [Oryza sativa (japonica
  misc_feature (37)..(121): Homolog of NCBI NO: 25406275 NR Description: hypothetical protein F6D5.6 [imported] -
  misc_feature (44)..(148): Homolog of NCBI NO: 30696757 NR Description: protease inhibitor/seed storage/lipid transfer
  misc_feature (38)..(178): Homolog of NCBI NO: 7484433 NR Description: lipid transfer protein - Norway spruce
  misc_feature (37)..(121): Homolog of NCBI NO: 25406275 NR Description: hypothetical protein F6D5.6 [imported] -
  misc_feature (1)..(180): Homolog of NCBI NO: 15221052 NR Description: lipid transfer protein family [Arabidopsis
  misc_feature (1)..(139): Homolog of NCBI NO: 18410388 NR Description: lipid transfer protein family [Arabidopsis
  misc_feature (1)..(139): Homolog of NCBI NO: 21593596 NR Description: lipid transfer protein, putative [Arabidopsis
  misc_feature (1)..(117): Homolog of NCBI NO: 25406276 NR Description: probable lipid transfer protein F6D5.5
  misc_feature (37)..(140): Homolog of NCBI NO: 15219496 NR Description: protease inhibitor/seed storage/lipid transfer
  misc_feature (1)..(178): Homolog of NCBI NO: 25553588 NR Description: OJ1656_E11.14 [Oryza sativa (japonica
  misc_feature (44)..(139): Homolog of NCBI NO: 15221585 NR Description: protease inhibitor/seed storage/lipid transfer
  misc_feature (37)..(140): Homolog of NCBI NO: 15219496 NR Description: protease inhibitor/seed storage/lipid transfer
  misc_feature (1)..(117): Homolog of NCBI NO: 25406276 NR Description: probable lipid transfer protein F6D5.5
  misc_feature (1)..(139): Homolog of NCBI NO: 21593596 NR Description: lipid transfer protein, putative [Arabidopsis
  misc_feature (1)..(139): Homolog of NCBI NO: 18410388 NR Description: lipid transfer protein family [Arabidopsis
  misc_feature (1)..(180): Homolog of NCBI NO: 15221052 NR Description: lipid transfer protein family [Arabidopsis

SEQ ID NO: 110238 - protein, 153 aa, Zea mays subsp. mays; identical to SEQ ID NO: 109867
  misc_feature (1)..(153): Ceres Seq. ID no. 15177470
  misc_feature (17)..(90): Pfam Name: Protease inhibitor/seed storage/LTP family Pfam Description: Protease inhibitor/seed storage/LTP family
  misc_feature (17)..(90): Pfam Name: Protease inhibitor/seed storage/LTP family Pfam Description: Protease inhibitor/seed storage/LTP family
  misc_feature (17)..(121): Homolog of NCBI NO: 30696757 NR Description: protease inhibitor/seed storage/lipid transfer
  misc_feature (17)..(112): Homolog of NCBI NO: 15221585 NR Description: protease inhibitor/seed storage/lipid transfer
  misc_feature (11)..(151): Homolog of NCBI NO: 7484433 NR Description: lipid transfer protein - Norway spruce
  misc_feature (1)..(151): Homolog of NCBI NO: 25553588 NR Description: OJ1656_E11.14 [Oryza sativa (japonica
  misc_feature (10)..(94): Homolog of NCBI NO: 25406275 NR Description: hypothetical protein F6D5.6 [imported] -
  misc_feature (17)..(121): Homolog of NCBI NO: 30696757 NR Description: protease inhibitor/seed storage/lipid transfer
  misc_feature (11)..(151): Homolog of NCBI NO: 7484433 NR Description: lipid transfer protein - Norway spruce
  misc_feature (10)..(94): Homolog of NCBI NO: 25406275 NR Description: hypothetical protein F6D5.6 [imported] -
  misc_feature (1)..(153): Homolog of NCBI NO: 15221052 NR Description: lipid transfer protein family [Arabidopsis
  misc_feature (1)..(112): Homolog of NCBI NO: 18410388 NR Description: lipid transfer protein family [Arabidopsis
  misc_feature (1)..(112): Homolog of NCBI NO: 21593596 NR Description: lipid transfer protein, putative [Arabidopsis
  misc_feature (1)..(90): Homolog of NCBI NO: 25406276 NR Description: probable lipid transfer protein F6D5.5
  misc_feature (10)..(113): Homolog of NCBI NO: 15219496 NR Description: protease inhibitor/seed storage/lipid transfer
  misc_feature (1)..(151): Homolog of NCBI NO: 25553588 NR Description: OJ1656_E11.14 [Oryza sativa (japonica
  misc_feature (17)..(112): Homolog of NCBI NO: 15221585 NR Description: protease inhibitor/seed storage/lipid transfer
  misc_feature (10)..(113): Homolog of NCBI NO: 15219496 NR Description: protease inhibitor/seed storage/lipid transfer
  misc_feature (1)..(90): Homolog of NCBI NO: 25406276 NR Description: probable lipid transfer protein F6D5.5
  misc_feature (1)..(112): Homolog of NCBI NO: 21593596 NR Description: lipid transfer protein, putative [Arabidopsis
  misc_feature (1)..(112): Homolog of NCBI NO: 18410388 NR Description: lipid transfer protein family [Arabidopsis
  misc_feature (1)..(153): Homolog of NCBI NO: 15221052 NR Description: lipid transfer protein family [Arabidopsis

SEQ ID NO: 110239 - DNA, 730 bp, Zea mays subsp. mays
  misc_feature (1)..(730): Ceres Seq. ID no. 15176713
actcttctgtcgctagtttcctcgcgcacatcaattaagcacgagaaatggcttgtgttcgttcgatacggtctttaacttccgtcactcagtctcctcgatatgtttcacgcaccacaggcattgtcatgtcttcatgctctgttcatcccatcgcgccctcctccttcactggctctcccatttccctcccgagagtccatccaccaactccaacaactcttataagaccgaggagtctcgtcccaatcacgatgatggtcaaacctacgctccagttcatccaagggacggatgagctgactatccctgacgtcaagctgactcggtctagggacgggtctaacggaatggcactcttctccttcgaccaaccatcagttttcgactccagcggtgaggtcggtgagataacgggtttgtacatgattgatgaggaaggtgtgatacagtcgacggatgtgaacgcgagattcgtgaacgggaaaccggaagggattgtggcaaagcacgtgatgcggacgccgaaggaatgggacaggttcatgaggtttatggagcggtactctgaccagaacggcttacagttcgttaagaagcaatgaggttgggggacttttctatgagcaaaatgtgtatgttacatttttttttaaactctcttggtttatgatatttttttctcttagttttgatctttacttgagtttcaatttttcaatgctacttt

SEQ ID NO: 110240 - protein, 185 aa, Zea mays subsp. mays
  misc_feature (1)..(185): Ceres Seq. ID no. 15176714
  misc_feature (73)..(185): Pfam Name: Photosystem II reaction centre W protein, PsbW Pfam Description: Photosystem II reaction centre W protein, PsbW
  misc_feature (76)..(185): Homolog of NCBI NO: 22298036 NR Description: photosystem II reaction center W protein
  misc_feature (76)..(183): Homolog of NCBI NO: 11467376 NR Description: photosystem II protein W [Cyanophora paradoxa]
  misc_feature (75)..(183): Homolog of NCBI NO: 11465813 NR Description: photosystem II protein W [Porphyra purpurea]
  misc_feature (76)..(183): Homolog of NCBI NO: 11467617 NR Description: photosystem II protein W [Guillardia theta]
  misc_feature (76)..(183): Homolog of NCBI NO: 11467474 NR Description: photosystem II protein W [Odontella sinensis]
  misc_feature (87)..(184): Homolog of NCBI NO: 19880501 NR Description: saline responsive OSSRII protein [Oryza sativa]
  misc_feature (68)..(184): Homolog of NCBI NO: 34907246 NR Description: photosystem II protein W-like protein
  misc_feature (1)..(185): Homolog of NCBI NO: 18417239 NR Description: photosystem II protein W - like [Arabidopsis
  misc_feature (1)..(185): Homolog of NCBI NO: 7488014 NR Description: photosystem II protein W homolog T5F17.110 -
MACVRSIRSLTSVTQSPRYVSRTTGIVMSSCSVHPIAPSSFTGSPISLPRVHPPTPTTLIRPRSLVPITMMVKPTLQFIQGTDELTIPDVKLTRSRDGSNGMALFSFDQPSVFDSSGEVGEITGLYMIDEEGVIQSTDVNARFVNGKPEGIVAKHVMRTPKEWDRFMRFMERYSDQNGLQFVKKQ

SEQ ID NO: 110241 - protein, 158 aa, Zea mays subsp. mays
  misc_feature (1)..(158): Ceres Seq. ID no. 15176715
  misc_feature (46)..(158): Pfam Name: Photosystem II reaction centre W protein, PsbW Pfam Description: Photosystem II reaction centre W protein, PsbW
  misc_feature (49)..(156): Homolog of NCBI NO: 11467617 NR Description: photosystem II protein W [Guillardia theta]
  misc_feature (49)..(156): Homolog of NCBI NO: 11467474 NR Description: photosystem II protein W [Odontella sinensis]
  misc_feature (60)..(157): Homolog of NCBI NO: 19880501 NR Description: saline responsive OSSRII protein [Oryza sativa]
  misc_feature (49)..(158): Homolog of NCBI NO: 22298036 NR Description: photosystem II reaction center W protein
  misc_feature (48)..(156): Homolog of NCBI NO: 11465813 NR Description: photosystem II protein W [Porphyra purpurea]
  misc_feature (49)..(156): Homolog of NCBI NO: 11467376 NR Description: photosystem II protein W [Cyanophora paradoxa]
  misc_feature (41)..(157): Homolog of NCBI NO: 34907246 NR Description: photosystem II protein W-like protein
  misc_feature (1)..(158): Homolog of NCBI NO: 18417239 NR Description: photosystem II protein W - like [Arabidopsis
  misc_feature (1)..(158): Homolog of NCBI NO: 7488014 NR Description: photosystem II protein W homolog T5F17.110 -
MSSCSVHPIAPSSFTGSPISLPRVHPPTPTTLIRPRSLVPITMMVKPTLQFIQGTDELTIPDVKLTRSRDGSNGMALFSFDQPSVFDSSGEVGEITGLYMIDEEGVIQSTDVNARFVNGKPEGIVAKHVMRTPKEWDRFMRFMERYSDQNGLQFVKKQ

SEQ ID NO: 110242 - protein, 116 aa, Zea mays subsp. mays
  misc_feature (1)..(116): Ceres Seq. ID no. 15176716
  misc_feature (4)..(116): Pfam Name: Photosystem II reaction centre W protein, PsbW Pfam Description: Photosystem II reaction centre W protein, PsbW
  misc_feature (7)..(116): Homolog of NCBI NO: 22298036 NR Description: photosystem II reaction center W protein
  misc_feature (7)..(114): Homolog of NCBI NO: 11467376 NR Description: photosystem II protein W [Cyanophora paradoxa]
  misc_feature (6)..(114): Homolog of NCBI NO: 11465813 NR Description: photosystem II protein W [Porphyra purpurea]
  misc_feature (7)..(114): Homolog of NCBI NO: 11467617 NR Description: photosystem II protein W [Guillardia theta]
  misc_feature (7)..(114): Homolog of NCBI NO: 11467474 NR Description: photosystem II protein W [Odontella sinensis]
  misc_feature (18)..(115): Homolog of NCBI NO: 19880501 NR Description: saline responsive OSSRII protein [Oryza sativa]
  misc_feature (1)..(115): Homolog of NCBI NO: 34907246 NR Description: photosystem II protein W-like protein
  misc_feature (1)..(116): Homolog of NCBI NO: 18417239 NR Description: photosystem II protein W - like [Arabidopsis
  misc_feature (1)..(116): Homolog of NCBI NO: 7488014 NR Description: photosystem II protein W homolog T5F17.110 -
MMVKPTLQFIQGTDELTIPDVKLTRSRDGSNGMALFSFDQPSVFDSSGEVGEITGLYMIDEEGVIQSTDVNARFVNGKPEGIVAKHVMRTPKEWDRFMRFMERYSDQNGLQFVKKQ

SEQ ID NO: 110243 - DNA, 787 bp, Zea mays subsp. mays
  misc_feature (1)..(787): Ceres Seq. ID no. 15176615
caatcggaatcttactctttctctatctcacctggaaaaaaaatggcgatgtgggtatttgggtacggatctctaatttggaaaacgggttttcctttcgacgatcgtcttcctggtttcatcaaaaactatcgccgtgttttccaccaaggtagtactgatcatagaggaacccctgaattcccgggaagaacagtgacattagagcctgcacctggagaaatctgttggggagtcgcttacaagataaccaaagaggaagacaaaaaagacgctttattacatctggaagtgagggagaagcaatatgaccagaaagagtatcttgatttcttcatagacattcatgactcagaaccagctgtatcaggagtgatggtatatatagcttcttctgacaagaagagcaacaacaactacttaggaccagctccttttgaagacattgccaaacagatagtaaaagcggaaggaccttcagggtcaaacagagactatctgttcaaccttgaagaggctctcgttcaactcgggtttaaggataaacatgtcacagatcttgctacgcatgttaggcttattctttcggcgactcaggatgccgccaccaaggatgtctagattccctgtgttttttatttgtccaaaaagaacaaaactgaattgataagagatgctgctgcattgcatcccatattcgatgtgttaactatcaatcaactctattgttattcatattttgatcacatcgtggtacggatttaaatatagtgtgattcagcgattc

SEQ ID NO: 110244 - protein, 206 aa, Zea mays subsp. mays
  misc_feature (1)..(206): Ceres Seq. ID no. 15176616
  misc_feature (17)..(194): Pfam Name: ChaC-like protein Pfam Description: ChaC-like protein
  misc_feature (15)..(90): Homolog of NCBI NO: 7486723 NR Description: hypothetical protein F9D12.14 - Arabidopsis
  misc_feature (118)..(206): Homolog of NCBI NO: 7486723 NR Description: hypothetical protein F9D12.14 - Arabidopsis
  misc_feature (87)..(200): Homolog of NCBI NO: 25349686 NR Description: hypothetical protein T12C22.6 [imported] -
  misc_feature (15)..(205): Homolog of NCBI NO: 27525010 NR Description: putative cation transporter [Beta procumbens]
  misc_feature (15)..(206): Homolog of NCBI NO: 18417778 NR Description: expressed protein [Arabidopsis thaliana]
  misc_feature (15)..(206): Homolog of NCBI NO: 21593515 NR Description: unknown [Arabidopsis thaliana]
  misc_feature (15)..(206): Homolog of NCBI NO: 15239626 NR Description: expressed protein [Arabidopsis thaliana]
  misc_feature (15)..(192): Homolog of NCBI NO: 38344831 NR Description: OSJNBa0064H22.12 [Oryza sativa (japonica
  misc_feature (17)..(200): Homolog of NCBI NO: 12083292 NR Description: unknown protein [Arabidopsis thaliana]
  misc_feature (15)..(200): Homolog of NCBI NO: 18401334 NR Description: expressed protein [Arabidopsis thaliana]
QSESYSFSISPGKKMAMWVFGYGSLIWKTGFPFDDRLPGFIKNYRRVFHQGSTDHRGTPEFPGRTVTLEPAPGEICWGVAYKITKEEDKKDALLHLEVREKQYDQKEYLDFFIDIHDSEPAVSGVMVYIASSDKKSNNNYLGPAPFEDIAKQIVKAEGPSGSNRDYLFNLEEALVQLGFKDKHVTDLATHVRLILSATQDAATKDV

SEQ ID NO: 110245 - protein, 192 aa, Zea mays subsp. mays
  misc_feature (1)..(192): Ceres Seq. ID no. 15176617
  misc_feature (3)..(180): Pfam Name: ChaC-like protein Pfam Description: ChaC-like protein
  misc_feature (1)..(76): Homolog of NCBI NO: 7486723 NR Description: hypothetical protein F9D12.14 - Arabidopsis
  misc_feature (104)..(192): Homolog of NCBI NO: 7486723 NR Description: hypothetical protein F9D12.14 - Arabidopsis
  misc_feature (73)..(186): Homolog of NCBI NO: 25349686 NR Description: hypothetical protein T12C22.6 [imported] -
  misc_feature (1)..(191): Homolog of NCBI NO: 27525010 NR Description: putative cation transporter [Beta procumbens]
  misc_feature (1)..(192): Homolog of NCBI NO: 18417778 NR Description: expressed protein [Arabidopsis thaliana]
  misc_feature (1)..(192): Homolog of NCBI NO: 21593515 NR Description: unknown [Arabidopsis thaliana]
  misc_feature (1)..(192): Homolog of NCBI NO: 15239626 NR Description: expressed protein [Arabidopsis thaliana]
  misc_feature (1)..(178): Homolog of NCBI NO: 38344831 NR Description: OSJNBa0064H22.12 [Oryza sativa (japonica
  misc_feature (3)..(186): Homolog of NCBI NO: 12083292 NR Description: unknown protein [Arabidopsis thaliana]
  misc_feature (1)..(186): Homolog of NCBI NO: 18401334 NR Description: expressed protein [Arabidopsis thaliana]
MAMWVFGYGSLIWKTGFPFDDRLPGFIKNYRRVFHQGSTDHRGTPEFPGRTVTLEPAPGEICWGVAYKITKEEDKKDALLHLEVREKQYDQKEYLDFFIDIHDSEPAVSGVMVYIASSDKKSNNNYLGPAPFEDIAKQIVKAEGPSGSNRDYLFNLEEALVQLGFKDKHVTDLATHVRLILSATQDAATKDV

SEQ ID NO: 110246 - protein, 190 aa, Zea mays subsp. mays
  misc_feature (1)..(190): Ceres Seq. ID no. 15176618
  misc_feature (1)..(178): Pfam Name: ChaC-like protein Pfam Description: ChaC-like protein
  misc_feature (1)..(74): Homolog of NCBI NO: 7486723 NR Description: hypothetical protein F9D12.14 - Arabidopsis
  misc_feature (102)..(190): Homolog of NCBI NO: 7486723 NR Description: hypothetical protein F9D12.14 - Arabidopsis
  misc_feature (71)..(184): Homolog of NCBI NO: 25349686 NR Description: hypothetical protein T12C22.6 [imported] -
  misc_feature (1)..(189): Homolog of NCBI NO: 27525010 NR Description: putative cation transporter [Beta procumbens]
  misc_feature (1)..(190): Homolog of NCBI NO: 18417778 NR Description: expressed protein [Arabidopsis thaliana]
  misc_feature (1)..(190): Homolog of NCBI NO: 21593515 NR Description: unknown [Arabidopsis thaliana]
  misc_feature (1)..(190): Homolog of NCBI NO: 15239626 NR Description: expressed protein [Arabidopsis thaliana]
  misc_feature (1)..(176): Homolog of NCBI NO: 38344831 NR Description: OSJNBa0064H22.12 [Oryza sativa (japonica
  misc_feature (1)..(184): Homolog of NCBI NO: 12083292 NR Description: unknown protein [Arabidopsis thaliana]
  misc_feature (1)..(184): Homolog of NCBI NO: 18401334 NR Description: expressed protein [Arabidopsis thaliana]
MWVFGYGSLIWKTGFPFDDRLPGFIKNYRRVFHQGSTDHRGTPEFPGRTVTLEPAPGEICWGVAYKITKEEDKKDALLHLEVREKQYDQKEYLDFFIDIHDSEPAVSGVMVYIASSDKKSNNNYLGPAPFEDIAKQIVKAEGPSGSNRDYLFNLEEALVQLGFKDKHVTDLATHVRLILSATQDAATKDV

SEQ ID NO: 110247 - DNA, 714 bp, Zea mays subsp. mays
  misc_feature (1)..(714): Ceres Seq. ID no. 15176138
atacaacaaatcatacaaaaacacatacaaaacatataaaagaagaaaatctccggttgataaaaactatttaaatgaagaggaacggtgaaactaagcggcggaggaacgtggcggaagaggcggagcagggaggaggagatccggcgatgtgggaggatcttgatcggaatttcagacaagtgcaatctgttttggacagaaacagatcacttatccagcaagtcaacgacaatcaccagtcaagaatggcagataacatgtccaagaacgttgctttgatccaagaactcaacggaaacatctctaaggttgtttctatgtattctgacctcaacaccaatttctcatcggcgtttcacggtgggaagaacggtcgcgacggtggtggtgctaccggaaccagagctaattaaatcaaccctggtctttcttagttggaccggccggtttaacatttcgaatcagtcggtttaacatatggtctaaaccaacctgttatataagttatgttattgcaatgattgtcgttagaataatccgtgggagaaaacccattatatgggttatctatcttattaaaactgaagtacaaaatgagattgtttggaaacatgtatatgagtttaaaaaataagagtgtttggtaacatggattgtagtcttttaaaaaaatattacttttgtttggaaataaagatagtagtatttagc

SEQ ID NO: 110248 - protein, 113 aa, Zea mays subsp. mays
  misc_feature (1)..(113): Ceres Seq. ID no. 15176139
  misc_feature (23)..(105): Homolog of NCBI NO: 8778455 NR Description: F1L3.15 [Arabidopsis thaliana]
  misc_feature (23)..(105): Homolog of NCBI NO: 25406197 NR Description: hypothetical protein F28P22.18 [imported] -
  misc_feature (23)..(105): Homolog of NCBI NO: 18410139 NR Description: expressed protein [Arabidopsis thaliana]
  misc_feature (20)..(110): Homolog of NCBI NO: 38637104 NR Description: unknown protein [Oryza sativa (japonica
  misc_feature (23)..(111): Homolog of NCBI NO: 18396289 NR Description: expressed protein [Arabidopsis thaliana]
  misc_feature (20)..(112): Homolog of NCBI NO: 4680201 NR Description: hypothetical protein [Sorghum bicolor]
  misc_feature (17)..(113): Homolog of NCBI NO: 4680489 NR Description: hypothetical protein [Oryza sativa]
  misc_feature (23)..(110): Homolog of NCBI NO: 15227672 NR Description: hypothetical protein [Arabidopsis thaliana]
  misc_feature (2)..(113): Homolog of NCBI NO: 34499881 NR Description: early flowering 4 [Mesembryanthemum crystallinum]
  misc_feature (1)..(112): Homolog of NCBI NO: 18405258 NR Description: expressed protein [Arabidopsis thaliana]
MKRNGETKRRRNVAEEAEQGGGDPAMWEDLDRNFRQVQSVLDRNRSLIQQVNDNHQSRMADNMSKNVALIQELNGNISKVVSMYSDLNTNFSSAFHGGKNGRDGGGATGTRAN

SEQ ID NO: 110249 - protein, 88 aa, Zea mays subsp. mays
  misc_feature (1)..(88): Ceres Seq. ID no. 15176140
  misc_feature (1)..(80): Homolog of NCBI NO: 8778455 NR Description: F1L3.15 [Arabidopsis thaliana]
  misc_feature (1)..(80): Homolog of NCBI NO: 25406197 NR Description: hypothetical protein F28P22.18 [imported] -
  misc_feature (1)..(80): Homolog of NCBI NO: 18410139 NR Description: expressed protein [Arabidopsis thaliana]
  misc_feature (1)..(85): Homolog of NCBI NO: 38637104 NR Description: unknown protein [Oryza sativa (japonica
  misc_feature (1)..(86): Homolog of NCBI NO: 18396289 NR Description: expressed protein [Arabidopsis thaliana]
  misc_feature (1)..(87): Homolog of NCBI NO: 4680201 NR Description: hypothetical protein [Sorghum bicolor]
  misc_feature (1)..(88): Homolog of NCBI NO: 4680489 NR Description: hypothetical protein [Oryza sativa]
  misc_feature (1)..(85): Homolog of NCBI NO: 15227672 NR Description: hypothetical protein [Arabidopsis thaliana]
  misc_feature (1)..(88): Homolog of NCBI NO: 34499881 NR Description: early flowering 4 [Mesembryanthemum crystallinum]
  misc_feature (1)..(87): Homolog of NCBI NO: 18405258 NR Description: expressed protein [Arabidopsis thaliana]
MWEDLDRNFRQVQSVLDRNRSLIQQVNDNHQSRMADNMSKNVALIQELNGNISKVVSMYSDLNTNFSSAFHGGKNGRDGGGATGTRAN

SEQ ID NO: 110250 - DNA, 1667 bp, Zea mays subsp. mays
  misc_feature (1)..(1667): Ceres Seq. ID no. 15176145
aatctccccttctcttcctcttctcccttttcttaaacttcggaatccaggatcgtgggtcgatcggttctcagaatccgatcaagacccagtagttcgttttcatcgacacatccttcactgttttccaaaagaatggagatggaatcatgtaagctgttcatcggtgggatctcttgggagaccactgaagatcgtcttcgcgagtattttcagagtttcggtgaggttttggaggccgtcatcatgaaggatcgagccactggtcgtgctcgtggctttggtttccttgtcttctctgaccccattgttgctgagagagtcgtgtttctcagacacgtgattgatggtaaacttgttgaggcgaagaaggcagttccaagagatgatcacgtagtattgaacaaaagttacaacactagtctccaggggtcacctggcccagcaaacagcaagaagatctttgttggaggtttggcttcatcggtgacagaagctgagttcaaaaagtattttgctcagtttggggtgatcactgacgttgtggtgatgtatgaccacagaacccagcgaccgagaggcttcgggttcatctcttttgagtcagaggacgctgtagacaaagttctgcagaggacattccacgaactcaatggaaagatggttgaggtcaaactggctgttcctaaggaaatggctctgaaccctatccggaaccaaatgaatgttaatagctttggcagtagtagaatcagtgcattgctgatgaacgagtacacccaagggttcagcccgagtccaatctccggttatggagtcaaacctgaagttaggtacagtccaggattaggtaataggggtggtggattctcaccgtttggacatggatacggaattgagctgaactttgagccagatcagagtcagaactttgggtctggttccagtgcaggctttgggcggccccttagcccaggatatgctccgagtcttggcaggtacggtagccagattgagtcaggaggagctgggaacggtcctgtgctaaatgcagcaacaaagaaccatttatggggtaatggtggtgggctaggttacatgtcaaactcaccaatatctagaagcagcttcaatggaatgtcttcactaggcagcatcggagacaactcgagacgtaatagctaccgcagtgagggaggaggaggcttaggattagaagcaatgagagggggtcatgttggtggttacagcagcggctcaagcagcttggagacagactctttgtacagtgactcggcgtggctttcgctgcctgcaaaggcggaggaaagaatgggagcgtttgacttcatgtccagaggaccagctggctacatcaacaggcaaccaaacggaggaattgcagcttagagaagtgagaaactcattccatggagatcagatgatgttttgactgtttgcagaagagagatttttagaagatgaaaaaaaaaagtaattgttcaaaaaaaagtttatttactttcttactattttgattgttgttatagtttttatttttcaccctttttctaatttggggttttgtttcttttatcttgaagtaagaaaaatgtaaaatgagttatataatgagacaaagaaacaatgaagttgtgtattatgtt

SEQ ID NO: 110251 - protein, 424 aa, Zea mays subsp. mays
  misc_feature (1)..(424): Ceres Seq. ID no. 15176146
  misc_feature (109)..(179): Pfam Name: RNA recognition motif. (a.k.a. RRM, RBD, or RNP domain) Pfam Description: RNA recognition motif. (a.k.a. RRM, RBD, or RNP
  misc_feature (7)..(393): Homolog of NCBI NO: 7487039 NR Description: hypothetical protein T15N24.100 - Arabidopsis
  misc_feature (1)..(393): Homolog of NCBI NO: 18416794 NR Description: heterogeneous nuclear ribonucleoprotein (hnRNP),
  misc_feature (1)..(382): Homolog of NCBI NO: 38175737 NR Description: putative heterogeneous nuclear ribonucleoprotein
  misc_feature (1)..(374): Homolog of NCBI NO: 18398061 NR Description: heterogeneous nuclear ribonucleoprotein (hnRNP),
  misc_feature (1)..(374): Homolog of NCBI NO: 15292697 NR Description: putative RNA-binding protein [Arabidopsis
  misc_feature (1)..(374): Homolog of NCBI NO: 30680456 NR Description: heterogeneous nuclear ribonucleoprotein (hnRNP),
  misc_feature (1)..(374): Homolog of NCBI NO: 6648193 NR Description: putative RNA-binding protein [Arabidopsis
  misc_feature (1)..(344): Homolog of NCBI NO: 9758790 NR Description: RNA-binding protein-like [Arabidopsis thaliana]
  misc_feature (1)..(424): Homolog of NCBI NO: 21553963 NR Description: RNA-binding protein-like [Arabidopsis thaliana]
  misc_feature (1)..(424): Homolog of NCBI NO: 18422817 NR Description: heterogeneous nuclear ribonucleoprotein (hnRNP),
MEMESCKLFIGGISWETTEDRLREYFQSFGEVLEAVIMKDRATGRARGFGFLVFSDPIVAERVVFLRHVIDGKLVEAKKAVPRDDHVVLNKSYNTSLQGSPGPANSKKIFVGGLASSVTEAEFKKYFAQFGVITDVVVMYDHRTQRPRGFGFISFESEDAVDKVLQRTFHELNGKMVEVKLAVPKEMALNPIRNQMNVNSFGSSRISALLMNEYTQGFSPSPISGYGVKPEVRYSPGLGNRGGGFSPFGHGYGIELNFEPDQSQNFGSGSSAGFGRPLSPGYAPSLGRYGSQIESGGAGNGPVLNAATKNHLWGNGGGLGYMSNSPISRSSFNGMSSLGSIGDNSRRNSYRSEGGGGLGLEAMRGGHVGGYSSGSSSLETDSLYSDSAWLSLPAKAEERMGAFDFMSRGPAGYINRQPNGGIAA

SEQ ID NO: 110252 - protein, 422 aa, Zea mays subsp. mays
  misc_feature (1)..(422): Ceres Seq. ID no. 15176147
  misc_feature (107)..(177): Pfam Name: RNA recognition motif. (a.k.a. RRM, RBD, or RNP domain) Pfam Description: RNA recognition motif. (a.k.a. RRM, RBD, or RNP
  misc_feature (5)..(391): Homolog of NCBI NO: 7487039 NR Description: hypothetical protein T15N24.100 - Arabidopsis
  misc_feature (1)..(391): Homolog of NCBI NO: 18416794 NR Description: heterogeneous nuclear ribonucleoprotein (hnRNP),
  misc_feature (1)..(380): Homolog of NCBI NO: 38175737 NR Description: putative heterogeneous nuclear ribonucleoprotein
  misc_feature (1)..(372): Homolog of NCBI NO: 18398061 NR Description: heterogeneous nuclear ribonucleoprotein (hnRNP),
  misc_feature (1)..(372): Homolog of NCBI NO: 15292697 NR Description: putative RNA-binding protein [Arabidopsis
  misc_feature (1)..(372): Homolog of NCBI NO: 30680456 NR Description: heterogeneous nuclear ribonucleoprotein (hnRNP),
  misc_feature (1)..(372): Homolog of NCBI NO: 6648193 NR Description: putative RNA-binding protein [Arabidopsis
  misc_feature (1)..(342): Homolog of NCBI NO: 9758790 NR Description: RNA-binding protein-like [Arabidopsis thaliana]
  misc_feature (1)..(422): Homolog of NCBI NO: 21553963 NR Description: RNA-binding protein-like [Arabidopsis thaliana]
  misc_feature (1)..(422): Homolog of NCBI NO: 18422817 NR Description: heterogeneous nuclear ribonucleoprotein (hnRNP),
MESCKLFIGGISWETTEDRLREYFQSFGEVLEAVIMKDRATGRARGFGFLVFSDPIVAERVVFLRHVIDGKLVEAKKAVPRDDHVVLNKSYNTSLQGSPGPANSKKIFVGGLASSVTEAEFKKYFAQFGVITDVVVMYDHRTQRPRGFGFISFESEDAVDKVLQRTFHELNGKMVEVKLAVPKEMALNPIRNQMNVNSFGSSRISALLMNEYTQGFSPSPISGYGVKPEVRYSPGLGNRGGGFSPFGHGYGIELNFEPDQSQNFGSGSSAGFGRPLSPGYAPSLGRYGSQIESGGAGNGPVLNAATKNHLWGNGGGLGYMSNSPISRSSFNGMSSLGSIGDNSRRNSYRSEGGGGLGLEAMRGGHVGGYSSGSSSLETDSLYSDSAWLSLPAKAEERMGAFDFMSRGPAGYINRQPNGGIAA

SEQ ID NO: 110253 - protein, 387 aa, Zea mays subsp. mays
  misc_feature (1)..(387): Ceres Seq. ID no. 15176148
  misc_feature (72)..(142): Pfam Name: RNA recognition motif. (a.k.a. RRM, RBD, or RNP domain) Pfam Description: RNA recognition motif. (a.k.a. RRM, RBD, or RNP
  misc_feature (1)..(356): Homolog of NCBI NO: 7487039 NR Description: hypothetical protein T15N24.100 - Arabidopsis
  misc_feature (1)..(356): Homolog of NCBI NO: 18416794 NR Description: heterogeneous nuclear ribonucleoprotein (hnRNP),
  misc_feature (1)..(345): Homolog of NCBI NO: 38175737 NR Description: putative heterogeneous nuclear ribonucleoprotein
  misc_feature (1)..(337): Homolog of NCBI NO: 15292697 NR Description: putative RNA-binding protein [Arabidopsis
  misc_feature (1)..(337): Homolog of NCBI NO: 30680456 NR Description: heterogeneous nuclear ribonucleoprotein (hnRNP),
  misc_feature (1)..(337): Homolog of NCBI NO: 18398061 NR Description: heterogeneous nuclear ribonucleoprotein (hnRNP),
  misc_feature (1)..(337): Homolog of NCBI NO: 6648193 NR Description: putative RNA-binding protein [Arabidopsis
  misc_feature (1)..(307): Homolog of NCBI NO: 9758790 NR Description: RNA-binding protein-like [Arabidopsis thaliana]
  misc_feature (1)..(387): Homolog of NCBI NO: 21553963 NR Description: RNA-binding protein-like [Arabidopsis thaliana]
  misc_feature (1)..(387): Homolog of NCBI NO: 18422817 NR Description: heterogeneous nuclear ribonucleoprotein (hnRNP),
MKDRATGRARGFGFLVFSDPIVAERVVFLRHVIDGKLVEAKKAVPRDDHVVLNKSYNTSLQGSPGPANSKKIFVGGLASSVTEAEFKKYFAQFGVITDVVVMYDHRTQRPRGFGFISFESEDAVDKVLQRTFHELNGKMVEVKLAVPKEMALNPIRNQMNVNSFGSSRISALLMNEYTQGFSPSPISGYGVKPEVRYSPGLGNRGGGFSPFGHGYGIELNFEPDQSQNFGSGSSAGFGRPLSPGYAPSLGRYGSQIESGGAGNGPVLNAATKNHLWGNGGGLGYMSNSPISRSSFNGMSSLGSIGDNSRRNSYRSEGGGGLGLEAMRGGHVGGYSSGSSSLETDSLYSDSAWLSLPAKAEERMGAFDFMSRGPAGYINRQPNGGIAA

SEQ ID NO: 110254 - DNA, 2018 bp, Zea mays subsp. mays
  misc_feature (1)..(2018): Ceres Seq. ID no. 15176169
tctctcgctcccggatcgccgcgagctcctttttgatctttgactcgcatcgcgtctcctctcgcctccgttttggataagcccgtctggaagcctctcctgctttcatttcgccggcccgcggagaacagctcggcgggttcccttcgtgcagcgttcggagagctcttcctgctgctctgcgacggacggggacggagaggtcaaaaatgtaccatcacggatgatggatggtctccggtatcatctgcgtgggacatagatggaggactacttttcacgcttcctaaaccttggttggcagctaagacaatacttgacagaattaatagaaaatttggttcggaccattaatcggattcctcaacgtcttggagtccaattctctgctagccatggaggatcattgactggcaccacagtatactttcatgaaagggcatctacgttatctgttaatactattaccactacagaaaaacagactgcaaatggaacatctgaaggcgcaattttcagaaaaggactttccagtatttacgaaagatcatgtgtcaggtcttcctatcttttacatggcttcatgctggtacgaagattggcattcagtgtgcgagatctgtggaatctattttcaagtgaagtacacgccaaactaaccaggatcttacatcgtttctggacaacactacagggatcttgtgaagacataggatggttgcaaagaactcgggcatcacttcgttcagttgatgggacaggtcgcttcaaggagattttgcatgagataaggaatggcgtgcattgcctgcctgatacactgatttacttatttattcctggcctttttagcaaccacagtccactttacttcaccaatacgaaacgattcttttcaaaaatgggattggcttgccatattgcgaaaattcatagcgaggcgtcagtggagaagaacgcgtgggaactgaaacagtacattgaggagctctactgggggtctggtaagcaggttctgctccttggtcatagcaaaggtggagttgatgcagctgcagctctttccttgtactggtctgagctcaagggtaaggttgctggcctggcgttggttcagagcccatatggtggcaccccggtcgcctccgatatccttcgagaaggccagatcgctgataaggagacaaggaggatcatgcagctcatcgtatgcaaactaatcaagggcgacatcagggccttggaggacctcacgtatgccaagagaaaggacttcatctcccagcacaaactccccatcgatgagctgccgatcatctccttccacaccgaagccagcaccgcgcccacagcgctcgcgtcgctgacccgtgtcgcccaagccgagctcctcccatggctacccctgccacggttcttcctgtctgcatccgagtttgtcgagtcaatgctcgcctctctgaaggtccccgtggttgcgcctgtgtctgcagccatggcggtgacagccctccacctgcggctgcgctatggggagaggagcgacgggctggtgacacggcgcgacgccgaggtgcctgggtcagtggtagttagacccgagaggaggctggaccacgcgtggatggtgtactccacgctgaagatgggcagcgctgaggccgatgcgagcgagatgtgcgaggctctgctggccatgctcgttgagattggcaggaagaaattttgctgaccatctggtcatctggagttctccatggttttggttatatatgcacatatatgtcacgcatactacaaatgatagagtattacagtctttacagggaacagtggaaattagattaatttccttggtgaaagcagggctctgtgataaaaccatatgctactttttttgacaatatgcatactttgtggcaatatgcattaattttggacgaaccataggctactttggctatgtaatgttcttcgcacttcacatttaatttagttttttttaatggttttggttt

SEQ ID NO: 110255 - protein, 489 aa, Zea mays subsp. mays
  misc_feature (1)..(489): Ceres Seq. ID no. 15176170
  misc_feature (135)..(178): Homolog of NCBI NO: 7486943 NR Description: hypothetical protein At2g44970 [imported] -
  misc_feature (401)..(487): Homolog of NCBI NO: 7486943 NR Description: hypothetical protein At2g44970 [imported] -
  misc_feature (198)..(376): Homolog of NCBI NO: 7486943 NR Description: hypothetical protein At2g44970 [imported] -
  misc_feature (401)..(487): Homolog of NCBI NO: 30689883 NR Description: expressed protein [Arabidopsis thaliana]
  misc_feature (401)..(487): Homolog of NCBI NO: 18377628 NR Description: unknown protein [Arabidopsis thaliana]
  misc_feature (135)..(376): Homolog of NCBI NO: 30689883 NR Description: expressed protein [Arabidopsis thaliana]
  misc_feature (135)..(376): Homolog of NCBI NO: 18377628 NR Description: unknown protein [Arabidopsis thaliana]
MEDYFSRFLNLGWQLRQYLTELIENLVRTINRIPQRLGVQFSASHGGSLTGTTVYFHERASTLSVNTITTTEKQTANGTSEGAIFRKGLSSIYERSCVRSSYLLHGFMLVRRLAFSVRDLWNLFSSEVHAKLTRILHRFWTTLQGSCEDIGWLQRTRASLRSVDGTGRFKEILHEIRNGVHCLPDTLIYLFIPGLFSNHSPLYFTNTKRFFSKMGLACHIAKIHSEASVEKNAWELKQYIEELYWGSGKQVLLLGHSKGGVDAAAALSLYWSELKGKVAGLALVQSPYGGTPVASDILREGQIADKETRRIMQLIVCKLIKGDIRALEDLTYAKRKDFISQHKLPIDELPIISFHTEASTAPTALASLTRVAQAELLPWLPLPRFFLSASEFVESMLASLKVPVVAPVSAAMAVTALHLRLRYGERSDGLVTRRDAEVPGSVVVRPERRLDHAWMVYSTLKMGSAEADASEMCEALLAMLVEIGRKKFC

SEQ ID NO: 110256 - protein, 382 aa, Zea mays subsp. mays
  misc_feature (1)..(382): Ceres Seq. ID no. 15176171
  misc_feature (28)..(71): Homolog of NCBI NO: 7486943 NR Description: hypothetical protein At2g44970 [imported] -
  misc_feature (294)..(380): Homolog of NCBI NO: 7486943 NR Description: hypothetical protein At2g44970 [imported] -
  misc_feature (91)..(269): Homolog of NCBI NO: 7486943 NR Description: hypothetical protein At2g44970 [imported] -
  misc_feature (294)..(380): Homolog of NCBI NO: 30689883 NR Description: expressed protein [Arabidopsis thaliana]
  misc_feature (294)..(380): Homolog of NCBI NO: 18377628 NR Description: unknown protein [Arabidopsis thaliana]
  misc_feature (28)..(269): Homolog of NCBI NO: 30689883 NR Description: expressed protein [Arabidopsis thaliana]
  misc_feature (28)..(269): Homolog of NCBI NO: 18377628 NR Description: unknown protein [Arabidopsis thaliana]
MLVRRLAFSVRDLWNLFSSEVHAKLTRILHRFWTTLQGSCEDIGWLQRTRASLRSVDGTGRFKEILHEIRNGVHCLPDTLIYLFIPGLFSNHSPLYFTNTKRFFSKMGLACHIAKIHSEASVEKNAWELKQYIEELYWGSGKQVLLLGHSKGGVDAAAALSLYWSELKGKVAGLALVQSPYGGTPVASDILREGQIADKETRRIMQLIVCKLIKGDIRALEDLTYAKRKDFISQHKLPIDELPIISFHTEASTAPTALASLTRVAQAELLPWLPLPRFFLSASEFVESMLASLKVPVVAPVSAAMAVTALHLRLRYGERSDGLVTRRDAEVPGSVVVRPERRLDHAWMVYSTLKMGSAEADASEMCEALLAMLVEIGRKKFC

SEQ ID NO: 110257 - protein, 276 aa, Zea mays subsp. mays
  misc_feature (1)..(276): Ceres Seq. ID no. 15176172
  misc_feature (188)..(274): Homolog of NCBI NO: 7486943 NR Description: hypothetical protein At2g44970 [imported] -
  misc_feature (1)..(163): Homolog of NCBI NO: 7486943 NR Description: hypothetical protein At2g44970 [imported] -
  misc_feature (188)..(274): Homolog of NCBI NO: 30689883 NR Description: expressed protein [Arabidopsis thaliana]
  misc_feature (188)..(274): Homolog of NCBI NO: 18377628 NR Description: unknown protein [Arabidopsis thaliana]
  misc_feature (1)..(163): Homolog of NCBI NO: 30689883 NR Description: expressed protein [Arabidopsis thaliana]
  misc_feature (1)..(163): Homolog of NCBI NO: 18377628 NR Description: unknown protein [Arabidopsis thaliana]
MGLACHIAKIHSEASVEKNAWELKQYIEELYWGSGKQVLLLGHSKGGVDAAAALSLYWSELKGKVAGLALVQSPYGGTPVASDILREGQIADKETRRIMQLIVCKLIKGDIRALEDLTYAKRKDFISQHKLPIDELPIISFHTEASTAPTALASLTRVAQAELLPWLPLPRFFLSASEFVESMLASLKVPVVAPVSAAMAVTALHLRLRYGERSDGLVTRRDAEVPGSVVVRPERRLDHAWMVYSTLKMGSAEADASEMCEALLAMLVEIGRKKFC

SEQ ID NO: 110258 - DNA, 1124 bp, Zea mays subsp. mays
  misc_feature (1)..(1124): Ceres Seq. ID no. 15176153
acaaaacaaaatctgaacttcaaaagcaaagcttcccactctcgttattctctaaaccattcccaagaaaaaaaaaatcaaaatgtcttcgttagttttcaaactctttttatttgtgtctctcttccaaatctcaatctctgctaggaaactagcacaagatgaaccaaaccagttccaatcattgaaataccacaaaggagctcttctctccggcaaaatctccattaacctattctggtacggaaaattcaaaccagctcaaagagcaatcatctccgatttcatcacttcgctttcacattcctcttcagaccaaccatctgtcgccacgtggtggaaaaccactgagaaatactacaaactcgccgcaggagataaaactccttctccttcactctcactcactctcaagtcacaaatcctcgacgagacttactctctcggaaaatctctaacagacagagacatccgcaagttagcctcaaaaggagatcaatacgatgcggttaacgttgttttgacttcagctgacgtggcggtaactggatttggtatgagtcgatgcgggacacacggacatgctcgtggtaatgcgggtaaacgcggatccaaattcgcttatatttgggtcggaaactccgaaacgcaatgcccgggtcaatgcgcgtggccatttcacgcaccggtgtacggtcctcagagcccgccgctcgtggcgccgaacaacgatgtgggactcgacggtatggtgattaacttagcgagtcttttagctggaaccgcaacgaacccctttggtaatggttattaccagggcccacaaaacgcaccgctcgaagctgcgtccgcgtgtcctggtgtttatgggaaaggagcttatcctggttacgctggaaatttacttgtcgatgctacgacgggaggtagttttaatgcgtatggtgcaaacggcaggaagttcttgctacctgcgttgtatgatcctacaacgtcggattgctctactatggtttgaggaagaaaaaatatgtttgatgtttcatcttttggttttgtagtagaaaatgatactattctagtgtaattcttttattttattcattaatattattctgagttcc

SEQ ID NO: 110259 - protein, 311 aa, Zea mays subsp. mays
  misc_feature (1)..(311): Ceres Seq. ID no. 15176154
  misc_feature (35)..(311): Pfam Name: Phosphate-induced protein 1 conserved region Pfam Description: Phosphate-induced protein 1 conserved region
  misc_feature (17)..(308): Homolog of NCBI NO: 21594010 NR Description: unknown [Arabidopsis thaliana]
  misc_feature (118)..(310): Homolog of NCBI NO: 13194680 NR Description: phosphate-induced protein 1-like protein
  misc_feature (43)..(311): Homolog of NCBI NO: 15242420 NR Description: expressed protein [Arabidopsis thaliana]
  misc_feature (1)..(242): Homolog of NCBI NO: 11762144 NR Description: At1g35140 [Arabidopsis thaliana]
  misc_feature (1)..(311): Homolog of NCBI NO: 31074969 NR Description: erg-1 [Solanum tuberosum]
  misc_feature (2)..(311): Homolog of NCBI NO: 15237656 NR Description: phi-1-related protein [Arabidopsis thaliana]
  misc_feature (1)..(310): Homolog of NCBI NO: 15219504 NR Description: phosphate-induced (phi-1) protein -related
  misc_feature (2)..(311): Homolog of NCBI NO: 3759184 NR Description: phi-1 [Nicotiana tabacum]
  misc_feature (1)..(311): Homolog of NCBI NO: 15236667 NR Description: phi-1 phosphate-induced protein -related
  misc_feature (1)..(311): Homolog of NCBI NO: 21593043 NR Description: putative phi-1-like phosphate-induced protein
MSSLVFKLFLFVSLFQISISARKLAQDEPNQFQSLKYHKGALLSGKISINLFWYGKFKPAQRAIISDFITSLSHSSSDQPSVATWWKTTEKYYKLAAGDKTPSPSLSLTLKSQILDETYSLGKSLTDRDIRKLASKGDQYDAVNVVLTSADVAVTGFGMSRCGTHGHARGNAGKRGSKFAYIWVGNSETQCPGQCAWPFHAPVYGPQSPPLVAPNNDVGLDGMVINLASLLAGTATNPFGNGYYQGPQNAPLEAASACPGVYGKGAYPGYAGNLLVDATTGGSFNAYGANGRKFLLPALYDPTTSDCSTMV

SEQ ID NO: 110260 - DNA, 806 bp, Zea mays subsp. mays
  misc_feature (1)..(806): Ceres Seq. ID no. 15174297
gtttagattacttttcgagaaatcgacgcggaaagagcttcttcttcttcttccatctctccgattcgcaaagaaggaatgtcgagtctatacagaggtgtttcaaggaaagagaaacccagacgtcatcatgggttgaatcagcagaagaggcaagagatcaaggaagcttttgatctctttgacactgatggctctggtaccatcgatgctaaagagcttaatgttgctatgagggcgcttggtttcgagatgacggaagagcaaatcgagaaaatgatagcagatgtggacaaggatggaagtggagccatagattacgatgagttttaccatatgatgactgctaaaattggtgaacgtgacaccaaagaagagctcaccaaggctttcaagatcattgatcttgacaataatgggaagatatctgctgatgatatcaaacgcatggcaaaggacttgggtgaaaacttcactgatgctgagatacgtgaaatggtggaagaagctgaccgtgaccgtgatggtgaagttaatatggaagagttcatgaggatgatgaagagaactgctgcttatgagtactaaaatatagttgttgttgtattggtactgatgaggtctctgttataaatacttccttttaaccgtggcattactatatgtctttactgaagatacgtgtttccgtttttttatctattttatgagacaagtttggtcttttgtgttggtttatgttgtatcaaaagacttcggattagtttgcaaaagtttcttaaatgtggaggaggttgctttggttt

SEQ ID NO: 110261 - protein, 169 aa, Zea mays subsp. mays
  misc_feature (1)..(169): Ceres Seq. ID no. 15174298
  misc_feature (136)..(164): Pfam Name: EF hand Pfam Description: EF hand
  misc_feature (9)..(167): Homolog of NCBI NO: 543936 NR Description: CALTRACTIN (CENTRIN)
  misc_feature (1)..(167): Homolog of NCBI NO: 2920835 NR Description: centrin [Marsilea vestita]
  misc_feature (2)..(165): Homolog of NCBI NO: 21554823 NR Description: caltractin-like protein [Arabidopsis thaliana]
  misc_feature (2)..(165): Homolog of NCBI NO: 15234588 NR Description: caltractin (centrin), putative [Arabidopsis
  misc_feature (3)..(169): Homolog of NCBI NO: 33146874 NR Description: putative caltractin [Oryza sativa (japonica
  misc_feature (1)..(169): Homolog of NCBI NO: 34906754 NR Description: putative caltractin [Oryza sativa (japonica
  misc_feature (1)..(164): Homolog of NCBI NO: 6358511 NR Description: centrin [Nicotiana tabacum]
  misc_feature (1)..(165): Homolog of NCBI NO: 6358509 NR Description: centrin [Nicotiana tabacum]
  misc_feature (1)..(169): Homolog of NCBI NO: 729051 NR Description: CALTRACTIN (CENTRIN)
  misc_feature (1)..(165): Homolog of NCBI NO: 15229732 NR Description: caltractin (centrin) [Arabidopsis thaliana]
MSSLYRGVSRKEKPRRHHGLNQQKRQEIKEAFDLFDTDGSGTIDAKELNVAMRALGFEMTEEQIEKMIADVDKDGSGAIDYDEFYHMMTAKIGERDTKEELTKAFKIIDLDNNGKISADDIKRMAKDLGENFTDAEIREMVEEADRDRDGEVNMEEFMRMMKRTAAYEY

SEQ ID NO: 110262 - protein, 118 aa, Zea mays subsp. mays
  misc_feature (1)..(118): Ceres Seq. ID no. 15174299
  misc_feature (85)..(113): Pfam Name: EF hand Pfam Description: EF hand
  misc_feature (1)..(116): Homolog of NCBI NO: 543936 NR Description: CALTRACTIN (CENTRIN)
  misc_feature (1)..(116): Homolog of NCBI NO: 2920835 NR Description: centrin [Marsilea vestita]
  misc_feature (1)..(114): Homolog of NCBI NO: 21554823 NR Description: caltractin-like protein [Arabidopsis thaliana]
  misc_feature (1)..(114): Homolog of NCBI NO: 15234588 NR Description: caltractin (centrin), putative [Arabidopsis
  misc_feature (1)..(118): Homolog of NCBI NO: 33146874 NR Description: putative caltractin [Oryza sativa (japonica
  misc_feature (1)..(118): Homolog of NCBI NO: 34906754 NR Description: putative caltractin [Oryza sativa (japonica
  misc_feature (1)..(113): Homolog of NCBI NO: 6358511 NR Description: centrin [Nicotiana tabacum]
  misc_feature (1)..(114): Homolog of NCBI NO: 6358509 NR Description: centrin [Nicotiana tabacum]
  misc_feature (1)..(118): Homolog of NCBI NO: 729051 NR Description: CALTRACTIN (CENTRIN)
  misc_feature (1)..(114): Homolog of NCBI NO: 15229732 NR Description: caltractin (centrin) [Arabidopsis thaliana]
MRALGFEMTEEQIEKMIADVDKDGSGAIDYDEFYHMMTAKIGERDTKEELTKAFKIIDLDNNGKISADDIKRMAKDLGENFTDAEIREMVEEADRDRDGEVNMEEFMRMMKRTAAYEY

SEQ ID NO: 110263 - protein, 111 aa, Zea mays subsp. mays
  misc_feature (1)..(111): Ceres Seq. ID no. 15174300
  misc_feature (78)..(106): Pfam Name: EF hand Pfam Description: EF hand
  misc_feature (1)..(109): Homolog of NCBI NO: 543936 NR Description: CALTRACTIN (CENTRIN)
  misc_feature (1)..(109): Homolog of NCBI NO: 2920835 NR Description: centrin [Marsilea vestita]
  misc_feature (1)..(107): Homolog of NCBI NO: 21554823 NR Description: caltractin-like protein [Arabidopsis thaliana]
  misc_feature (1)..(107): Homolog of NCBI NO: 15234588 NR Description: caltractin (centrin), putative [Arabidopsis
  misc_feature (1)..(111): Homolog of NCBI NO: 33146874 NR Description: putative caltractin [Oryza sativa (japonica
  misc_feature (1)..(111): Homolog of NCBI NO: 34906754 NR Description: putative caltractin [Oryza sativa (japonica
  misc_feature (1)..(106): Homolog of NCBI NO: 6358511 NR Description: centrin [Nicotiana tabacum]
  misc_feature (1)..(107): Homolog of NCBI NO: 6358509 NR Description: centrin [Nicotiana tabacum]
  misc_feature (1)..(111): Homolog of NCBI NO: 729051 NR Description: CALTRACTIN (CENTRIN)
  misc_feature (1)..(107): Homolog of NCBI NO: 15229732 NR Description: caltractin (centrin) [Arabidopsis thaliana]
MTEEQIEKMIADVDKDGSGAIDYDEFYHMMTAKIGERDTKEELTKAFKIIDLDNNGKISADDIKRMAKDLGENFTDAEIREMVEEADRDRDGEVNMEEFMRMMKRTAAYEY

SEQ ID NO: 110264 - DNA, 705 bp, Zea mays subsp. mays
  misc_feature (1)..(705): Ceres Seq. ID no. 15178899
gcaagcgatttcgagaagaagctaaaaaaaatggcgtcaacacgtctcttcgttctctactgcttcttcttcgtcttctcaatcatcttctccgtttccgaatctaaagccttgcagcctcacgccgccgagtctttcaacgtcagcctcatccagaaactgaggagtagttgctcgtacacagtgatcatctcgacgagctgttcgtcgtcgaggtacacgcgcgaccaaatcagcgtggccttcggcgatgcatacggtaaccagatatacgcaccaaggcttgacgatccatccacaaagactttcgagcaatgttcatccgacacgttcgagataaacggaccatgcacttaccagatctgctacgtctatctctacaggtctggtcccgatggctggatccccgagagtgttaagataaacacacatggctccaaagccgtcaccttcccttataacaccctcgtccccgagagtatatggtacggtttcaattactgcaacagcgcctcgggttctagtgtcctatccattggtcttgtccttctggggtttgttgtcgccggttcaacattgcttttgtaaaatggttggtttgtgtgaacatattaggacttaatgctgaataaatgtgtaaaaactgttggggttctagagatgtccctattatctgtgtaatctatgatgaagttactacctgct

SEQ ID NO: 110265 - protein, 195 aa, Zea mays subsp. mays
  misc_feature (1)..(195): Ceres Seq. ID no. 15178900
  misc_feature (41)..(168): Pfam Name: Embryo-specific protein 3, (ATS3) Pfam Description: Embryo-specific protein 3, (ATS3)
  misc_feature (33)..(175): Homolog of NCBI NO: 34910236 NR Description: OSJNBa0089K24.2 [Oryza sativa (japonica
  misc_feature (45)..(175): Homolog of NCBI NO: 15240721 NR Description: embryo-specific protein 3 (ATS3) [Arabidopsis
  misc_feature (45)..(175): Homolog of NCBI NO: 13877521 NR Description: embryo-specific protein 3; ATS3 [Arabidopsis
  misc_feature (45)..(175): Homolog of NCBI NO: 3335171 NR Description: embryo-specific protein 3 [Arabidopsis thaliana]
  misc_feature (57)..(170): Homolog of NCBI NO: 26450767 NR Description: embryo-specific protein like [Arabidopsis
  misc_feature (57)..(170): Homolog of NCBI NO: 15241758 NR Description: embryo-specific protein - like [Arabidopsis
  misc_feature (16)..(169): Homolog of NCBI NO: 15227355 NR Description: hypothetical protein [Arabidopsis thaliana]
  misc_feature (11)..(195): Homolog of NCBI NO: 15241727 NR Description: expressed protein [Arabidopsis thaliana]
  misc_feature (11)..(195): Homolog of NCBI NO: 8809633 NR Description: contains similarity to embryo-specific protein
ASDFEKKLKKMASTRLFVLYCFFFVFSIIFSVSESKALQPHAAESFNVSLIQKLRSSCSYTVIISTSCSSSRYTRDQISVAFGDAYGNQIYAPRLDDPSTKTFEQCSSDTFEINGPCTYQICYVYLYRSGPDGWIPESVKINTHGSKAVTFPYNTLVPESIWYGFNYCNSASGSSVLSIGLVLLGFVVAGSTLLL

SEQ ID NO: 110266 - protein, 185 aa, Zea mays subsp. mays
  misc_feature (1)..(185): Ceres Seq. ID no. 15178901
  misc_feature (31)..(158): Pfam Name: Embryo-specific protein 3, (ATS3) Pfam Description: Embryo-specific protein 3, (ATS3)
  misc_feature (23)..(165): Homolog of NCBI NO: 34910236 NR Description: OSJNBa0089K24.2 [Oryza sativa (japonica
  misc_feature (35)..(165): Homolog of NCBI NO: 15240721 NR Description: embryo-specific protein 3 (ATS3) [Arabidopsis
  misc_feature (35)..(165): Homolog of NCBI NO: 13877521 NR Description: embryo-specific protein 3; ATS3 [Arabidopsis
  misc_feature (35)..(165): Homolog of NCBI NO: 3335171 NR Description: embryo-specific protein 3 [Arabidopsis thaliana]
  misc_feature (47)..(160): Homolog of NCBI NO: 26450767 NR Description: embryo-specific protein like [Arabidopsis
  misc_feature (47)..(160): Homolog of NCBI NO: 15241758 NR Description: embryo-specific protein - like [Arabidopsis
  misc_feature (6)..(159): Homolog of NCBI NO: 15227355 NR Description: hypothetical protein [Arabidopsis thaliana]
  misc_feature (1)..(185): Homolog of NCBI NO: 15241727 NR Description: expressed protein [Arabidopsis thaliana]
  misc_feature (1)..(185): Homolog of NCBI NO: 8809633 NR Description: contains similarity to embryo-specific protein
MASTRLFVLYCFFFVFSIIFSVSESKALQPHAAESFNVSLIQKLRSSCSYTVIISTSCSSSRYTRDQISVAFGDAYGNQIYAPRLDDPSTKTFEQCSSDTFEINGPCTYQICYVYLYRSGPDGWIPESVKINTHGSKAVTFPYNTLVPESIWYGFNYCNSASGSSVLSIGLVLLGFVVAGSTLLL

SEQ ID NO: 110267 - DNA, 817 bp, Zea mays subsp. mays
  misc_feature (1)..(817): Ceres Seq. ID no. 15176828
ctcgtccagggatcatcatgatttgattggcaacttaaccagaatcaatgatgaatgacctgagcaaatacaggtcaattttcactagattctattttcttggggaaatcaagtttctctgagacggttatcttccctatcatctgaaagtccctgagactttcgccgctctcatctctctctctcggttcgggtatgactcgtcacgtgatactgacatcagaagaaagaaactctccaccgaccacgatgatcaaacacgcggagaggaggaaggtgggagaggtagccggaggagccgcagctgagtgtgcggccgtgtggtgttgcggtccttgcgccgtggttaacctagttgttctcgctgtgtatagagttcccgcggccgtttgtaagaaagcttggcgacaaaccaaacggcaacgttttatgaggagacgacacggtttacttgcgtcagcggctgccgagagcaccgtgcacgctagactaaaggaggaagatccaacggctgaaattgttttcgaagaaaatgtagtgaatgtcgagttaaacgacgtcgtcgtgcttgaggatgagatgtttgaacgtttctatggggcaggattttggagaagcccgtcacagagggacacatcatcaggaagtatatgatttctttgtgaaaatattaataattaatttgatttatatgtgattctttaaaattatcatgcgggtatgtgaataggagaaatgtagtaatatttatacattgttcgtttttgtttcgttcgatttaaatataactacgtctcaattgggatttggggtggct

SEQ ID NO: 110268 - protein, 152 aa, Zea mays subsp. mays
  misc_feature (1)..(152): Ceres Seq. ID no. 15176829
  misc_feature (1)..(148): Homolog of NCBI NO: 322884 NR Description: pollen-preferential protein - trumpet lily
  misc_feature (30)..(149): Homolog of NCBI NO: 15240027 NR Description: hypothetical protein [Arabidopsis thaliana]
  misc_feature (122)..(149): Homolog of NCBI NO: 18399317 NR Description: expressed protein [Arabidopsis thaliana]
  misc_feature (30)..(86): Homolog of NCBI NO: 18399317 NR Description: expressed protein [Arabidopsis thaliana]
  misc_feature (68)..(152): Homolog of NCBI NO: 25370727 NR Description: hypothetical protein At2g27180 [imported] -
  misc_feature (12)..(152): Homolog of NCBI NO: 21617979 NR Description: unknown [Arabidopsis thaliana]
  misc_feature (1)..(152): Homolog of NCBI NO: 18401348 NR Description: expressed protein [Arabidopsis thaliana]
MTRHVILTSEERNSPPTTMIKHAERRKVGEVAGGAAAECAAVWCCGPCAVVNLVVLAVYRVPAAVCKKAWRQTKRQRFMRRRHGLLASAAAESTVHARLKEEDPTAEIVFEENVVNVELNDVVVLEDEMFERFYGAGFWRSPSQRDTSSGSI

SEQ ID NO: 110269 - protein, 134 aa, Zea mays subsp. mays
  misc_feature (1)..(134): Ceres Seq. ID no. 15176830
  misc_feature (1)..(130): Homolog of NCBI NO: 322884 NR Description: pollen-preferential protein - trumpet lily
  misc_feature (12)..(131): Homolog of NCBI NO: 15240027 NR Description: hypothetical protein [Arabidopsis thaliana]
  misc_feature (104)..(131): Homolog of NCBI NO: 18399317 NR Description: expressed protein [Arabidopsis thaliana]
  misc_feature (12)..(68): Homolog of NCBI NO: 18399317 NR Description: expressed protein [Arabidopsis thaliana]
  misc_feature (50)..(134): Homolog of NCBI NO: 25370727 NR Description: hypothetical protein At2g27180 [imported] -
  misc_feature (1)..(134): Homolog of NCBI NO: 21617979 NR Description: unknown [Arabidopsis thaliana]
  misc_feature (1)..(134): Homolog of NCBI NO: 18401348 NR Description: expressed protein [Arabidopsis thaliana]
MIKHAERRKVGEVAGGAAAECAAVWCCGPCAVVNLVVLAVYRVPAAVCKKAWRQTKRQRFMRRRHGLLASAAAESTVHARLKEEDPTAEIVFEENVVNVELNDVVVLEDEMFERFYGAGFWRSPSQRDTSSGSI

SEQ ID NO: 110270 - DNA, 748 bp, Zea mays subsp. mays
  misc_feature (1)..(748): Ceres Seq. ID no. 15177492
aacaatattatctcaaagctaaccaacaatggcgttcccaaaggtgttcttcgacataaacatcaacggccaggcagcgggaaggatcgtgatggagttgtatacggataagacgccgaagacggctgagaatttcagagctctgtgcactggagagaagggagtggggcgtaagggaaagcccctccacttcaagggatcttccttccaccgagtgatccccagtttcatgtgccagggaggtgatttcaccgcgggaaacgggacaggaggtgagtccatctacggtgataagttcgaggacgagaactttgagaggaagcacacgggtcctggcaacctttccatggcgaacgccggagccaacaccaacggatctcagttcttcatctgcaccgtaaaaaccgattggcttgacggtaagcacgtggtgttcgggcaggtggtggaagggttagacgtggtgaaggcgatcgagaaggtgggatcgtcgtctggaaagccgtcgaagccggtggttatcgccgattgtggacagctctcttagatagatctctctcatctatcctcattttaaattatagcgtcagcgtccttgtcctatatatgttatgtatgtttggtgtctcgtttgtatgtgtagtcataatcttggtgtgtattctcatgacagtcttttggattgccagagagaaactcgtcaccctaattacctactaccataaataaatattgaacatcttgcagt

SEQ ID NO: 110271 - protein, 172 aa, Zea mays subsp. mays
  misc_feature (1)..(172): Ceres Seq. ID no. 15177493
  misc_feature (4)..(172): Homolog of NCBI NO: 21886603 NR Description: peptidylprolyl isomerase (cyclophilin) [Betula
  misc_feature (4)..(172): Homolog of NCBI NO: 15227259 NR Description: cytosolic cyclophilin (ROC3) [Arabidopsis
  misc_feature (4)..(172): Homolog of NCBI NO: 11270324 NR Description: peptidylprolyl isomerase (EC 5.2.1.8) CYP2
  misc_feature (4)..(172): Homolog of NCBI NO: 15226467 NR Description: cyclophilin (CYP2) [Arabidopsis thaliana]
  misc_feature (1)..(172): Homolog of NCBI NO: 15234781 NR Description: peptidylprolyl isomerase ROC1 [Arabidopsis
MAFPKVFFDININGQAAGRIVMELYTDKTPKTAENFRALCTGEKGVGRKGKPLHFKGSSFHRVIPSFMCQGGDFTAGNGTGGESIYGDKFEDENFERKHTGPGNLSMANAGANTNGSQFFICTVKTDWLDGKHVVFGQVVEGLDVVKAIEKVGSSSGKPSKPVVIADCGQLS

SEQ ID NO: 110272 - protein, 151 aa, Zea mays subsp. mays
  misc_feature (1)..(151): Ceres Seq. ID no. 15177494
  misc_feature (1)..(151): Homolog of NCBI NO: 21886603 NR Description: peptidylprolyl isomerase (cyclophilin) [Betula
  misc_feature (1)..(151): Homolog of NCBI NO: 15227259 NR Description: cytosolic cyclophilin (ROC3) [Arabidopsis
  misc_feature (1)..(151): Homolog of NCBI NO: 11270324 NR Description: peptidylprolyl isomerase (EC 5.2.1.8) CYP2
  misc_feature (1)..(151): Homolog of NCBI NO: 15226467 NR Description: cyclophilin (CYP2) [Arabidopsis thaliana]
  misc_feature (1)..(151): Homolog of NCBI NO: 15234781 NR Description: peptidylprolyl isomerase ROC1 [Arabidopsis
MELYTDKTPKTAENFRALCTGEKGVGRKGKPLHFKGSSFHRVIPSFMCQGGDFTAGNGTGGESIYGDKFEDENFERKHTGPGNLSMANAGANTNGSQFFICTVKTDWLDGKHVVFGQVVEGLDVVKAIEKVGSSSGKPSKPVVIADCGQLS

SEQ ID NO: 110273 - protein, 105 aa, Zea mays subsp. mays
  misc_feature (1)..(105): Ceres Seq. ID no. 15177495
  misc_feature (1)..(105): Homolog of NCBI NO: 21886603 NR Description: peptidylprolyl isomerase (cyclophilin) [Betula
  misc_feature (1)..(105): Homolog of NCBI NO: 15227259 NR Description: cytosolic cyclophilin (ROC3) [Arabidopsis
  misc_feature (1)..(105): Homolog of NCBI NO: 11270324 NR Description: peptidylprolyl isomerase (EC 5.2.1.8) CYP2
  misc_feature (1)..(105): Homolog of NCBI NO: 15226467 NR Description: cyclophilin (CYP2) [Arabidopsis thaliana]
  misc_feature (1)..(105): Homolog of NCBI NO: 15234781 NR Description: peptidylprolyl isomerase ROC1 [Arabidopsis
MCQGGDFTAGNGTGGESIYGDKFEDENFERKHTGPGNLSMANAGANTNGSQFFICTVKTDWLDGKHVVFGQVVEGLDVVKAIEKVGSSSGKPSKPVVIADCGQLS

SEQ ID NO: 110274 - DNA, 1955 bp, Zea mays subsp. mays
  misc_feature (1)..(1955): Ceres Seq. ID no. 15179432
atttgatttcgctcagaaaagtagaaaacgccagccgaacacaccggtccgccgcccacgccagcgctgagctcaccaggaaaccgtcttcttccactggcgcgggctaggagcgtcgccgccgcgtcgcggttatgggtacggcggctgtcgtggaggacacgatacgcgtcgtcctcacctgcctccctgctccgcccttccgcaccaccggttcctcccgtccctaccagagtcccagcggcggcggcggcggcggggaccgcatcagccgcctctcagacgcggtgctctctaacatcgtggcgcgtctccccgccaaggacgcagcgcgcactaccgcgctctccaggcgctggcgccgcgtctgggcctccactccactcgtcctcgacgactccgacctcctcgtcttccacgacgacggcggctgctctacgcccaactggttagccgtcacagacaccgtgtcccacgtcctctcctcccacagggggcccatccgctttgtgcgcctcacctgctgctacatggcgctggcctcgcacaacggcgcgctccagtactggctccgggtcctcgctgcggggggagtcgaggatctcgtcctcgtcaaccgcccattacccacctccgtgggcctccccatcgacgtcctccacctcgcctccctccgcaccctctacctcggtttctggtgcttcccggacaccgccgccctcccgcgaggccgcgccaccgtgttcccctgcctccaggagattggactctgcgctaccgtcatccacgccagggacatcgactacctgctcgcctgcagccccgtgctcgagaagttcgccagcatcaccagcatctacttcacagaccctgtccggatccgcagctgcagcctccggtgccttgtcttctgggagtccctggccaatgagctcgacctggtcgtcgccccgcgcctccagcgcctaatcctgtggcagtcgcgccaatggatgatcggctccgtccatttccgcagcaggatcaggattggctccgccaccgaactcaaggtgctcggctacctggagccaagcatccaccagctcgagattggcggcaccataattgatagtggaacaaagatgaccccatctaacatggttccaagtgtcaagatcttggccttgaagatgcagttcagaatccgcaaggaagtcaagatgctgcccaccttcctgagatgctttcccaatgtggagacattgcatgttctgtcacatgaaactgatgagcaaaatggcaagttcaatttgaagttctgggaggaggttggctccatcagctgcctagagacacgcatcaccaaggtggtgtttgacaaattcagaggagagcgttgtgagctcgcgttcctcaagttcgtcctagagagggcagaatcgctgctgaagcttgtggttgtattggccaatggagatcaagcctcagtggatgagatgcttgccaagttgaagtctctgaccacggtgaaacgagccagcgatttccctactctgttggcagttgcccgtgagggtgacagcgcctggtactttgagagagcatccgatctttctgttactgaccccttcaatttgtgaagctcaaggcgatgacatattccatgaccaattctattgttctcctgagccaatcagttgttctttgtcattcagggtatacttgctaggcattccctagaatcttgtctcgtcttgtgttgactgtaaatgtgagtacagttctgagtgaatcaggagaggtatatagtttatggaaagcgctgcttgacatttcactattgaaaatataggttctgcatagctgctcttgagttgactacttccaaatgttgtcactggctagtttctcagttgtgatgtactgcatactgggcatagttggaactggaaaatatcatattggtaaccccg

SEQ ID NO: 110275 - protein, 495 aa, Zea mays subsp. mays
  misc_feature (1)..(495): Ceres Seq. ID no. 15179433
  misc_feature (45)..(90): Pfam Name: F-box domain Pfam Description: F-box domain
  misc_feature (39)..(437): Homolog of NCBI NO: 38347598 NR Description: OSJNBa0042I15.11 [Oryza sativa (japonica
  misc_feature (29)..(280): Homolog of NCBI NO: 15290059 NR Description: putative ribosomal RNA apurinic site specific
  misc_feature (89)..(493): Homolog of NCBI NO: 15290059 NR Description: putative ribosomal RNA apurinic site specific
  misc_feature (41)..(494): Homolog of NCBI NO: 20521325 NR Description: putative ribosomal RNA apurinic site specific
  misc_feature (9)..(493): Homolog of NCBI NO: 20521321 NR Description: putative ribosomal RNA apurinic site specific
  misc_feature (12)..(494): Homolog of NCBI NO: 20521319 NR Description: putative ribosomal RNA apurinic site specific
  misc_feature (7)..(493): Homolog of NCBI NO: 38346010 NR Description: OSJNBa0035O13.12 [Oryza sativa (japonica
  misc_feature (9)..(493): Homolog of NCBI NO: 34912334 NR Description: putative ribosomal RNA apurinic site specific
  misc_feature (7)..(494): Homolog of NCBI NO: 34912330 NR Description: putative ribosomal RNA apurinic site specific
  misc_feature (7)..(494): Homolog of NCBI NO: 34912332 NR Description: putative ribosomal RNA apurinic site specific
MGTAAVVEDTIRVVLTCLPAPPFRTTGSSRPYQSPSGGGGGGDRISRLSDAVLSNIVARLPAKDAARTTALSRRWRRVWASTPLVLDDSDLLVFHDDGGCSTPNWLAVTDTVSHVLSSHRGPIRFVRLTCCYMALASHNGALQYWLRVLAAGGVEDLVLVNRPLPTSVGLPIDVLHLASLRTLYLGFWCFPDTAALPRGRATVFPCLQEIGLCATVIHARDIDYLLACSPVLEKFASITSIYFTDPVRIRSCSLRCLVFWESLANELDLVVAPRLQRLILWQSRQWMIGSVHFRSRIRIGSATELKVLGYLEPSIHQLEIGGTIIDSGTKMTPSNMVPSVKILALKMQFRIRKEVKMLPTFLRCFPNVETLHVLSHETDEQNGKFNLKFWEEVGSISCLETRITKVVFDKFRGERCELAFLKFVLERAESLLKLVVVLANGDQASVDEMLAKLKSLTTVKRASDFPTLLAVAREGDSAWYFERASDLSVTDPFNL

SEQ ID NO: 110276 - protein, 363 aa, Zea mays subsp. mays
  misc_feature (1)..(363): Ceres Seq. ID no. 15179434
  misc_feature (1)..(305): Homolog of NCBI NO: 38347598 NR Description: OSJNBa0042I15.11 [Oryza sativa (japonica
  misc_feature (1)..(148): Homolog of NCBI NO: 15290059 NR Description: putative ribosomal RNA apurinic site specific
  misc_feature (1)..(361): Homolog of NCBI NO: 15290059 NR Description: putative ribosomal RNA apurinic site specific
  misc_feature (1)..(362): Homolog of NCBI NO: 20521325 NR Description: putative ribosomal RNA apurinic site specific
  misc_feature (1)..(361): Homolog of NCBI NO: 20521321 NR Description: putative ribosomal RNA apurinic site specific
  misc_feature (1)..(362): Homolog of NCBI NO: 20521319 NR Description: putative ribosomal RNA apurinic site specific
  misc_feature (1)..(361): Homolog of NCBI NO: 38346010 NR Description: OSJNBa0035O13.12 [Oryza sativa (japonica
  misc_feature (1)..(361): Homolog of NCBI NO: 34912334 NR Description: putative ribosomal RNA apurinic site specific
  misc_feature (1)..(362): Homolog of NCBI NO: 34912330 NR Description: putative ribosomal RNA apurinic site specific
  misc_feature (1)..(362): Homolog of NCBI NO: 34912332 NR Description: putative ribosomal RNA apurinic site specific
MALASHNGALQYWLRVLAAGGVEDLVLVNRPLPTSVGLPIDVLHLASLRTLYLGFWCFPDTAALPRGRATVFPCLQEIGLCATVIHARDIDYLLACSPVLEKFASITSIYFTDPVRIRSCSLRCLVFWESLANELDLVVAPRLQRLILWQSRQWMIGSVHFRSRIRIGSATELKVLGYLEPSIHQLEIGGTIIDSGTKMTPSNMVPSVKILALKMQFRIRKEVKMLPTFLRCFPNVETLHVLSHETDEQNGKFNLKFWEEVGSISCLETRITKVVFDKFRGERCELAFLKFVLERAESLLKLVVVLANGDQASVDEMLAKLKSLTTVKRASDFPTLLAVAREGDSAWYFERASDLSVTDPFNL

SEQ ID NO: 110277 - DNA, 1966 bp, Zea mays subsp. mays
  misc_feature (1)..(1966): Ceres Seq. ID no. 15175523
agctatcgcctattccttccctccctcgcattccggcaggctccgcaaacgtccgtgcgcccccgcgtcgccgcttcctccgtcccttccgttctcggcgaatcgaatccgctagcccccgacatttatggctgccgcgttaactcgcctccgatccgccgtcgagcggctcgggccttcccgcgcccgcgccttctcatcagccgctgctgaggccggggctgcgggaccgtgcagcgactctagggctttcgccgcggcctcggtggccgccggctcaggtctcgggatctggctgctgtcctcgaacccgcagccactcacagagtccggccaggcggaggatgccgccaccgcgggaggtggaggcaacagggccttctccgcagcttttggcggtgtcggagccaccggggagcgggagggcatgtttctgttcggagattcatatcgccgaagggtgttcttcaagtacgagaagaggattaggacgcgcagccctccagagaagatctttgagtacttcgcatccgtccacagcccagagggtgagatgtacatgttacctaccgacctgatgagggcggttgttcctgttttcccctcatctgagtccaaaaatgtcagggaagggagattgaagggggagcgccaccctggcgagctacaatgtgctccatctgagtttttcatgctattcgatacaaatggtgatggtgtcatctccttttctgagtatatcttctttgtaacattacttagtatccctgaatcaagcttccatgtggcttttaagatgtttgaccttgaccacaatggggaaattgacaaagacgagtttaggaaagtgatgacactgatgcgatcctataatagacaaggagctgcccatagggatggtttacgctttggacgcaaggttggtcagccagtggaaaatggtggactggtcgaatacttctttggcaaggatgggaatgaacatctacactatgataagttctctagttttttgaagaaattgcatgatgagattgtccgcttggagtttagtcactacgatgtgaaatcatccaacacaatacctgttaaggactttgcgttatccatggttgcttctgctgatatgatttacatagacaagttactggatagagttgaggatttggacgacaatcttgacctcaaggatctgcgtattacctttgaggagttcaaggcatttgctgatcttcgaagaaggttggaaccatttagaatggctatcttcagctacggcaaagtaaatggtctgttgacgaagcaggatctaaaacgtgccgcatcacatgtttgtggagtggacttgactgataaagtagtagacataattttccatgtgtttgatgctaactgtgatggtaacctgagttcagaggagttcctgaggtcattacaaagaagagaaagtgatattcgccagccagcaacgtcaggtttcctaggggtgatcgcctgttggctgaactgtacaaagtgttctcttcaacagatgctgtcccagtagattcttttttgacgctcatgacagtcttcagttgcccttggttgctctgtgcttattgagctggagaacgtcatcggggagttctgaagtgtgaagaggatttttgttgtaaatattaccctgcggcccctgcttagtagctcctacgttaccacgtagcagctgtaacctgtaaggaattccttccgttctcgttcaagggcttcgatgacatacatcttctcccctgacattaaatctccgtcgacttagctggagccttgctacctatcttgcttttagctcatccctgatgctaatattctgtggattgtggttgaacaatcacacttgtaagactagcttgggaatactatttttctaagagattttcaattttccaaggaaaaataaactaattttctttggaaatttcaaacg

SEQ ID NO: 110278 - protein, 472 aa, Zea mays subsp. mays
  misc_feature (1)..(472): Ceres Seq. ID no. 15175524
  misc_feature (183)..(211): Pfam Name: EF hand Pfam Description: EF hand
  misc_feature (108)..(463): Homolog of NCBI NO: 31238870 NR Description: ENSANGP00000005253 [Anopheles gambiae]
  misc_feature (108)..(463): Homolog of NCBI NO: 17543982 NR Description: calcium binding atopy-related autoantigen 1 like
  misc_feature (108)..(463): Homolog of NCBI NO: 13278855 NR Description: calcium binding atopy-related autoantigen 1 [Homo
  misc_feature (108)..(463): Homolog of NCBI NO: 39587689 NR Description: Hypothetical protein CBG01795 [Caenorhabditis
  misc_feature (108)..(463): Homolog of NCBI NO: 19920872 NR Description: CG4495-PA [Drosophila melanogaster]
  misc_feature (31)..(463): Homolog of NCBI NO: 26346488 NR Description: unnamed protein product [Mus musculus]
  misc_feature (31)..(463): Homolog of NCBI NO: 21450201 NR Description: calcium binding atopy-related autoantigen 1 [Mus
  misc_feature (41)..(463): Homolog of NCBI NO: 40786511 NR Description: calcium binding atopy-related autoantigen 1
  misc_feature (102)..(465): Homolog of NCBI NO: 15236653 NR Description: calcium-binding EF-hand family protein
  misc_feature (2)..(470): Homolog of NCBI NO: 38345151 NR Description: OSJNBa0014K14.5 [Oryza sativa (japonica
MAAALTRLRSAVERLGPSRARAFSSAAAEAGAAGPCSDSRAFAAASVAAGSGLGIWLLSSNPQPLTESGQAEDAATAGGGGNRAFSAAFGGVGATGEREGMFLFGDSYRRRVFFKYEKRIRTRSPPEKIFEYFASVHSPEGEMYMLPTDLMRAVVPVFPSSESKNVREGRLKGERHPGELQCAPSEFFMLFDTNGDGVISFSEYIFFVTLLSIPESSFHVAFKMFDLDHNGEIDKDEFRKVMTLMRSYNRQGAAHRDGLRFGRKVGQPVENGGLVEYFFGKDGNEHLHYDKFSSFLKKLHDEIVRLEFSHYDVKSSNTIPVKDFALSMVASADMIYIDKLLDRVEDLDDNLDLKDLRITFEEFKAFADLRRRLEPFRMAIFSYGKVNGLLTKQDLKRAASHVCGVDLTDKVVDIIFHVFDANCDGNLSSEEFLRSLQRRESDIRQPATSGFLGVIACWLNCTKCSLQQMLSQ

SEQ ID NO: 110279 - protein, 372 aa, Zea mays subsp. mays
  misc_feature (1)..(372): Ceres Seq. ID no. 15175525
  misc_feature (83)..(111): Pfam Name: EF hand Pfam Description: EF hand
  misc_feature (8)..(363): Homolog of NCBI NO: 31238870 NR Description: ENSANGP00000005253 [Anopheles gambiae]
  misc_feature (8)..(363): Homolog of NCBI NO: 17543982 NR Description: calcium binding atopy-related autoantigen 1 like
  misc_feature (8)..(363): Homolog of NCBI NO: 13278855 NR Description: calcium binding atopy-related autoantigen 1 [Homo
  misc_feature (8)..(363): Homolog of NCBI NO: 39587689 NR Description: Hypothetical protein CBG01795 [Caenorhabditis
  misc_feature (8)..(363): Homolog of NCBI NO: 19920872 NR Description: CG4495-PA [Drosophila melanogaster]
  misc_feature (1)..(363): Homolog of NCBI NO: 26346488 NR Description: unnamed protein product [Mus musculus]
  misc_feature (1)..(363): Homolog of NCBI NO: 21450201 NR Description: calcium binding atopy-related autoantigen 1 [Mus
  misc_feature (1)..(363): Homolog of NCBI NO: 40786511 NR Description: calcium binding atopy-related autoantigen 1
  misc_feature (2)..(365): Homolog of NCBI NO: 15236653 NR Description: calcium-binding EF-hand family protein
  misc_feature (1)..(370): Homolog of NCBI NO: 38345151 NR Description: OSJNBa0014K14.5 [Oryza sativa (japonica
MFLFGDSYRRRVFFKYEKRIRTRSPPEKIFEYFASVHSPEGEMYMLPTDLMRAVVPVFPSSESKNVREGRLKGERHPGELQCAPSEFFMLFDTNGDGVISFSEYIFFVTLLSIPESSFHVAFKMFDLDHNGEIDKDEFRKVMTLMRSYNRQGAAHRDGLRFGRKVGQPVENGGLVEYFFGKDGNEHLHYDKFSSFLKKLHDEIVRLEFSHYDVKSSNTIPVKDFALSMVASADMIYIDKLLDRVEDLDDNLDLKDLRITFEEFKAFADLRRRLEPFRMAIFSYGKVNGLLTKQDLKRAASHVCGVDLTDKVVDIIFHVFDANCDGNLSSEEFLRSLQRRESDIRQPATSGFLGVIACWLNCTKCSLQQMLSQ

SEQ ID NO: 110280 - protein, 330 aa, Zea mays subsp. mays
  misc_feature (1)..(330): Ceres Seq. ID no. 15175526
  misc_feature (41)..(69): Pfam Name: EF hand Pfam Description: EF hand
  misc_feature (1)..(321): Homolog of NCBI NO: 31238870 NR Description: ENSANGP00000005253 [Anopheles gambiae]
  misc_feature (1)..(321): Homolog of NCBI NO: 17543982 NR Description: calcium binding atopy-related autoantigen 1 like
  misc_feature (1)..(321): Homolog of NCBI NO: 13278855 NR Description: calcium binding atopy-related autoantigen 1 [Homo
  misc_feature (1)..(321): Homolog of NCBI NO: 39587689 NR Description: Hypothetical protein CBG01795 [Caenorhabditis
  misc_feature (1)..(321): Homolog of NCBI NO: 19920872 NR Description: CG4495-PA [Drosophila melanogaster]
  misc_feature (1)..(321): Homolog of NCBI NO: 26346488 NR Description: unnamed protein product [Mus musculus]
  misc_feature (1)..(321): Homolog of NCBI NO: 21450201 NR Description: calcium binding atopy-related autoantigen 1 [Mus
  misc_feature (1)..(321): Homolog of NCBI NO: 40786511 NR Description: calcium binding atopy-related autoantigen 1
  misc_feature (1)..(323): Homolog of NCBI NO: 15236653 NR Description: calcium-binding EF-hand family protein
  misc_feature (1)..(328): Homolog of NCBI NO: 38345151 NR Description: OSJNBa0014K14.5 [Oryza sativa (japonica
MYMLPTDLMRAVVPVFPSSESKNVREGRLKGERHPGELQCAPSEFFMLFDTNGDGVISFSEYIFFVTLLSIPESSFHVAFKMFDLDHNGEIDKDEFRKVMTLMRSYNRQGAAHRDGLRFGRKVGQPVENGGLVEYFFGKDGNEHLHYDKFSSFLKKLHDEIVRLEFSHYDVKSSNTIPVKDFALSMVASADMIYIDKLLDRVEDLDDNLDLKDLRITFEEFKAFADLRRRLEPFRMAIFSYGKVNGLLTKQDLKRAASHVCGVDLTDKVVDIIFHVFDANCDGNLSSEEFLRSLQRRESDIRQPATSGFLGVIACWLNCTKCSLQQMLSQ

SEQ ID NO: 110281 - DNA, 785 bp, Zea mays subsp. mays
  misc_feature (1)..(785): Ceres Seq. ID no. 15178869
attgttgctgcacttccaccactctgattcatttcgattgagctttctctctttttcttgctatggctcgtcggtctggagattgcatgcgatgtctggtgatcttcgcggtggtatctgctttagtagtgtgtggaccagctctttattggagattcaacaaaggcttcgttggatcatccactcgtaagagctctgtttgtcctccttgcgtctgtgactgcccacctcctgtctctctcctcgagatcgctcctgggcttgcgaatctcactgttacagattgtggaggcgatgatccggagctcaagcaggaaatggagaagcagtttgtggaccttctgaccgaggagctgaagctgcaagaagcagttgctgatgagcatagccgtcatatgaacgttacactcttagaagctaagagagttgcgtctcagtaccaaaaggaagctgagaaatgcaacgccgccactgagatctgtgagtcagctagggagagagctgaagctttgttgatcaaggagaggaagatcactgctttgtgggagaagagagctcgtcaatcaggttgggaaggtgagtaaaaaactgattgtccgttctcatgacaaaccctgaagtgtttttgtctgagaaaccgaattttttcaaggaaaagtcctttatgttccacgtttctccatatatgtagtcttttgtttttgcctttggaatcgtaatgtagctaaagaatggctttggccttgtattgacttctcttcaaatatataattgttcatttctct

SEQ ID NO: 110282 - protein, 173 aa, Zea mays subsp. mays
  misc_feature (1)..(173): Ceres Seq. ID no. 15178870
  misc_feature (1)..(173): Pfam Name: Protein of unknown function (DUF1068) Pfam Description: Protein of unknown function (DUF1068)
  misc_feature (74)..(173): Homolog of NCBI NO: 15233480 NR Description: hypothetical protein [Arabidopsis thaliana]
  misc_feature (1)..(173): Homolog of NCBI NO: 18390477 NR Description: expressed protein [Arabidopsis thaliana]
  misc_feature (12)..(171): Homolog of NCBI NO: 21553781 NR Description: unknown [Arabidopsis thaliana]
  misc_feature (1)..(171): Homolog of NCBI NO: 18403016 NR Description: expressed protein [Arabidopsis thaliana]
  misc_feature (12)..(172): Homolog of NCBI NO: 27922919 NR Description: unknown protein [Phytophthora sojae]
  misc_feature (1)..(171): Homolog of NCBI NO: 38345038 NR Description: OSJNBa0029H02.22 [Oryza sativa (japonica
  misc_feature (9)..(173): Homolog of NCBI NO: 25364110 NR Description: hypothetical protein At2g24290 [imported] -
  misc_feature (1)..(173): Homolog of NCBI NO: 18400504 NR Description: expressed protein [Arabidopsis thaliana]
  misc_feature (1)..(173): Homolog of NCBI NO: 25407700 NR Description: hypothetical protein AT4g30990 [imported] -
  misc_feature (1)..(173): Homolog of NCBI NO: 18417716 NR Description: expressed protein [Arabidopsis thaliana]
MARRSGDCMRCLVIFAVVSALVVCGPALYWRFNKGFVGSSTRKSSVCPPCVCDCPPPVSLLEIAPGLANLTVTDCGGDDPELKQEMEKQFVDLLTEELKLQEAVADEHSRHMNVTLLEAKRVASQYQKEAEKCNAATEICESARERAEALLIKERKITALWEKRARQSGWEGE

SEQ ID NO: 110283 - protein, 165 aa, Zea mays subsp. mays
  misc_feature (1)..(165): Ceres Seq. ID no. 15178871
  misc_feature (1)..(165): Pfam Name: Protein of unknown function (DUF1068) Pfam Description: Protein of unknown function (DUF1068)
  misc_feature (66)..(165): Homolog of NCBI NO: 15233480 NR Description: hypothetical protein [Arabidopsis thaliana]
  misc_feature (1)..(165): Homolog of NCBI NO: 18390477 NR Description: expressed protein [Arabidopsis thaliana]
  misc_feature (4)..(163): Homolog of NCBI NO: 21553781 NR Description: unknown [Arabidopsis thaliana]
  misc_feature (1)..(163): Homolog of NCBI NO: 18403016 NR Description: expressed protein [Arabidopsis thaliana]
  misc_feature (4)..(164): Homolog of NCBI NO: 27922919 NR Description: unknown protein [Phytophthora sojae]
  misc_feature (1)..(163): Homolog of NCBI NO: 38345038 NR Description: OSJNBa0029H02.22 [Oryza sativa (japonica
  misc_feature (1)..(165): Homolog of NCBI NO: 25364110 NR Description: hypothetical protein At2g24290 [imported] -
  misc_feature (1)..(165): Homolog of NCBI NO: 18400504 NR Description: expressed protein [Arabidopsis thaliana]
  misc_feature (1)..(165): Homolog of NCBI NO: 25407700 NR Description: hypothetical protein AT4g30990 [imported] -
  misc_feature (1)..(165): Homolog of NCBI NO: 18417716 NR Description: expressed protein [Arabidopsis thaliana]
MRCLVIFAVVSALVVCGPALYWRFNKGFVGSSTRKSSVCPPCVCDCPPPVSLLEIAPGLANLTVTDCGGDDPELKQEMEKQFVDLLTEELKLQEAVADEHSRHMNVTLLEAKRVASQYQKEAEKCNAATEICESARERAEALLIKERKITALWEKRARQSGWEGE

SEQ ID NO: 110284 - protein, 88 aa, Zea mays subsp. mays
  misc_feature (1)..(88): Ceres Seq. ID no. 15178872
  misc_feature (1)..(88): Pfam Name: Protein of unknown function (DUF1068) Pfam Description: Protein of unknown function (DUF1068)
  misc_feature (1)..(88): Homolog of NCBI NO: 15233480 NR Description: hypothetical protein [Arabidopsis thaliana]
  misc_feature (1)..(88): Homolog of NCBI NO: 18390477 NR Description: expressed protein [Arabidopsis thaliana]
  misc_feature (1)..(86): Homolog of NCBI NO: 21553781 NR Description: unknown [Arabidopsis thaliana]
  misc_feature (1)..(86): Homolog of NCBI NO: 18403016 NR Description: expressed protein [Arabidopsis thaliana]
  misc_feature (1)..(87): Homolog of NCBI NO: 27922919 NR Description: unknown protein [Phytophthora sojae]
  misc_feature (1)..(86): Homolog of NCBI NO: 38345038 NR Description: OSJNBa0029H02.22 [Oryza sativa (japonica
  misc_feature (1)..(88): Homolog of NCBI NO: 25364110 NR Description: hypothetical protein At2g24290 [imported] -
  misc_feature (1)..(88): Homolog of NCBI NO: 18400504 NR Description: expressed protein [Arabidopsis thaliana]
  misc_feature (1)..(88): Homolog of NCBI NO: 25407700 NR Description: hypothetical protein AT4g30990 [imported] -
  misc_feature (1)..(88): Homolog of NCBI NO: 18417716 NR Description: expressed protein [Arabidopsis thaliana]
MEKQFVDLLTEELKLQEAVADEHSRHMNVTLLEAKRVASQYQKEAEKCNAATEICESARERAEALLIKERKITALWEKRARQSGWEGE

SEQ ID NO: 110285 - DNA, 1110 bp, Zea mays subsp. mays
  misc_feature (1)..(1110): Ceres Seq. ID no. 15178902
gtctgaaactgaaacgctctaagcaaaaatcatcaatgtcgacggaacgagaagtagtctgtgtcaccggcgcaagtggctgcatcgggtcgtggctcgtccatctgctcctcctccgcggctactccgttcacgccaccgtgaaaaacctccaggatgagaaagagacgaaacatctggaagctctcgaaggagcagccacgcgcctccatctattcgagatggatctactgaagtacgacactgtttccgccgccgtcaacggatgttccggcgttttccacctcgcatctccctgtatcgtcgacgaagtccaagatcctcagaagcaactacttgatccagcggttaaggggacattaaatgtactcacggcggcgaaagaagccggcgtgaagagggttgtggtgacgtcttccatatcggcgataaccccaagccccaactggcctgctgataagatcaagaacgaggactgttgggctgatgaagacttctgcaagcaaaatggattgtggtatccactttctaagacgcttgctaagaaggcagcttgggagtttgcagaggagaagggattagatgtggttgtggtgaatccaggaaccgtcatgggtcctgttattcctccatccatcaacgctagcatgctcatgcttcaacgcctccttgaggggtgtacagagacatacgagaacttcttcatgggttcggtgcatttcaaggatgtggcattagctcatatacttgtctatgagaacccatctgctaaaggaagacacctgtgcgttgaggccatctctcactacggtgattttgtagccaaagtagctgaactctatcctaattacagtgtccccaagttaccgagagagactcaaccgggtttactccgagccaagaacgcagcaaagaagctgatggaattggggttagagttcagttccatggaggttatcatcaaggatggtgtggagagtcttaaaagcaaaggatttatctcttaaactcatttgcttgatctagcagtgagcaaattatggtggcagcagaatcatgttatgttatatatataagactttgtaatttgaataagctgcacattgttgt

SEQ ID NO: 110286 - protein, 334 aa, Zea mays subsp. mays
  misc_feature (1)..(334): Ceres Seq. ID no. 15178903
  misc_feature (16)..(205): Pfam Name: 3-beta hydroxysteroid dehydrogenase/isomerase family Pfam Description: 3-beta hydroxysteroid dehydrogenase/isomerase
  misc_feature (12)..(334): Homolog of NCBI NO: 27465024 NR Description: dihydroflavonol reductase [Populus tremuloides]
  misc_feature (3)..(333): Homolog of NCBI NO: 25405464 NR Description: hypothetical protein F5D21.12 [imported] -
  misc_feature (12)..(333): Homolog of NCBI NO: 7431406 NR Description: probable cinnamyl-alcohol dehydrogenase (EC
  misc_feature (15)..(334): Homolog of NCBI NO: 17978649 NR Description: cinnamoyl-CoA reductase [Pinus taeda]
  misc_feature (4)..(334): Homolog of NCBI NO: 34913420 NR Description: putative cinnamyl-alcohol dehydrogenase
  misc_feature (10)..(333): Homolog of NCBI NO: 31414896 NR Description: cinnamoyl CoA reductase [Fragaria x ananassa]
  misc_feature (16)..(333): Homolog of NCBI NO: 15226955 NR Description: cinnamoyl-CoA reductase family [Arabidopsis
  misc_feature (18)..(333): Homolog of NCBI NO: 34907928 NR Description: putative cinnamoyl CoA reductase
  misc_feature (15)..(334): Homolog of NCBI NO: 28876000 NR Description: putative cinnamoyl-CoA reductase
  misc_feature (12)..(334): Homolog of NCBI NO: 15237678 NR Description: cinnamoyl-CoA reductase family [Arabidopsis
LKLKRSKQKSSMSTEREVVCVTGASGCIGSWLVHLLLLRGYSVHATVKNLQDEKETKHLEALEGAATRLHLFEMDLLKYDTVSAAVNGCSGVFHLASPCIVDEVQDPQKQLLDPAVKGTLNVLTAAKEAGVKRVVVTSSISAITPSPNWPADKIKNEDCWADEDFCKQNGLWYPLSKTLAKKAAWEFAEEKGLDVVVVNPGTVMGPVIPPSINASMLMLQRLLEGCTETYENFFMGSVHFKDVALAHILVYENPSAKGRHLCVEAISHYGDFVAKVAELYPNYSVPKLPRETQPGLLRAKNAAKKLMELGLEFSSMEVIIKDGVESLKSKGFIS

SEQ ID NO: 110287 - protein, 323 aa, Zea mays subsp. mays
  misc_feature (1)..(323): Ceres Seq. ID no. 15178904
  misc_feature (5)..(194): Pfam Name: 3-beta hydroxysteroid dehydrogenase/isomerase family Pfam Description: 3-beta hydroxysteroid dehydrogenase/isomerase
  misc_feature (1)..(323): Homolog of NCBI NO: 27465024 NR Description: dihydroflavonol reductase [Populus tremuloides]
  misc_feature (1)..(322): Homolog of NCBI NO: 25405464 NR Description: hypothetical protein F5D21.12 [imported] -
  misc_feature (1)..(322): Homolog of NCBI NO: 7431406 NR Description: probable cinnamyl-alcohol dehydrogenase (EC
  misc_feature (4)..(323): Homolog of NCBI NO: 17978649 NR Description: cinnamoyl-CoA reductase [Pinus taeda]
  misc_feature (1)..(323): Homolog of NCBI NO: 34913420 NR Description: putative cinnamyl-alcohol dehydrogenase
  misc_feature (1)..(322): Homolog of NCBI NO: 31414896 NR Description: cinnamoyl CoA reductase [Fragaria x ananassa]
  misc_feature (5)..(322): Homolog of NCBI NO: 15226955 NR Description: cinnamoyl-CoA reductase family [Arabidopsis
  misc_feature (7)..(322): Homolog of NCBI NO: 34907928 NR Description: putative cinnamoyl CoA reductase
  misc_feature (4)..(323): Homolog of NCBI NO: 28876000 NR Description: putative cinnamoyl-CoA reductase
  misc_feature (1)..(323): Homolog of NCBI NO: 15237678 NR Description: cinnamoyl-CoA reductase family [Arabidopsis
MSTEREVVCVTGASGCIGSWLVHLLLLRGYSVHATVKNLQDEKETKHLEALEGAATRLHLFEMDLLKYDTVSAAVNGCSGVFHLASPCIVDEVQDPQKQLLDPAVKGTLNVLTAAKEAGVKRVVVTSSISAITPSPNWPADKIKNEDCWADEDFCKQNGLWYPLSKTLAKKAAWEFAEEKGLDVVVVNPGTVMGPVIPPSINASMLMLQRLLEGCTETYENFFMGSVHFKDVALAHILVYENPSAKGRHLCVEAISHYGDFVAKVAELYPNYSVPKLPRETQPGLLRAKNAAKKLMELGLEFSSMEVIIKDGVESLKSKGFIS

SEQ ID NO: 110288 - protein, 261 aa, Zea mays subsp. mays
  misc_feature (1)..(261): Ceres Seq. ID no. 15178905
  misc_feature (1)..(132): Pfam Name: 3-beta hydroxysteroid dehydrogenase/isomerase family Pfam Description: 3-beta hydroxysteroid dehydrogenase/isomerase
  misc_feature (1)..(261): Homolog of NCBI NO: 27465024 NR Description: dihydroflavonol reductase [Populus tremuloides]
  misc_feature (1)..(260): Homolog of NCBI NO: 25405464 NR Description: hypothetical protein F5D21.12 [imported] -
  misc_feature (1)..(260): Homolog of NCBI NO: 7431406 NR Description: probable cinnamyl-alcohol dehydrogenase (EC
  misc_feature (1)..(261): Homolog of NCBI NO: 17978649 NR Description: cinnamoyl-CoA reductase [Pinus taeda]
  misc_feature (1)..(261): Homolog of NCBI NO: 34913420 NR Description: putative cinnamyl-alcohol dehydrogenase
  misc_feature (1)..(260): Homolog of NCBI NO: 31414896 NR Description: cinnamoyl CoA reductase [Fragaria x ananassa]
  misc_feature (1)..(260): Homolog of NCBI NO: 15226955 NR Description: cinnamoyl-CoA reductase family [Arabidopsis
  misc_feature (1)..(260): Homolog of NCBI NO: 34907928 NR Description: putative cinnamoyl CoA reductase
  misc_feature (1)..(261): Homolog of NCBI NO: 28876000 NR Description: putative cinnamoyl-CoA reductase
  misc_feature (1)..(261): Homolog of NCBI NO: 15237678 NR Description: cinnamoyl-CoA reductase family [Arabidopsis
MDLLKYDTVSAAVNGCSGVFHLASPCIVDEVQDPQKQLLDPAVKGTLNVLTAAKEAGVKRVVVTSSISAITPSPNWPADKIKNEDCWADEDFCKQNGLWYPLSKTLAKKAAWEFAEEKGLDVVVVNPGTVMGPVIPPSINASMLMLQRLLEGCTETYENFFMGSVHFKDVALAHILVYENPSAKGRHLCVEAISHYGDFVAKVAELYPNYSVPKLPRETQPGLLRAKNAAKKLMELGLEFSSMEVIIKDGVESLKSKGFIS

SEQ ID NO: 110289 - DNA, 585 bp, Zea mays subsp. mays
  misc_feature (1)..(585): Ceres Seq. ID no. 15176134
gagaagcgtcgtccgtcgtattcaatctctgaacatcttcaattttttttttttgagaaagtattgctaagatggctgctcccagtccaattcctgccggcatttctaaggaacaggcgtttagcatggcacaaacggagatggaatatcgagttgaactcttcaacaagcttgctcaaacatgctttgttaaatgtgtggataaaaggtacaaggaaaatgagttaaacatgggtgagaacagttgcattgaccgttgtgtttccaagtactggcaggtaaatggaatggtcggacagctcttaagtgctggcaagcctcctccacagtaagccccgtttagaggcaaagtcataggaccaaaaagctcacggagagacaaaaactctcttctttctttccaaagttttaaggcaatcttattgtttttgttgtcttgcattacatttttggcgcttatttggacaaattatgcaattctctgagactttatttataagagatgaaatgaaataaccaaataaaaatcaaaaaaacatctatttatgatttgtataatttatatgaaagagaaacgtctatgcc

SEQ ID NO: 110290 - protein, 86 aa, Zea mays subsp. mays
  misc_feature (1)..(86): Ceres Seq. ID no. 15176135
  misc_feature (15)..(81): Pfam Name: Tim10/DDP family zinc finger Pfam Description: Tim10/DDP family zinc finger
  misc_feature (15)..(80): Homolog of NCBI NO: 39584809 NR Description: Hypothetical protein CBG13275 [Caenorhabditis
  misc_feature (20)..(79): Homolog of NCBI NO: 39794536 NR Description: Unknown (protein for MGC:76115) [Silurana
  misc_feature (15)..(85): Homolog of NCBI NO: 19114054 NR Description: putative mitochondrial intermembrane protein
  misc_feature (11)..(76): Homolog of NCBI NO: 12230195 NR Description: Mitochondrial import inner membrane translocase
  misc_feature (11)..(76): Homolog of NCBI NO: 6321793 NR Description: May act cooperatively with Mrs5p in mitochondrial
  misc_feature (1)..(71): Homolog of NCBI NO: 34897366 NR Description: putative zinc finger protein [Oryza sativa]
  misc_feature (11)..(84): Homolog of NCBI NO: 38175439 NR Description: small zinc finger-like protein
  misc_feature (7)..(83): Homolog of NCBI NO: 5107180 NR Description: small zinc finger-like protein [Lycopersicon
  misc_feature (7)..(84): Homolog of NCBI NO: 5107088 NR Description: small zinc finger-like protein [Pinus taeda]
  misc_feature (5)..(84): Homolog of NCBI NO: 18402072 NR Description: small zinc finger-related protein (TIM10)
MAAPSPIPAGISKEQAFSMAQTEMEYRVELFNKLAQTCFVKCVDKRYKENELNMGENSCIDRCVSKYWQVNGMVGQLLSAGKPPPQ

SEQ ID NO: 110291 - protein, 75 aa, Zea mays subsp. mays
  misc_feature (1)..(75): Ceres Seq. ID no. 15176136
EKRRPSYSISEHLQFFFFEKVLLRWLLPVQFLPAFLRNRRLAWHKRRWNIELNSSTSLLKHALLNVWIKGTRKMS

SEQ ID NO: 110292 - protein, 68 aa, Zea mays subsp. mays
  misc_feature (1)..(68): Ceres Seq. ID no. 15176137
  misc_feature (1)..(63): Pfam Name: Tim10/DDP family zinc finger Pfam Description: Tim10/DDP family zinc finger
  misc_feature (1)..(58): Homolog of NCBI NO: 12230195 NR Description: Mitochondrial import inner membrane translocase
  misc_feature (1)..(58): Homolog of NCBI NO: 6321793 NR Description: May act cooperatively with Mrs5p in mitochondrial
  misc_feature (1)..(53): Homolog of NCBI NO: 34897366 NR Description: putative zinc finger protein [Oryza sativa]
  misc_feature (1)..(66): Homolog of NCBI NO: 38175439 NR Description: small zinc finger-like protein
  misc_feature (2)..(61): Homolog of NCBI NO: 39794536 NR Description: Unknown (protein for MGC:76115) [Silurana
  misc_feature (1)..(67): Homolog of NCBI NO: 19114054 NR Description: putative mitochondrial intermembrane protein
  misc_feature (1)..(62): Homolog of NCBI NO: 39584809 NR Description: Hypothetical protein CBG13275 [Caenorhabditis
  misc_feature (1)..(65): Homolog of NCBI NO: 5107180 NR Description: small zinc finger-like protein [Lycopersicon
  misc_feature (1)..(66): Homolog of NCBI NO: 5107088 NR Description: small zinc finger-like protein [Pinus taeda]
  misc_feature (1)..(66): Homolog of NCBI NO: 18402072 NR Description: small zinc finger-related protein (TIM10)
MAQTEMEYRVELFNKLAQTCFVKCVDKRYKENELNMGENSCIDRCVSKYWQVNGMVGQLLSAGKPPPQ

SEQ ID NO: 110293 - DNA, 1315 bp, Zea mays subsp. mays
  misc_feature (1)..(1315): Ceres Seq. ID no. 15179393
ctcaatctcttgttcctctaatagtctaattcatcctcctctctttcttcgaagttactttctccccgtttcgtatctgatcagtcaatctcgaagatagatccggaggttttgagctgaaacagagagagaaagaaacagagtaatggcgaacagagattcagagagaggaggaggagggaagcagaacaacaccaacaacaacaacaacaactatatctatgacgaaagctccagcgatactcattggacttcgtggctcgttccactgatcgtcgtggcgaatctcgccgtctttatcgccgttatgttcgttaacgactgtcccaagaagatcatcggaccaaacaaagcttgcgtcgctagattcctcggaagattctcttttcagcccctcagagagaaccccctctttggcccttcttcctctacattggagagaatgggagcgttggagtgggggaaagtagtacatgagcatcaaggatggagactcgtcacttgtatgtggctacacgctggtatccttcatctcctcaccaatatgttgagtttgatcttcattggtatccgccttgagcagcagtttggcttcataagagtcgggcttatctacttaatctctggtctcggtggaagcatactctcctctcttttccttcaagaaagtatctccgttggtgcttctggtgctctctttggacttcttggagctatgttgtctgaacttctcaccaattggactatctatgctaacaaggcggctgctttgttcacactcctgttcatcatagcgatcaacttaggactaggcttgcttcctcgggttgacaatttcgcgcatattggagggtttataaccgggttctgcctcggttttatcctccttgtccggccacagcacggttgggaaagttcccgcaccaacacttcccttaccaaacgcaagtatagcatctaccagtacgttctgttcatagttgcagtccttatacttgtggtttgtttaactgttggatcagtgatgcttttcaaaggagagaatggtaacaaacattgcaaatggtgtcatcgcctcagctgtttccccacttcgaaatggacctgttaatcatcatcatcatcattatcctctaaaaattcttatatgtgttcttcttgtagcagataatttgtttgttctttttgcctttgacctctcttgccttatataacatacatgtatattaccaaataaaacgatattgttggattgaaggtacgtaatctcattatagtacatctgtataaatagtaatattgttggattaaaggt

SEQ ID NO: 110294 - protein, 321 aa, Zea mays subsp. mays
  misc_feature (1)..(321): Ceres Seq. ID no. 15179394
  misc_feature (35)..(278): Homolog of NCBI NO: 34895778 NR Description: putative membrane protein
  misc_feature (2)..(321): Homolog of NCBI NO: 37536172 NR Description: putative membrane protein
  misc_feature (24)..(321): Homolog of NCBI NO: 38344377 NR Description: OSJNBb0032E06.11 [Oryza sativa (japonica
  misc_feature (2)..(320): Homolog of NCBI NO: 15236387 NR Description: membrane protein, Rhomboid family [Arabidopsis
  misc_feature (1)..(321): Homolog of NCBI NO: 30693911 NR Description: membrane protein, Rhomboid family [Arabidopsis
  misc_feature (6)..(321): Homolog of NCBI NO: 294845 NR Description: membrane protein [Saccharum hybrid cultivar
  misc_feature (26)..(321): Homolog of NCBI NO: 15240744 NR Description: membrane protein, Rhomboid family [Arabidopsis
  misc_feature (32)..(321): Homolog of NCBI NO: 25402744 NR Description: protein T12C24.28 [imported] - Arabidopsis
  misc_feature (32)..(321): Homolog of NCBI NO: 15222058 NR Description: membrane protein, Rhomboid family [Arabidopsis
  misc_feature (1)..(321): Homolog of NCBI NO: 15221690 NR Description: membrane protein, Rhomboid family [Arabidopsis
MANRDSERGGGGKQNNTNNNNNNYIYDESSSDTHWTSWLVPLIVVANLAVFIAVMFVNDCPKKIIGPNKACVARFLGRFSFQPLRENPLFGPSSSTLERMGALEWGKVVHEHQGWRLVTCMWLHAGILHLLTNMLSLIFIGIRLEQQFGFIRVGLIYLISGLGGSILSSLFLQESISVGASGALFGLLGAMLSELLTNWTIYANKAAALFTLLFIIAINLGLGLLPRVDNFAHIGGFITGFCLGFILLVRPQHGWESSRTNTSLTKRKYSIYQYVLFIVAVLILVVCLTVGSVMLFKGENGNKHCKWCHRLSCFPTSKWTC

SEQ ID NO: 110295 - protein, 267 aa, Zea mays subsp. mays
  misc_feature (1)..(267): Ceres Seq. ID no. 15179395
  misc_feature (1)..(224): Homolog of NCBI NO: 34895778 NR Description: putative membrane protein
  misc_feature (1)..(267): Homolog of NCBI NO: 37536172 NR Description: putative membrane protein
  misc_feature (1)..(267): Homolog of NCBI NO: 38344377 NR Description: OSJNBb0032E06.11 [Oryza sativa (japonica
  misc_feature (1)..(266): Homolog of NCBI NO: 15236387 NR Description: membrane protein, Rhomboid family [Arabidopsis
  misc_feature (1)..(267): Homolog of NCBI NO: 30693911 NR Description: membrane protein, Rhomboid family [Arabidopsis
  misc_feature (1)..(267): Homolog of NCBI NO: 294845 NR Description: membrane protein [Saccharum hybrid cultivar
  misc_feature (1)..(267): Homolog of NCBI NO: 15240744 NR Description: membrane protein, Rhomboid family [Arabidopsis
  misc_feature (1)..(267): Homolog of NCBI NO: 25402744 NR Description: protein T12C24.28 [imported] - Arabidopsis
  misc_feature (1)..(267): Homolog of NCBI NO: 15222058 NR Description: membrane protein, Rhomboid family [Arabidopsis
  misc_feature (1)..(267): Homolog of NCBI NO: 15221690 NR Description: membrane protein, Rhomboid family [Arabidopsis
MFVNDCPKKIIGPNKACVARFLGRFSFQPLRENPLFGPSSSTLERMGALEWGKVVHEHQGWRLVTCMWLHAGILHLLTNMLSLIFIGIRLEQQFGFIRVGLIYLISGLGGSILSSLFLQESISVGASGALFGLLGAMLSELLTNWTIYANKAAALFTLLFIIAINLGLGLLPRVDNFAHIGGFITGFCLGFILLVRPQHGWESSRTNTSLTKRKYSIYQYVLFIVAVLILVVCLTVGSVMLFKGENGNKHCKWCHRLSCFPTSKWTC

SEQ ID NO: 110296 - protein, 222 aa, Zea mays subsp. mays
  misc_feature (1)..(222): Ceres Seq. ID no. 15179396
  misc_feature (1)..(179): Homolog of NCBI NO: 34895778 NR Description: putative membrane protein
  misc_feature (1)..(222): Homolog of NCBI NO: 37536172 NR Description: putative membrane protein
  misc_feature (1)..(222): Homolog of NCBI NO: 38344377 NR Description: OSJNBb0032E06.11 [Oryza sativa (japonica
  misc_feature (1)..(221): Homolog of NCBI NO: 15236387 NR Description: membrane protein, Rhomboid family [Arabidopsis
  misc_feature (1)..(222): Homolog of NCBI NO: 30693911 NR Description: membrane protein, Rhomboid family [Arabidopsis
  misc_feature (1)..(222): Homolog of NCBI NO: 294845 NR Description: membrane protein [Saccharum hybrid cultivar
  misc_feature (1)..(222): Homolog of NCBI NO: 15240744 NR Description: membrane protein, Rhomboid family [Arabidopsis
  misc_feature (1)..(222): Homolog of NCBI NO: 25402744 NR Description: protein T12C24.28 [imported] - Arabidopsis
  misc_feature (1)..(222): Homolog of NCBI NO: 15222058 NR Description: membrane protein, Rhomboid family [Arabidopsis
  misc_feature (1)..(222): Homolog of NCBI NO: 15221690 NR Description: membrane protein, Rhomboid family [Arabidopsis
MGALEWGKVVHEHQGWRLVTCMWLHAGILHLLTNMLSLIFIGIRLEQQFGFIRVGLIYLISGLGGSILSSLFLQESISVGASGALFGLLGAMLSELLTNWTIYANKAAALFTLLFIIAINLGLGLLPRVDNFAHIGGFITGFCLGFILLVRPQHGWESSRTNTSLTKRKYSIYQYVLFIVAVLILVVCLTVGSVMLFKGENGNKHCKWCHRLSCFPTSKWTC

SEQ ID NO: 110297 - DNA, 715 bp, Zea mays subsp. mays
  misc_feature (1)..(715): Ceres Seq. ID no. 15176126
aacaaccatccaatctgagaatatgagcgaagaactcgttcaacacgaatctcattctcaggcatcgatatttagccgttttttcagaatgttctcttttatctacccattgctgaacgttataaagcttattatagcttccgtgacctccttagtctgcttagcgttttcttgtgtgacactcggtggttcagccgtggcattaatcgtatccacaccacttttcatcatgtttagtccaattctcgtacccgctactattgccactaccctcctagccagtgggctcatggccggtaccaccctcggactgaccggcataggtctcatcatggggctcgttaggactgcaggaggagtttcattgctccaatcaccattaagaaaaatcatagtaaatagaataaaagcaagacttgggggtggcggtggcggttcacgtctggcgaggctcaaaaaaatcctgggattattaaacaagctccgtggtatgggtgcaggtggagctgctgcccctgcggctgaagctgcccctgcggctgaagctgcacctgcggctgaagctgcacctgcggctgcacctgcagctgcacctgcggctgcaccctaattaatttaagaatttatgactcgtaaactaaaaggaaaataacttttttactatgttttatgtaataaattgtttctgtagtaaaaaaataaaaatattatgtgt

SEQ ID NO: 110298 - protein, 202 aa, Zea mays subsp. mays
  misc_feature (1)..(202): Ceres Seq. ID no. 15176127
  misc_feature (36)..(155): Pfam Name: Oleosin Pfam Description: Oleosin
  misc_feature (170)..(202): Homolog of NCBI NO: 7488469 NR Description: oleosin-like protein - rape
  misc_feature (171)..(202): Homolog of NCBI NO: 7488469 NR Description: oleosin-like protein - rape
  misc_feature (170)..(202): Homolog of NCBI NO: 7488469 NR Description: oleosin-like protein - rape
  misc_feature (163)..(202): Homolog of NCBI NO: 7488469 NR Description: oleosin-like protein - rape
  misc_feature (170)..(202): Homolog of NCBI NO: 7488469 NR Description: oleosin-like protein - rape
  misc_feature (172)..(202): Homolog of NCBI NO: 7488469 NR Description: oleosin-like protein - rape
  misc_feature (8)..(126): Homolog of NCBI NO: 7488469 NR Description: oleosin-like protein - rape
  misc_feature (26)..(173): Homolog of NCBI NO: 4580945 NR Description: oleosin [Brassica oleracea]
  misc_feature (8)..(195): Homolog of NCBI NO: 15054378 NR Description: putative oleosin [Brassica oleracea]
  misc_feature (20)..(202): Homolog of NCBI NO: 266692 NR Description: OLEOSIN C98
TTIQSENMSEELVQHESHSQASIFSRFFRMFSFIYPLLNVIKLIIASVTSLVCLAFSCVTLGGSAVALIVSTPLFIMFSPILVPATIATTLLASGLMAGTTLGLTGIGLIMGLVRTAGGVSLLQSPLRKIIVNRIKARLGGGGGGSRLARLKKILGLLNKLRGMGAGGAAAPAAEAAPAAEAAPAAEAAPAAAPAAAPAAAP

SEQ ID NO: 110299 - protein, 195 aa, Zea mays subsp. mays
  misc_feature (1)..(195): Ceres Seq. ID no. 15176128
  misc_feature (29)..(148): Pfam Name: Oleosin Pfam Description: Oleosin
  misc_feature (163)..(195): Homolog of NCBI NO: 7488469 NR Description: oleosin-like protein - rape
  misc_feature (164)..(195): Homolog of NCBI NO: 7488469 NR Description: oleosin-like protein - rape
  misc_feature (163)..(195): Homolog of NCBI NO: 7488469 NR Description: oleosin-like protein - rape
  misc_feature (156)..(195): Homolog of NCBI NO: 7488469 NR Description: oleosin-like protein - rape
  misc_feature (163)..(195): Homolog of NCBI NO: 7488469 NR Description: oleosin-like protein - rape
  misc_feature (165)..(195): Homolog of NCBI NO: 7488469 NR Description: oleosin-like protein - rape
  misc_feature (1)..(119): Homolog of NCBI NO: 7488469 NR Description: oleosin-like protein - rape
  misc_feature (19)..(166): Homolog of NCBI NO: 4580945 NR Description: oleosin [Brassica oleracea]
  misc_feature (1)..(188): Homolog of NCBI NO: 15054378 NR Description: putative oleosin [Brassica oleracea]
  misc_feature (13)..(195): Homolog of NCBI NO: 266692 NR Description: OLEOSIN C98
MSEELVQHESHSQASIFSRFFRMFSFIYPLLNVIKLIIASVTSLVCLAFSCVTLGGSAVALIVSTPLFIMFSPILVPATIATTLLASGLMAGTTLGLTGIGLIMGLVRTAGGVSLLQSPLRKIIVNRIKARLGGGGGGSRLARLKKILGLLNKLRGMGAGGAAAPAAEAAPAAEAAPAAEAAPAAAPAAAPAAAP

SEQ ID NO: 110300 - protein, 173 aa, Zea mays subsp. mays
  misc_feature (1)..(173): Ceres Seq. ID no. 15176129
  misc_feature (7)..(126): Pfam Name: Oleosin Pfam Description: Oleosin
  misc_feature (141)..(173): Homolog of NCBI NO: 7488469 NR Description: oleosin-like protein - rape
  misc_feature (142)..(173): Homolog of NCBI NO: 7488469 NR Description: oleosin-like protein - rape
  misc_feature (141)..(173): Homolog of NCBI NO: 7488469 NR Description: oleosin-like protein - rape
  misc_feature (134)..(173): Homolog of NCBI NO: 7488469 NR Description: oleosin-like protein - rape
  misc_feature (141)..(173): Homolog of NCBI NO: 7488469 NR Description: oleosin-like protein - rape
  misc_feature (143)..(173): Homolog of NCBI NO: 7488469 NR Description: oleosin-like protein - rape
  misc_feature (1)..(97): Homolog of NCBI NO: 7488469 NR Description: oleosin-like protein - rape
  misc_feature (1)..(144): Homolog of NCBI NO: 4580945 NR Description: oleosin [Brassica oleracea]
  misc_feature (1)..(166): Homolog of NCBI NO: 15054378 NR Description: putative oleosin [Brassica oleracea]
  misc_feature (1)..(173): Homolog of NCBI NO: 266692 NR Description: OLEOSIN C98
MFSFIYPLLNVIKLIIASVTSLVCLAFSCVTLGGSAVALIVSTPLFIMFSPILVPATIATTLLASGLMAGTTLGLTGIGLIMGLVRTAGGVSLLQSPLRKIIVNRIKARLGGGGGGSRLARLKKILGLLNKLRGMGAGGAAAPAAEAAPAAEAAPAAEAAPAAAPAAAPAAAP

SEQ ID NO: 110301 - DNA, 776 bp, Zea mays subsp. mays
  misc_feature (1)..(776): Ceres Seq. ID no. 15176177
aaaaaactgttagacgaagcatcgagaaagcaatgatcctactttcggttagttcctcttcatcatctcccatcgccgccgtcttctccgtcgcgcttcttctgttccacttctctgaagctactcttgcagctccttgtccgatcaatggtttgccaatagtgaggaatataagtgaacttcctcaggataactatggaaggccaggcctttctcacatgactgttgctggatcagttttgcacggaatgaaagaggttgagatatggcttcaaacgtttgctccaggctcagggacgccgattcacaggcactcttgtgaagaggttttcgttgtccttaaaggcaatggtactctgtatctcgctgaaacacatggaagtttccctgggaaacctattgagtttccagtctttgccaacagtactattcatattcccatcaatgatgctcatcaggtcaagaacactggtcatgaggacctgcaggtgttggttattatatcccggccgccaattaaagtctttacctacgatgactggtttatgccacacactgctgcgaggttaaagttcccttactactgggatgagcaatgcctccaagaatcacagaaggacgagctttaataaagtaaatgaatgttcactctttgaaactctcagtcttattgtttttgaaaaatatgtaactgagcaacatcttacctacaccattagtctgtacttcgtagtcttttcataaacaagttaatgcgatctatagttttatttgcc

SEQ ID NO: 110302 - protein, 208 aa, Zea mays subsp. mays
  misc_feature (1)..(208): Ceres Seq. ID no. 15176178
  misc_feature (44)..(208): Pfam Name: Auxin binding protein Pfam Description: Auxin binding protein
  misc_feature (30)..(208): Homolog of NCBI NO: 461449 NR Description: AUXIN-BINDING PROTEIN T85 PRECURSOR (ABP)
  misc_feature (27)..(208): Homolog of NCBI NO: 1843533 NR Description: auxin binding protein [Malus x domestica]
  misc_feature (11)..(208): Homolog of NCBI NO: 7442015 NR Description: auxin-binding protein precursor - radish
  misc_feature (11)..(208): Homolog of NCBI NO: 22122224 NR Description: susceptible endoplasmic reticulum auxin-binding
  misc_feature (11)..(208): Homolog of NCBI NO: 22122216 NR Description: resistant endoplasmic reticulum auxin-binding
  misc_feature (11)..(208): Homolog of NCBI NO: 21592915 NR Description: auxin-binding protein 1 precursor [Arabidopsis
  misc_feature (11)..(208): Homolog of NCBI NO: 15236229 NR Description: auxin-binding protein 1 precursor [Arabidopsis
  misc_feature (11)..(208): Homolog of NCBI NO: 22122220 NR Description: susceptible endoplasmic reticulum auxin-binding
  misc_feature (11)..(208): Homolog of NCBI NO: 22122222 NR Description: susceptible endoplasmic reticulum auxin-binding
  misc_feature (11)..(208): Homolog of NCBI NO: 22122218 NR Description: resistant endoplasmic reticulum auxin-binding
KTVRRSIEKAMILLSVSSSSSSPIAAVFSVALLLFHFSEATLAAPCPINGLPIVRNISELPQDNYGRPGLSHMTVAGSVLHGMKEVEIWLQTFAPGSGTPIHRHSCEEVFVVLKGNGTLYLAETHGSFPGKPIEFPVFANSTIHIPINDAHQVKNTGHEDLQVLVIISRPPIKVFTYDDWFMPHTAARLKFPYYWDEQCLQESQKDEL

SEQ ID NO: 110303 - protein, 198 aa, Zea mays subsp. mays
  misc_feature (1)..(198): Ceres Seq. ID no. 15176179
  misc_feature (34)..(198): Pfam Name: Auxin binding protein Pfam Description: Auxin binding protein
  misc_feature (20)..(198): Homolog of NCBI NO: 461449 NR Description: AUXIN-BINDING PROTEIN T85 PRECURSOR (ABP)
  misc_feature (17)..(198): Homolog of NCBI NO: 1843533 NR Description: auxin binding protein [Malus x domestica]
  misc_feature (1)..(198): Homolog of NCBI NO: 7442015 NR Description: auxin-binding protein precursor - radish
  misc_feature (1)..(198): Homolog of NCBI NO: 22122224 NR Description: susceptible endoplasmic reticulum auxin-binding
  misc_feature (1)..(198): Homolog of NCBI NO: 22122216 NR Description: resistant endoplasmic reticulum auxin-binding
  misc_feature (1)..(198): Homolog of NCBI NO: 21592915 NR Description: auxin-binding protein 1 precursor [Arabidopsis
  misc_feature (1)..(198): Homolog of NCBI NO: 15236229 NR Description: auxin-binding protein 1 precursor [Arabidopsis
  misc_feature (1)..(198): Homolog of NCBI NO: 22122220 NR Description: susceptible endoplasmic reticulum auxin-binding
  misc_feature (1)..(198): Homolog of NCBI NO: 22122222 NR Description: susceptible endoplasmic reticulum auxin-binding
  misc_feature (1)..(198): Homolog of NCBI NO: 22122218 NR Description: resistant endoplasmic reticulum auxin-binding
MILLSVSSSSSSPIAAVFSVALLLFHFSEATLAAPCPINGLPIVRNISELPQDNYGRPGLSHMTVAGSVLHGMKEVEIWLQTFAPGSGTPIHRHSCEEVFVVLKGNGTLYLAETHGSFPGKPIEFPVFANSTIHIPINDAHQVKNTGHEDLQVLVIISRPPIKVFTYDDWFMPHTAARLKFPYYWDEQCLQESQKDEL

SEQ ID NO: 110304 - protein, 136 aa, Zea mays subsp. mays
  misc_feature (1)..(136): Ceres Seq. ID no. 15176180
  misc_feature (1)..(136): Pfam Name: Auxin binding protein Pfam Description: Auxin binding protein
  misc_feature (1)..(136): Homolog of NCBI NO: 461449 NR Description: AUXIN-BINDING PROTEIN T85 PRECURSOR (ABP)
  misc_feature (1)..(136): Homolog of NCBI NO: 1843533 NR Description: auxin binding protein [Malus x domestica]
  misc_feature (1)..(136): Homolog of NCBI NO: 7442015 NR Description: auxin-binding protein precursor - radish
  misc_feature (1)..(136): Homolog of NCBI NO: 22122224 NR Description: susceptible endoplasmic reticulum auxin-binding
  misc_feature (1)..(136): Homolog of NCBI NO: 22122216 NR Description: resistant endoplasmic reticulum auxin-binding
  misc_feature (1)..(136): Homolog of NCBI NO: 21592915 NR Description: auxin-binding protein 1 precursor [Arabidopsis
  misc_feature (1)..(136): Homolog of NCBI NO: 15236229 NR Description: auxin-binding protein 1 precursor [Arabidopsis
  misc_feature (1)..(136): Homolog of NCBI NO: 22122220 NR Description: susceptible endoplasmic reticulum auxin-binding
  misc_feature (1)..(136): Homolog of NCBI NO: 22122222 NR Description: susceptible endoplasmic reticulum auxin-binding
  misc_feature (1)..(136): Homolog of NCBI NO: 22122218 NR Description: resistant endoplasmic reticulum auxin-binding
MTVAGSVLHGMKEVEIWLQTFAPGSGTPIHRHSCEEVFVVLKGNGTLYLAETHGSFPGKPIEFPVFANSTIHIPINDAHQVKNTGHEDLQVLVIISRPPIKVFTYDDWFMPHTAARLKFPYYWDEQCLQESQKDEL

SEQ ID NO: 110305 - DNA, 638 bp, Zea mays subsp. mays
  misc_feature (1)..(638): Ceres Seq. ID no. 15176173
attaatttctttctcactctctcgaaatcacacgatgaaaagatcctccgccgtcacgtcaccgccatctctctccctctttctcctcctgctcctaccattgctagctcaatcctccgacgaccttatcgacaaaatctgcagagtgacgccgttcatcgacctctgtgaagcctctctccgccctctcactccctcaccttccgaccccaagtctctagcctcggccatggcttccgttgttcttggtaacatgactgatacgttaggctatatccaatcactgatcagacactctcacgatcctgcggcagagcgagcactagctcagtgcgctgagctgtaccggccggtggtcaagttcaacattcctcaggcgatcgacgcaatgcggcgaggagagttagggttcgcgacgtatgtgctcggagacgctgagaaacagactgacacttgccagaagtggatcaacagtgccggtgctgatgatgaaaattcggtggctcttacggctagaaacaagcaggttaagaatctttgtgacgtggccatttctgtgattaagtctctaatgaagggtcgttaagacaagaatctttgtttctgttgcagataataattatatattacatatttgt

SEQ ID NO: 110306 - protein, 194 aa, Zea mays subsp. mays
  misc_feature (1)..(194): Ceres Seq. ID no. 15176174
  misc_feature (38)..(191): Homolog of NCBI NO: 22212790 NR Description: invertase inhibitor-like protein [Ipomoea batatas]
  misc_feature (26)..(191): Homolog of NCBI NO: 7489025 NR Description: invertase inhibitor precursor - tomato
  misc_feature (24)..(191): Homolog of NCBI NO: 18401982 NR Description: invertase/pectin methylesterase inhibitor -
  misc_feature (12)..(193): Homolog of NCBI NO: 15228972 NR Description: hypothetical protein [Arabidopsis thaliana]
LISFSLSRNHTMKRSSAVTSPPSLSLFLLLLLPLLAQSSDDLIDKICRVTPFIDLCEASLRPLTPSPSDPKSLASAMASVVLGNMTDTLGYIQSLIRHSHDPAAERALAQCAELYRPVVKFNIPQAIDAMRRGELGFATYVLGDAEKQTDTCQKWINSAGADDENSVALTARNKQVKNLCDVAISVIKSLMKGR

SEQ ID NO: 110307 - protein, 183 aa, Zea mays subsp. mays
  misc_feature (1)..(183): Ceres Seq. ID no. 15176175
  misc_feature (27)..(180): Homolog of NCBI NO: 22212790 NR Description: invertase inhibitor-like protein [Ipomoea batatas]
  misc_feature (15)..(180): Homolog of NCBI NO: 7489025 NR Description: invertase inhibitor precursor - tomato
  misc_feature (13)..(180): Homolog of NCBI NO: 18401982 NR Description: invertase/pectin methylesterase inhibitor -
  misc_feature (1)..(182): Homolog of NCBI NO: 15228972 NR Description: hypothetical protein [Arabidopsis thaliana]
MKRSSAVTSPPSLSLFLLLLLPLLAQSSDDLIDKICRVTPFIDLCEASLRPLTPSPSDPKSLASAMASVVLGNMTDTLGYIQSLIRHSHDPAAERALAQCAELYRPVVKFNIPQAIDAMRRGELGFATYVLGDAEKQTDTCQKWINSAGADDENSVALTARNKQVKNLCDVAISVIKSLMKGR

SEQ ID NO: 110308 - protein, 118 aa, Zea mays subsp. mays
  misc_feature (1)..(118): Ceres Seq. ID no. 15176176
  misc_feature (1)..(115): Homolog of NCBI NO: 22212790 NR Description: invertase inhibitor-like protein [Ipomoea batatas]
  misc_feature (1)..(115): Homolog of NCBI NO: 7489025 NR Description: invertase inhibitor precursor - tomato
  misc_feature (1)..(115): Homolog of NCBI NO: 18401982 NR Description: invertase/pectin methylesterase inhibitor -
  misc_feature (1)..(117): Homolog of NCBI NO: 15228972 NR Description: hypothetical protein [Arabidopsis thaliana]
MASVVLGNMTDTLGYIQSLIRHSHDPAAERALAQCAELYRPVVKFNIPQAIDAMRRGELGFATYVLGDAEKQTDTCQKWINSAGADDENSVALTARNKQVKNLCDVAISVIKSLMKGR

SEQ ID NO: 110309 - DNA, 1370 bp, Zea mays subsp. mays
  misc_feature (1)..(1370): Ceres Seq. ID no. 13598818
gaactttatystrwtyaaaaaaaacaagggatgtcaaaactcaacaggacaaccgggtacacgtcgatgtgatatgactatatgaggcaccagcttatggatctttctgtgcctactaggctactaccgtttttgcctagtccagcagtccagccctggccacaattaaggtttctctaatttgactgccacaggcacctggttttcttgctgcttccgctgtttcttcctcaacctctccagctcagctgccgcaggctgcgactgccatggattccaaatccatggaagcatttgtggcaagtgaggcctccgtcttcatgaatcagccccctccacatatgtctagaccaacaattattatcaagctcattttgtggttgctgtggaccatcacccacttagcaatcagcattttaaatttatggtctcatctgatttatagtctagactgctatcttatttcatctggattgttgcggaagtatcagaatcttcatctgggtagactgaagtacttggctattgtggtagatagcaaagaagctaaaagtactgagaaggtcaagcgactgttacgctggctctcatctatgggtgtgaagtatgtatgtctctacgacattgagggagttctgaaaaaatcttttgaacctgctgtgaatgtttcaagagataggactgcaggagaacattttggcattggagcaaacatcaaagatctacactgtagccaaagagagatgatgatagattgtctttctggttctgatggcaaggagggtattgctaaagcagccagtttactttgctcaacttacttcaacggtgatactcatggagatggcaaaaggaaaccagcatttacagaagctgacatggctgctgcactgaaggctgtaggttgtggtggaccagaacccgatcttcttctcatgtatggtcctgctagatgccatttaggatttcctgcatggagattacggtatactgaaattatgtatatggggccactgaaatcaatgaaatatggtgcaattgtgaaagccttatataacttctcaaagaaacaccaaaattatgggaaatgatagctgatactagtttaaagaagaccatttgatcatggagaatcgacaccttggaactactggacagttactctgcggcccgcatccatttgcttctgctgctgcttactggagcacaggagtatttaacgttagacataccattgacacccatttcatgtttgcttgtaataagataaaaagtgctgtcgatagaacatacatacgggacaacatcccactgaaagttccacccatagcaatgagcaatgaaagaaacacaagaaatcttaccatctc

SEQ ID NO: 110310 - protein, 273 aa, Zea mays subsp. mays
  misc_feature (1)..(273): Ceres Seq. ID no. 15222426
  misc_feature (70)..(273): Homolog of NCBI NO: 13384840 NR Description: hypothetical protein D10Ertd438e [Mus musculus]
  misc_feature (86)..(273): Homolog of NCBI NO: 20270243 NR Description: hypothetical protein, MGC:7199 [Homo sapiens]
  misc_feature (38)..(212): Homolog of NCBI NO: 15221091 NR Description: expressed protein [Arabidopsis thaliana]
  misc_feature (38)..(272): Homolog of NCBI NO: 25372987 NR Description: protein F25C20.9 [imported] - Arabidopsis
  misc_feature (38)..(272): Homolog of NCBI NO: 25083010 NR Description: Unknown protein [Arabidopsis thaliana]
MDSKSMEAFVASEASVFMNQPPPHMSRPTIIIKLILWLLWTITHLAISILNLWSHLIYSLDCYLISSGLLRKYQNLHLGRLKYLAIVVDSKEAKSTEKVKRLLRWLSSMGVKYVCLYDIEGVLKKSFEPAVNVSRDRTAGEHFGIGANIKDLHCSQREMMIDCLSGSDGKEGIAKAASLLCSTYFNGDTHGDGKRKPAFTEADMAAALKAVGCGGPEPDLLLMYGPARCHLGFPAWRLRYTEIMYMGPLKSMKYGAIVKALYNFSKKHQNYGK

SEQ ID NO: 110311 - protein, 268 aa, Zea mays subsp. mays
  misc_feature (1)..(268): Ceres Seq. ID no. 15222427
  misc_feature (65)..(268): Homolog of NCBI NO: 13384840 NR Description: hypothetical protein D10Ertd438e [Mus musculus]
  misc_feature (81)..(268): Homolog of NCBI NO: 20270243 NR Description: hypothetical protein, MGC:7199 [Homo sapiens]
  misc_feature (33)..(207): Homolog of NCBI NO: 15221091 NR Description: expressed protein [Arabidopsis thaliana]
  misc_feature (33)..(267): Homolog of NCBI NO: 25372987 NR Description: protein F25C20.9 [imported] - Arabidopsis
  misc_feature (33)..(267): Homolog of NCBI NO: 25083010 NR Description: Unknown protein [Arabidopsis thaliana]
MEAFVASEASVFMNQPPPHMSRPTIIIKLILWLLWTITHLAISILNLWSHLIYSLDCYLISSGLLRKYQNLHLGRLKYLAIVVDSKEAKSTEKVKRLLRWLSSMGVKYVCLYDIEGVLKKSFEPAVNVSRDRTAGEHFGIGANIKDLHCSQREMMIDCLSGSDGKEGIAKAASLLCSTYFNGDTHGDGKRKPAFTEADMAAALKAVGCGGPEPDLLLMYGPARCHLGFPAWRLRYTEIMYMGPLKSMKYGAIVKALYNFSKKHQNYGK

SEQ ID NO: 110312 - protein, 256 aa, Zea mays subsp. mays
  misc_feature (1)..(256): Ceres Seq. ID no. 15222428
  misc_feature (53)..(256): Homolog of NCBI NO: 13384840 NR Description: hypothetical protein D10Ertd438e [Mus musculus]
  misc_feature (69)..(256): Homolog of NCBI NO: 20270243 NR Description: hypothetical protein, MGC:7199 [Homo sapiens]
  misc_feature (21)..(195): Homolog of NCBI NO: 15221091 NR Description: expressed protein [Arabidopsis thaliana]
  misc_feature (21)..(255): Homolog of NCBI NO: 25372987 NR Description: protein F25C20.9 [imported] - Arabidopsis
  misc_feature (21)..(255): Homolog of NCBI NO: 25083010 NR Description: Unknown protein [Arabidopsis thaliana]
MNQPPPHMSRPTIIIKLILWLLWTITHLAISILNLWSHLIYSLDCYLISSGLLRKYQNLHLGRLKYLAIVVDSKEAKSTEKVKRLLRWLSSMGVKYVCLYDIEGVLKKSFEPAVNVSRDRTAGEHFGIGANIKDLHCSQREMMIDCLSGSDGKEGIAKAASLLCSTYFNGDTHGDGKRKPAFTEADMAAALKAVGCGGPEPDLLLMYGPARCHLGFPAWRLRYTEIMYMGPLKSMKYGAIVKALYNFSKKHQNYGK

SEQ ID NO: 110313 - DNA, 849 bp, Zea mays subsp. mays
  misc_feature (1)..(849): Ceres Seq. ID no. 13598819
ctagaacatcctaatcaaaaagtttatatgtgagcgttcctcgcaattaatagagagatctatctatctatcgatcgagctttcgttatcctcctcgatcttaattacaggtcatagctaagcaggtctgacaggatgtcgtggcagacatacgtcgatgagcacctcatgtgcgagatcgagggccaccacctgacctccgctgccatagtcggccacgacggcgccgtttgggcccagagcaccgcattcccacagttcaagacagaggagatgaccaacatcatgaaggacttcgacgagcccgggttcctggccccgaccggcctcttcctcggccccaccaagtacatggtcatccaaggcgagcccggcgctgtcatccgcgggaagaagggatctggaggcataactgtgaagaagacagggcaagcgatggtggtcggcatctacgacgagcccatgacccccggccagtgcaacatggtggtcgagaggctcggcgactacctcgtagagcaaggcctgtgaatggattcatttaatctgcgagcatccagcagcagcaacgataccaacaccagcattatttaattggtagcctcctctagctacgcacgcatttttagtcccctacacgtccttggattctgcgtggctctgttaatcatctctcatccttcgtctgccatttctcccctgcccgtcgccgatcaccagagatttttgttccttgttggtaccatgcattttggcaaataattttgtgattccatccccaaattaaagtttggttgtcgtatggtttgtaaacccagaacaatatatatatatgtgtgtgtgtgatcg

SEQ ID NO: 110314 - protein, 131 aa, Zea mays subsp. mays
  misc_feature (1)..(131): Ceres Seq. ID no. 13598820
  misc_feature (2)..(126): Pfam Name: Profilin Pfam Description: Profilin
  misc_feature (1)..(131): Homolog of NCBI NO: 464471 NR Description: PROFILIN 1 (POLLEN ALLERGEN PHL P 11) (PHL P XI)
  misc_feature (1)..(131): Homolog of NCBI NO: 21322677 NR Description: profilin [Phoenix dactylifera]
  misc_feature (1)..(131): Homolog of NCBI NO: 14423860 NR Description: Profilin 3 (Pollen allergen Hev b 8.0201)
  misc_feature (1)..(131): Homolog of NCBI NO: 3914432 NR Description: PROFILIN 2/4 (POLLEN ALLERGEN PHL P 11) (PHL P
  misc_feature (1)..(131): Homolog of NCBI NO: 464466 NR Description: Profilin 1 (ZmPRO1)
  misc_feature (1)..(131): Homolog of NCBI NO: 3914422 NR Description: Profilin (Pollen allergen Cyn d 12)
  misc_feature (1)..(131): Homolog of NCBI NO: 548597 NR Description: PROFILIN 2 (ZMPRO2)
  misc_feature (1)..(131): Homolog of NCBI NO: 422032 NR Description: profilin 2 - maize
  misc_feature (1)..(131): Homolog of NCBI NO: 464470 NR Description: Profilin 3 (ZmPRO3)
  misc_feature (1)..(131): Homolog of NCBI NO: 37532730 NR Description: Profilin A [Oryza sativa (japonica
MSWQTYVDEHLMCEIEGHHLTSAAIVGHDGAVWAQSTAFPQFKTEEMTNIMKDFDEPGFLAPTGLFLGPTKYMVIQGEPGAVIRGKKGSGGITVKKTGQAMVVGIYDEPMTPGQCNMVVERLGDYLVEQGL

SEQ ID NO: 110315 - protein, 120 aa, Zea mays subsp. mays
  misc_feature (1)..(120): Ceres Seq. ID no. 13598821
  misc_feature (1)..(115): Pfam Name: Profilin Pfam Description: Profilin
  misc_feature (1)..(120): Homolog of NCBI NO: 464471 NR Description: PROFILIN 1 (POLLEN ALLERGEN PHL P 11) (PHL P XI)
  misc_feature (1)..(120): Homolog of NCBI NO: 21322677 NR Description: profilin [Phoenix dactylifera]
  misc_feature (1)..(120): Homolog of NCBI NO: 14423860 NR Description: Profilin 3 (Pollen allergen Hev b 8.0201)
  misc_feature (1)..(120): Homolog of NCBI NO: 3914432 NR Description: PROFILIN 2/4 (POLLEN ALLERGEN PHL P 11) (PHL P
  misc_feature (1)..(120): Homolog of NCBI NO: 464466 NR Description: Profilin 1 (ZmPRO1)
  misc_feature (1)..(120): Homolog of NCBI NO: 3914422 NR Description: Profilin (Pollen allergen Cyn d 12)
  misc_feature (1)..(120): Homolog of NCBI NO: 548597 NR Description: PROFILIN 2 (ZMPRO2)
  misc_feature (1)..(120): Homolog of NCBI NO: 422032 NR Description: profilin 2 - maize
  misc_feature (1)..(120): Homolog of NCBI NO: 464470 NR Description: Profilin 3 (ZmPRO3)
  misc_feature (1)..(120): Homolog of NCBI NO: 37532730 NR Description: Profilin A [Oryza sativa (japonica
MCEIEGHHLTSAAIVGHDGAVWAQSTAFPQFKTEEMTNIMKDFDEPGFLAPTGLFLGPTKYMVIQGEPGAVIRGKKGSGGITVKKTGQAMVVGIYDEPMTPGQCNMVVERLGDYLVEQGL

SEQ ID NO: 110316 - protein, 85 aa, Zea mays subsp. mays
  misc_feature (1)..(85): Ceres Seq. ID no. 13598822
  misc_feature (1)..(80): Pfam Name: Profilin Pfam Description: Profilin
  misc_feature (1)..(85): Homolog of NCBI NO: 464471 NR Description: PROFILIN 1 (POLLEN ALLERGEN PHL P 11) (PHL P XI)
  misc_feature (1)..(85): Homolog of NCBI NO: 21322677 NR Description: profilin [Phoenix dactylifera]
  misc_feature (1)..(85): Homolog of NCBI NO: 14423860 NR Description: Profilin 3 (Pollen allergen Hev b 8.0201)
  misc_feature (1)..(85): Homolog of NCBI NO: 3914432 NR Description: PROFILIN 2/4 (POLLEN ALLERGEN PHL P 11) (PHL P
  misc_feature (1)..(85): Homolog of NCBI NO: 464466 NR Description: Profilin 1 (ZmPRO1)
  misc_feature (1)..(85): Homolog of NCBI NO: 3914422 NR Description: Profilin (Pollen allergen Cyn d 12)
  misc_feature (1)..(85): Homolog of NCBI NO: 548597 NR Description: PROFILIN 2 (ZMPRO2)
  misc_feature (1)..(85): Homolog of NCBI NO: 422032 NR Description: profilin 2 - maize
  misc_feature (1)..(85): Homolog of NCBI NO: 464470 NR Description: Profilin 3 (ZmPRO3)
  misc_feature (1)..(85): Homolog of NCBI NO: 37532730 NR Description: Profilin A [Oryza sativa (japonica
MTNIMKDFDEPGFLAPTGLFLGPTKYMVIQGEPGAVIRGKKGSGGITVKKTGQAMVVGIYDEPMTPGQCNMVVERLGDYLVEQGL

SEQ ID NO: 110317 - DNA, 560 bp, Zea mays subsp. mays
  misc_feature (1)..(560): Ceres Seq. ID no. 13585976
tgctctcatttcttttgtacattattcttctgatcatatatgtcttgttaaaatccatgatgctcagttctgtgttctctcatttcatggaagaggctaatgctatatagtcttgcctgatgtttagcagatctcctcatttaaaacggttggttatgccagcatggaaccgcatcaccaaagtgggaatatgtaatgctatccaaaggtggcaggcgctggagtccttgacaatgcctaccatcggacatcctccatatattatggaagagatagcaaggagctgcaagaatttcacagaacttaagatcatgggctcatttgatcaacaatttgcctcggcaattttgcagttccttccaaagctgaaagtgctgagccttcgttgctcgaaggtgtccatggatgcactgcaatgtttgctgaactcgatggagtatcttgaggttctgaatatttcacactgcctgctgttggttgtcgcggcgaatgggcggaagcaagtggttcatgaactggacagccaaattctcgagagagcttcacggctgcgtgaattc

SEQ ID NO: 110318 - protein, 147 aa, Zea mays subsp. mays
  misc_feature (1)..(147): Ceres Seq. ID no. 13585977
  misc_feature (4)..(116): Homolog of NCBI NO: 15234238 NR Description: F-box protein family [Arabidopsis thaliana]
  misc_feature (4)..(146): Homolog of NCBI NO: 21618163 NR Description: unknown [Arabidopsis thaliana]
  misc_feature (4)..(146): Homolog of NCBI NO: 15229043 NR Description: F-box protein family [Arabidopsis thaliana]
  misc_feature (4)..(146): Homolog of NCBI NO: 37535806 NR Description: putative Rhizobium-induced nodule development
MFSRSPHLKRLVMPAWNRITKVGICNAIQRWQALESLTMPTIGHPPYIMEEIARSCKNFTELKIMGSFDQQFASAILQFLPKLKVLSLRCSKVSMDALQCLLNSMEYLEVLNISHCLLLVVAANGRKQVVHELDSQILERASRLREF

SEQ ID NO: 110319 - protein, 135 aa, Zea mays subsp. mays
  misc_feature (1)..(135): Ceres Seq. ID no. 13585978
  misc_feature (1)..(104): Homolog of NCBI NO: 15234238 NR Description: F-box protein family [Arabidopsis thaliana]
  misc_feature (1)..(134): Homolog of NCBI NO: 21618163 NR Description: unknown [Arabidopsis thaliana]
  misc_feature (1)..(134): Homolog of NCBI NO: 15229043 NR Description: F-box protein family [Arabidopsis thaliana]
  misc_feature (1)..(134): Homolog of NCBI NO: 37535806 NR Description: putative Rhizobium-induced nodule development
MPAWNRITKVGICNAIQRWQALESLTMPTIGHPPYIMEEIARSCKNFTELKIMGSFDQQFASAILQFLPKLKVLSLRCSKVSMDALQCLLNSMEYLEVLNISHCLLLVVAANGRKQVVHELDSQILERASRLREF

SEQ ID NO: 110320 - protein, 109 aa, Zea mays subsp. mays
  misc_feature (1)..(109): Ceres Seq. ID no. 13585979
  misc_feature (1)..(78): Homolog of NCBI NO: 15234238 NR Description: F-box protein family [Arabidopsis thaliana]
  misc_feature (1)..(108): Homolog of NCBI NO: 21618163 NR Description: unknown [Arabidopsis thaliana]
  misc_feature (1)..(108): Homolog of NCBI NO: 15229043 NR Description: F-box protein family [Arabidopsis thaliana]
  misc_feature (1)..(108): Homolog of NCBI NO: 37535806 NR Description: putative Rhizobium-induced nodule development
MPTIGHPPYIMEEIARSCKNFTELKIMGSFDQQFASAILQFLPKLKVLSLRCSKVSMDALQCLLNSMEYLEVLNISHCLLLVVAANGRKQVVHELDSQILERASRLREF

SEQ ID NO: 110321 - DNA, 2306 bp, Zea mays subsp. mays
  misc_feature (1)..(2306): Ceres Seq. ID no. 15180558
gttctcctacatcccttttccctctctgcccctgcgaacggggcgccaccacctaccagttatctccctccgctgcgcagcccctctgttagaccgtcgttgccgccctactccaggtgggtaggtcttcttcgggcccttcgccggcgacaagcaccaccaggggacctcgccggcgcaggggagggtgcaccgtcgccaggagccaagagccagcagccaggaaccagagccgccgccacttctagagctcaatcgatcagcgactcagattttcatctgaggatgggtaaggactatgaccctatggagattgacgaccagaagcagcaacagctagaagtcaccgctgcggtgccagaagggttcaacactgactatctccgtgtctactacggaaagctcttcccatatggtgatttcttcaaatggctttgctatggaaatgatggaaagcaccctggatgtgatcaatcatatgttggacgtcgagagttttcgtttacactggagaatgacatttacttgcgcttccaatcctttgatactgctactgaattagagagttctatcaaggagaagtgccctttcaagattgatattggacctgtctacagtgtagatccttcaaagcgtcacgcttacgcccaatctggcaataatgtctttgtaccagtcgagagagaactaatttttgacattgatatatctgattatgatgatgttcgctactgctgctctggagctgatgtctgcagagactgctggcccttgatgacaattgctatcaaaattttggatacttctcttagagatgattttggtttcagtcacatactatgggtatacagtggacgtcgtggtgtccattgctgggtctgtgatagcagagcaagaaagctcagcaatgaacaaagggctgcaattgctgactactttcgagtctacaagggtggtgaaaatgcactgaagaaagtatccttggctggacctgttctccatcccttccttgcccggtcatacatggatgttcttaaaaccttctttgaagataggttgctccttaaccaacaactctttgcatcagaggagagatgtcggaagatactcgatctcatccctgatgaaagtgttgctagtgaggtccatgacaagtggcagggaaatagacgatcttctatttcaaaagaagatgtcaatgcgaccagatgggagcaattgaagatgactttacagtctggaaaaaaggctcaggggcttcgtagatgtgtggaagagattgtcttctcatacacataccctagacttgacatggaggtatcaaagcacatgaatcatttactaaaagctcccttttgtatacatccaaagacaggccgtgtttgtgttccgattgaccccagtaattgtgatgattttgatcctgcggctgttccgactctatcacagcttttaggagagctgaatgctactggttttcagacagatcctgaaaataattgggaaagaacgtcccttgggaaatccatcagttttttcagaacttccttcctgcacccattgctgaaagcatgcaaggaggaactggaaagtgcatatagcgcgaagcttcagcagtccaagaattcattggtgaggtctttgtgaatgcaccattctttatatctgctgaggatgcaggtgccgtggatgcaaggaaaagtgatgagtacaaagaaactattattccagctggaaagacacatgaggtcattttgagtgttgaagctgtaaactcatacatcgcatgggacttttccttgcaacaaggggccctcaacatggtattggacattggctttcatgtggagtacattagcccttcaggggagaaaactttaattcttccataccgacgatatgaagctgaccaaggtaatttttgcactgtttcatcgggatcatacaaacttgtgtgggacaattcatattcttcattcttcaaaaaggtccttcggtacaaggtggatgctgtgccaccggttgttgagccggccttgtcagccacggaactctgaagaggtctgtcttaatataatgatgtaacgagggccgatgcatgcccgagtatagctgtacaaatgtttctgaaggccccacacggtgctgttactgattattccatcgaatgctttgcggtgttctgatcgcagcattccctgatagctcgctgtcagagcgcatggatatgtactttgtgtgcacatggctgcggccacttgtcaccgacgaatgcctgaatataacagaaatgtattatatcgacc

SEQ ID NO: 110322 - protein, 548 aa, Zea mays subsp. mays
  misc_feature (1)..(548): Ceres Seq. ID no. 15180559
  misc_feature (150)..(461): Pfam Name: DNA primase small subunit Pfam Description: DNA primase small subunit
  misc_feature (109)..(535): Homolog of NCBI NO: 31215873 NR Description: ENSANGP00000020414 [Anopheles gambiae]
  misc_feature (60)..(527): Homolog of NCBI NO: 32421129 NR Description: hypothetical protein [Neurospora crassa]
  misc_feature (126)..(531): Homolog of NCBI NO: 110830 NR Description: DNA primase (EC 2.7.7.-) 46K chain - mouse
  misc_feature (126)..(531): Homolog of NCBI NO: 6679459 NR Description: DNA primase, p49 subunit [Mus musculus]
  misc_feature (126)..(531): Homolog of NCBI NO: 3676248 NR Description: DNA polymerase alpha subunit IV (primase) [Rattus
  misc_feature (114)..(508): Homolog of NCBI NO: 40744428 NR Description: hypothetical protein AN3033.2 [Aspergillus
  misc_feature (126)..(531): Homolog of NCBI NO: 4506051 NR Description: primase, polypeptide 1, 49kDa
  misc_feature (126)..(541): Homolog of NCBI NO: 29612475 NR Description: Similar to primase, polypeptide 1, 49kDa [Xenopus
  misc_feature (126)..(543): Homolog of NCBI NO: 28839820 NR Description: Similar to primase, polypeptide 1, 49kDa [Danio
  misc_feature (150)..(500): Homolog of NCBI NO: 15238209 NR Description: DNA polymerase alpha subunit IV (primase)-related
VLLHPFSLSAPANGAPPPTSYLPPLRSPSVRPSLPPYSRWVGLLRALRRRQAPPGDLAGAGEGAPSPGAKSQQPGTRAAATSRAQSISDSDFHLRMGKDYDPMEIDDQKQQQLEVTAAVPEGFNTDYLRVYYGKLFPYGDFFKWLCYGNDGKHPGCDQSYVGRREFSFTLENDIYLRFQSFDTATELESSIKEKCPFKIDIGPVYSVDPSKRHAYAQSGNNVFVPVERELIFDIDISDYDDVRYCCSGADVCRDCWPLMTIAIKILDTSLRDDFGFSHILWVYSGRRGVHCWVCDSRARKLSNEQRAAIADYFRVYKGGENALKKVSLAGPVLHPFLARSYMDVLKTFFEDRLLLNQQLFASEERCRKILDLIPDESVASEVHDKWQGNRRSSISKEDVNATRWEQLKMTLQSGKKAQGLRRCVEEIVFSYTYPRLDMEVSKHMNHLLKAPFCIHPKTGRVCVPIDPSNCDDFDPAAVPTLSQLLGELNATGFQTDPENNWERTSLGKSISFFRTSFLHPLLKACKEELESAYSAKLQQSKNSLVRSL

SEQ ID NO: 110323 - protein, 453 aa, Zea mays subsp. mays
  misc_feature (1)..(453): Ceres Seq. ID no. 15180560
  misc_feature (55)..(366): Pfam Name: DNA primase small subunit Pfam Description: DNA primase small subunit
  misc_feature (14)..(440): Homolog of NCBI NO: 31215873 NR Description: ENSANGP00000020414 [Anopheles gambiae]
  misc_feature (1)..(432): Homolog of NCBI NO: 32421129 NR Description: hypothetical protein [Neurospora crassa]
  misc_feature (31)..(436): Homolog of NCBI NO: 110830 NR Description: DNA primase (EC 2.7.7.-) 46K chain - mouse
  misc_feature (31)..(436): Homolog of NCBI NO: 6679459 NR Description: DNA primase, p49 subunit [Mus musculus]
  misc_feature (31)..(436): Homolog of NCBI NO: 3676248 NR Description: DNA polymerase alpha subunit IV (primase) [Rattus
  misc_feature (19)..(413): Homolog of NCBI NO: 40744428 NR Description: hypothetical protein AN3033.2 [Aspergillus
  misc_feature (31)..(436): Homolog of NCBI NO: 4506051 NR Description: primase, polypeptide 1, 49kDa
  misc_feature (31)..(446): Homolog of NCBI NO: 29612475 NR Description: Similar to primase, polypeptide 1, 49kDa [Xenopus
  misc_feature (31)..(448): Homolog of NCBI NO: 28839820 NR Description: Similar to primase, polypeptide 1, 49kDa [Danio
  misc_feature (55)..(405): Homolog of NCBI NO: 15238209 NR Description: DNA polymerase alpha subunit IV (primase)-related
MGKDYDPMEIDDQKQQQLEVTAAVPEGFNTDYLRVYYGKLFPYGDFFKWLCYGNDGKHPGCDQSYVGRREFSFTLENDIYLRFQSFDTATELESSIKEKCPFKIDIGPVYSVDPSKRHAYAQSGNNVFVPVERELIFDIDISDYDDVRYCCSGADVCRDCWPLMTIAIKILDTSLRDDFGFSHILWVYSGRRGVHCWVCDSRARKLSNEQRAAIADYFRVYKGGENALKKVSLAGPVLHPFLARSYMDVLKTFFEDRLLLNQQLFASEERCRKILDLIPDESVASEVHDKWQGNRRSSISKEDVNATRWEQLKMTLQSGKKAQGLRRCVEEIVFSYTYPRLDMEVSKHMNHLLKAPFCIHPKTGRVCVPIDPSNCDDFDPAAVPTLSQLLGELNATGFQTDPENNWERTSLGKSISFFRTSFLHPLLKACKEELESAYSAKLQQSKNSLVRSL

SEQ ID NO: 110324 - protein, 446 aa, Zea mays subsp. mays
  misc_feature (1)..(446): Ceres Seq. ID no. 15180561
  misc_feature (48)..(359): Pfam Name: DNA primase small subunit Pfam Description: DNA primase small subunit
  misc_feature (7)..(433): Homolog of NCBI NO: 31215873 NR Description: ENSANGP00000020414 [Anopheles gambiae]
  misc_feature (1)..(425): Homolog of NCBI NO: 32421129 NR Description: hypothetical protein [Neurospora crassa]
  misc_feature (24)..(429): Homolog of NCBI NO: 110830 NR Description: DNA primase (EC 2.7.7.-) 46K chain - mouse
  misc_feature (24)..(429): Homolog of NCBI NO: 6679459 NR Description: DNA primase, p49 subunit [Mus musculus]
  misc_feature (24)..(429): Homolog of NCBI NO: 3676248 NR Description: DNA polymerase alpha subunit IV (primase) [Rattus
  misc_feature (12)..(406): Homolog of NCBI NO: 40744428 NR Description: hypothetical protein AN3033.2 [Aspergillus
  misc_feature (24)..(429): Homolog of NCBI NO: 4506051 NR Description: primase, polypeptide 1, 49kDa
  misc_feature (24)..(439): Homolog of NCBI NO: 29612475 NR Description: Similar to primase, polypeptide 1, 49kDa [Xenopus
  misc_feature (24)..(441): Homolog of NCBI NO: 28839820 NR Description: Similar to primase, polypeptide 1, 49kDa [Danio
  misc_feature (48)..(398): Homolog of NCBI NO: 15238209 NR Description: DNA polymerase alpha subunit IV (primase)-related
MEIDDQKQQQLEVTAAVPEGFNTDYLRVYYGKLFPYGDFFKWLCYGNDGKHPGCDQSYVGRREFSFTLENDIYLRFQSFDTATELESSIKEKCPFKIDIGPVYSVDPSKRHAYAQSGNNVFVPVERELIFDIDISDYDDVRYCCSGADVCRDCWPLMTIAIKILDTSLRDDFGFSHILWVYSGRRGVHCWVCDSRARKLSNEQRAAIADYFRVYKGGENALKKVSLAGPVLHPFLARSYMDVLKTFFEDRLLLNQQLFASEERCRKILDLIPDESVASEVHDKWQGNRRSSISKEDVNATRWEQLKMTLQSGKKAQGLRRCVEEIVFSYTYPRLDMEVSKHMNHLLKAPFCIHPKTGRVCVPIDPSNCDDFDPAAVPTLSQLLGELNATGFQTDPENNWERTSLGKSISFFRTSFLHPLLKACKEELESAYSAKLQQSKNSLVRSL

SEQ ID NO: 110325 - DNA, 1395 bp, Zea mays subsp. mays
  misc_feature (1)..(1395): Ceres Seq. ID no. 15180012
acaggttccctgatatcggtggccagcagccgactttgtggttagtccattctcttccggcgggatacgttgcggaccacttcgctcagctgctcgcgacggcggcttgtaccctgatttgggtggggaggatgcctgatatccagctgggatgccacactataaggtcccatggtaccaaagtggcaacattacacatgtatgactggattatacttttatgtcttgctgtacttgatggactgttaaacataatcgagccctttcaccgctttgttggacgcgacatgatgaccgacttgagttatcccctcaagggcaacacaatcccattttgggctgttccactgattgcgatcgtgctacccttggttatctttgctgtcatttacttcaaaaagaaaaatgtctatgatttacaccacggcatactagggatcttgtattcagtgcttataactgctgtgatcactgatgcaattaaggatggtgttggtcgccctcggccagatttcttttggcgttgttttcctgatggcaaacctaattttaataatataaccaccgatgtgatatgccatggagaaaagagtgtcatcaaggaaggtcataagagtttcccaagtgggcattcttcatggtctttcgctggtctaggttttcttgcatggtacttggctggaaaacttaaagcttttgatcgcaaaggtcacattgcaaaactgtgcttagtttttctgcctctacttgtcgcgtcacttgtggctgtttctcgagttgatgattactggcatcactggcaagatgtctttgccggcggcatcataggtcttacagttgcttcattctgttacctgcagttcttcccatatccctttgacaatgatgccctatggccacacgcatacttccaacagctagctgagacacacagtaatggtaatgcaaactcaatcaacataagacctacagagtttgaagatgaaccagatgaccatggtgacattgtcctgagggacaccagccctatcttggagtcaatggagtctggcaggagaccatgaagaagcatgccactgtgggtttgtccaaggtgcccttcaaattctggaagcgtgatgagttttgtggtttcatcatgtagccgtccaacgtaaaaacagtatggaggtatatctaccaccacctgatgatttgatgatccacagactgtcgtggttagctgtaaatgacagcgaatgtttatgtttctagtgacaatgtgaatatttggttttgcacggctgtgatatgggaagtttgtttcgaggttaccctttggctgtaatgaaattgtccgacgacctgcagatggattgcaaacggtctttagggggcaatcactccatccaagat

SEQ ID NO: 110326 - protein, 353 aa, Zea mays subsp. mays
  misc_feature (1)..(353): Ceres Seq. ID no. 15180013
  misc_feature (116)..(292): Pfam Name: PAP2 superfamily Pfam Description: PAP2 superfamily
  misc_feature (42)..(308): Homolog of NCBI NO: 15724220 NR Description: At2g01180/F10A8.6 [Arabidopsis thaliana]
  misc_feature (53)..(332): Homolog of NCBI NO: 20161571 NR Description: putative phosphatidic acid phosphatase beta
  misc_feature (44)..(351): Homolog of NCBI NO: 6957723 NR Description: putative phosphatidate phosphohydrolase
  misc_feature (43)..(351): Homolog of NCBI NO: 9621903 NR Description: phosphatidic acid phosphatase alpha [Vigna
  misc_feature (43)..(351): Homolog of NCBI NO: 18396250 NR Description: phosphatidic acid phosphatase (PAP2) family
  misc_feature (53)..(331): Homolog of NCBI NO: 34910912 NR Description: putative phosphatidic acid phosphatase beta
  misc_feature (44)..(326): Homolog of NCBI NO: 15218051 NR Description: phosphatidic acid phosphatase (PAP2) family
  misc_feature (44)..(319): Homolog of NCBI NO: 10673973 NR Description: phosphatidic acid phosphatase beta [Vigna
  misc_feature (44)..(352): Homolog of NCBI NO: 38637527 NR Description: putative phosphatidic acid phosphatase beta
  misc_feature (44)..(352): Homolog of NCBI NO: 38637528 NR Description: unknown protein [Oryza sativa (japonica
RFPDIGGQQPTLWLVHSLPAGYVADHFAQLLATAACTLIWVGRMPDIQLGCHTIRSHGTKVATLHMYDWIILLCLAVLDGLLNIIEPFHRFVGRDMMTDLSYPLKGNTIPFWAVPLIAIVLPLVIFAVIYFKKKNVYDLHHGILGILYSVLITAVITDAIKDGVGRPRPDFFWRCFPDGKPNFNNITTDVICHGEKSVIKEGHKSFPSGHSSWSFAGLGFLAWYLAGKLKAFDRKGHIAKLCLVFLPLLVASLVAVSRVDDYWHHWQDVFAGGIIGLTVASFCYLQFFPYPFDNDALWPHAYFQQLAETHSNGNANSINIRPTEFEDEPDDHGDIVLRDTSPILESMESGRRP

SEQ ID NO: 110327 - protein, 310 aa, Zea mays subsp. mays
  misc_feature (1)..(310): Ceres Seq. ID no. 15180014
  misc_feature (73)..(249): Pfam Name: PAP2 superfamily Pfam Description: PAP2 superfamily
  misc_feature (1)..(265): Homolog of NCBI NO: 15724220 NR Description: At2g01180/F10A8.6 [Arabidopsis thaliana]
  misc_feature (10)..(289): Homolog of NCBI NO: 20161571 NR Description: putative phosphatidic acid phosphatase beta
  misc_feature (1)..(308): Homolog of NCBI NO: 6957723 NR Description: putative phosphatidate phosphohydrolase
  misc_feature (1)..(308): Homolog of NCBI NO: 9621903 NR Description: phosphatidic acid phosphatase alpha [Vigna
  misc_feature (1)..(308): Homolog of NCBI NO: 18396250 NR Description: phosphatidic acid phosphatase (PAP2) family
  misc_feature (10)..(288): Homolog of NCBI NO: 34910912 NR Description: putative phosphatidic acid phosphatase beta
  misc_feature (1)..(283): Homolog of NCBI NO: 15218051 NR Description: phosphatidic acid phosphatase (PAP2) family
  misc_feature (1)..(276): Homolog of NCBI NO: 10673973 NR Description: phosphatidic acid phosphatase beta [Vigna
  misc_feature (1)..(309): Homolog of NCBI NO: 38637527 NR Description: putative phosphatidic acid phosphatase beta
  misc_feature (1)..(309): Homolog of NCBI NO: 38637528 NR Description: unknown protein [Oryza sativa (japonica
MPDIQLGCHTIRSHGTKVATLHMYDWIILLCLAVLDGLLNIIEPFHRFVGRDMMTDLSYPLKGNTIPFWAVPLIAIVLPLVIFAVIYFKKKNVYDLHHGILGILYSVLITAVITDAIKDGVGRPRPDFFWRCFPDGKPNFNNITTDVICHGEKSVIKEGHKSFPSGHSSWSFAGLGFLAWYLAGKLKAFDRKGHIAKLCLVFLPLLVASLVAVSRVDDYWHHWQDVFAGGIIGLTVASFCYLQFFPYPFDNDALWPHAYFQQLAETHSNGNANSINIRPTEFEDEPDDHGDIVLRDTSPILESMESGRRP

SEQ ID NO: 110328 - protein, 288 aa, Zea mays subsp. mays
  misc_feature (1)..(288): Ceres Seq. ID no. 15180015
  misc_feature (51)..(227): Pfam Name: PAP2 superfamily Pfam Description: PAP2 superfamily
  misc_feature (1)..(243): Homolog of NCBI NO: 15724220 NR Description: At2g01180/F10A8.6 [Arabidopsis thaliana]
  misc_feature (1)..(267): Homolog of NCBI NO: 20161571 NR Description: putative phosphatidic acid phosphatase beta
  misc_feature (1)..(286): Homolog of NCBI NO: 6957723 NR Description: putative phosphatidate phosphohydrolase
  misc_feature (1)..(286): Homolog of NCBI NO: 9621903 NR Description: phosphatidic acid phosphatase alpha [Vigna
  misc_feature (1)..(286): Homolog of NCBI NO: 18396250 NR Description: phosphatidic acid phosphatase (PAP2) family
  misc_feature (1)..(266): Homolog of NCBI NO: 34910912 NR Description: putative phosphatidic acid phosphatase beta
  misc_feature (1)..(261): Homolog of NCBI NO: 15218051 NR Description: phosphatidic acid phosphatase (PAP2) family
  misc_feature (1)..(254): Homolog of NCBI NO: 10673973 NR Description: phosphatidic acid phosphatase beta [Vigna
  misc_feature (1)..(287): Homolog of NCBI NO: 38637527 NR Description: putative phosphatidic acid phosphatase beta
  misc_feature (1)..(287): Homolog of NCBI NO: 38637528 NR Description: unknown protein [Oryza sativa (japonica
MYDWIILLCLAVLDGLLNIIEPFHRFVGRDMMTDLSYPLKGNTIPFWAVPLIAIVLPLVIFAVIYFKKKNVYDLHHGILGILYSVLITAVITDAIKDGVGRPRPDFFWRCFPDGKPNFNNITTDVICHGEKSVIKEGHKSFPSGHSSWSFAGLGFLAWYLAGKLKAFDRKGHIAKLCLVFLPLLVASLVAVSRVDDYWHHWQDVFAGGIIGLTVASFCYLQFFPYPFDNDALWPHAYFQQLAETHSNGNANSINIRPTEFEDEPDDHGDIVLRDTSPILESMESGRRP

SEQ ID NO: 110329 - DNA, 742 bp, Zea mays subsp. mays
  misc_feature (1)..(742): Ceres Seq. ID no. 13598807
cattcagatttccaatgcaaatgatgatgtcgttcatcactgtggttcaagaaaactacccgaatcgtcttggggtattgtttgtcatccgtcttcctccagttgtcagagttattgcacagacatttcttcaagtcttgaaaccagctacaaagcagaagttgcgttttgagggagattcgtacaagaaggcattggcggagttcctgcaggctgtgccagcgtttctgggcggtaaatgcagctgcccgcgatgtgagagtcctcgtgatgattcagtgatacaggcaggggaagggagcaagaagcagccccgcttggtcagcgttgatgacgggttacctgtcacagacttggacttcgacttggatgaagagatcccatcaccttatagctgcgagaacgccatcagggctgcgataatcggcctgctgatggtgtgcatcttcgtcgcgtttctggctgggatgatcgaccctgcatccgttccagccagtgcctgagagcttgtggaatagagcatgcacgtacatgtgttgctaattaggatgcagggtgctgtatttcttggcaggcttcttgtatgttgtcgtcagaccgccatagagcgctttctcccagtgtgagcgagcgcatgaataatatatatcctctgtgtcaaatgttggttagcagttcaattcgggcctactagatttcactattttcttttttatcttgatcgggcctactgaatttttgc

SEQ ID NO: 110330 - protein, 166 aa, Zea mays subsp. mays
  misc_feature (1)..(166): Ceres Seq. ID no. 13598808
  misc_feature (2)..(87): Pfam Name: CRAL/TRIO domain Pfam Description: CRAL/TRIO domain
  misc_feature (2)..(163): Homolog of NCBI NO: 15231434 NR Description: SEC14 cytosolic factor, putative [Arabidopsis
  misc_feature (1)..(166): Homolog of NCBI NO: 29124131 NR Description: unknown protein [Oryza sativa (japonica
FRFPMQMMMSFITVVQENYPNRLGVLFVIRLPPVVRVIAQTFLQVLKPATKQKLRFEGDSYKKALAEFLQAVPAFLGGKCSCPRCESPRDDSVIQAGEGSKKQPRLVSVDDGLPVTDLDFDLDEEIPSPYSCENAIRAAIIGLLMVCIFVAFLAGMIDPASVPASA

SEQ ID NO: 110331 - protein, 162 aa, Zea mays subsp. mays
  misc_feature (1)..(162): Ceres Seq. ID no. 13598809
  misc_feature (1)..(83): Pfam Name: CRAL/TRIO domain Pfam Description: CRAL/TRIO domain
  misc_feature (1)..(159): Homolog of NCBI NO: 15231434 NR Description: SEC14 cytosolic factor, putative [Arabidopsis
  misc_feature (1)..(162): Homolog of NCBI NO: 29124131 NR Description: unknown protein [Oryza sativa (japonica
MQMMMSFITVVQENYPNRLGVLFVIRLPPVVRVIAQTFLQVLKPATKQKLRFEGDSYKKALAEFLQAVPAFLGGKCSCPRCESPRDDSVIQAGEGSKKQPRLVSVDDGLPVTDLDFDLDEEIPSPYSCENAIRAAIIGLLMVCIFVAFLAGMIDPASVPASA

SEQ ID NO: 110332 - protein, 160 aa, Zea mays subsp. mays
  misc_feature (1)..(160): Ceres Seq. ID no. 13598810
  misc_feature (1)..(81): Pfam Name: CRAL/TRIO domain Pfam Description: CRAL/TRIO domain
  misc_feature (1)..(157): Homolog of NCBI NO: 15231434 NR Description: SEC14 cytosolic factor, putative [Arabidopsis
  misc_feature (1)..(160): Homolog of NCBI NO: 29124131 NR Description: unknown protein [Oryza sativa (japonica
MMMSFITVVQENYPNRLGVLFVIRLPPVVRVIAQTFLQVLKPATKQKLRFEGDSYKKALAEFLQAVPAFLGGKCSCPRCESPRDDSVIQAGEGSKKQPRLVSVDDGLPVTDLDFDLDEEIPSPYSCENAIRAAIIGLLMVCIFVAFLAGMIDPASVPASA

SEQ ID NO: 110333 - DNA, 1460 bp, Zea mays subsp. mays
  misc_feature (1)..(1460): Ceres Seq. ID no. 12567001
gcacgagaccattacctagaacatcctaatcgaaaagcatttcttggacccgcacacccacgcttccaaaagttaggaggggaacccatcagccaagagctacgcaaacgcacagcgatgcaccagcacgagataccagccaccatgcgcctgtccctcctcctcgtcatcgtggccgccctctcggcgcgcgccgcggcgcagctgccgccggcgggcggcgccctgaagccggacttctatagccagtcgtgcccgcgcgcggagcggatcattgcggaggtgatgcagacgaagcagatggcgaacccgacgacggccgcgggcctgctccgcgtcttcttccacgactgcttcgtcagcgggtgcgacgcgtcggtgctgatcgcgtccacccagttccagaagtcggagcacgacgcggagatcaaccactccctccccggggacgccttcgacgccgtggtgcgcgccaagctggccctggagctggagtgccccggggtggtgtcctgcgccgacatcctcgcactggcgtcgggcgtgctgatcaccatgaccggcgggccccggtacccggtcccgctggggcgcagggactcgctgtcgtcgtcgcccacggcgcccgacgtggagctgccgcacgccaacttcaccgtggaccgcctcatccagatgttcggcgccaaggggttcacggtgcaggagctggtggcgctgtccggcgcccacacgctgggcttctcccactgcaaggagttcgccgaccgcctctacaacttccgcaaccagggcgggaagccggagcagttcgaccccagcatgaacccgtcctacgccagggggctacaggacgtgtgcagggactacctcaaggaccccaccatcgccgcgttcaacgacatcatgacgcccggcaagttcgacaacatgtacttcgtcaacctcgagcgcggcctcggcctgctcagcaccgacgaggagctgtggacggacccacgcaccaagcccctggtgcagctctatgcatccaacgccaccgccttcttcgacgacttcggccgcgccatggagaagctcagcttgttcggcgtcaagaccggcgccgacggcgaggtcaggcggcgctgcgacgcctacaacagcggccccgccgtcgccgccaccatacccaagatgtgacgacgctgcgcgtggtacgacgacgggcgcgcacgtgcttgtctgcatgcggatcgatcgacggccgagctgtctggcacgacgacggcgtgttgatcgagggcctcggctcctccagctgcgacggttcacgatggtgttaagatttcgtgccgaaatgtgatatgtttcatgctcgatcaagtaatttattcctaatctgtgtgctgcgcaaaagaaagaaaaacttcgaagtgttgcgctactcgctagtatgaattaattcgtttttccctttg

SEQ ID NO: 110334 - protein, 393 aa, Zea mays subsp. mays
  misc_feature (1)..(393): Ceres Seq. ID no. 12567002
  misc_feature (50)..(381): Homolog of NCBI NO: 15235600 NR Description: peroxidase, putative
  misc_feature (99)..(381): Homolog of NCBI NO: 1890317 NR Description: peroxidase ATP26a [Arabidopsis thaliana]
  misc_feature (49)..(381): Homolog of NCBI NO: 15242580 NR Description: peroxidase, putative; protein id: At5g40150.1
  misc_feature (72)..(381): Homolog of NCBI NO: 14334600 NR Description: putative peroxidase [Arabidopsis thaliana]
  misc_feature (76)..(381): Homolog of NCBI NO: 15221670 NR Description: peroxidase, putative; protein id: At1g24110.1
  misc_feature (72)..(381): Homolog of NCBI NO: 15232929 NR Description: peroxidase, putative
  misc_feature (51)..(381): Homolog of NCBI NO: 15236620 NR Description: peroxidase, putative; protein id: At4g17690.1
  misc_feature (76)..(382): Homolog of NCBI NO: 21593687 NR Description: peroxidase [Arabidopsis thaliana]
  misc_feature (76)..(382): Homolog of NCBI NO: 18422742 NR Description: peroxidase, putative
  misc_feature (76)..(382): Homolog of NCBI NO: 9759442 NR Description: peroxidase [Arabidopsis thaliana]
ARDHYLEHPNRKAFLGPAHPRFQKLGGEPISQELRKRTAMHQHEIPATMRLSLLLVIVAALSARAAAQLPPAGGALKPDFYSQSCPRAERIIAEVMQTKQMANPTTAAGLLRVFFHDCFVSGCDASVLIASTQFQKSEHDAEINHSLPGDAFDAVVRAKLALELECPGVVSCADILALASGVLITMTGGPRYPVPLGRRDSLSSSPTAPDVELPHANFTVDRLIQMFGAKGFTVQELVALSGAHTLGFSHCKEFADRLYNFRNQGGKPEQFDPSMNPSYARGLQDVCRDYLKDPTIAAFNDIMTPGKFDNMYFVNLERGLGLLSTDEELWTDPRTKPLVQLYASNATAFFDDFGRAMEKLSLFGVKTGADGEVRRRCDAYNSGPAVAATIPKM

SEQ ID NO: 110335 - protein, 354 aa, Zea mays subsp. mays
  misc_feature (1)..(354): Ceres Seq. ID no. 12567003
  misc_feature (11)..(342): Homolog of NCBI NO: 15235600 NR Description: peroxidase, putative
  misc_feature (60)..(342): Homolog of NCBI NO: 1890317 NR Description: peroxidase ATP26a [Arabidopsis thaliana]
  misc_feature (10)..(342): Homolog of NCBI NO: 15242580 NR Description: peroxidase, putative; protein id: At5g40150.1
  misc_feature (33)..(342): Homolog of NCBI NO: 14334600 NR Description: putative peroxidase [Arabidopsis thaliana]
  misc_feature (37)..(342): Homolog of NCBI NO: 15221670 NR Description: peroxidase, putative; protein id: At1g24110.1
  misc_feature (33)..(342): Homolog of NCBI NO: 15232929 NR Description: peroxidase, putative
  misc_feature (12)..(342): Homolog of NCBI NO: 15236620 NR Description: peroxidase, putative; protein id: At4g17690.1
  misc_feature (37)..(343): Homolog of NCBI NO: 18422742 NR Description: peroxidase, putative
  misc_feature (37)..(343): Homolog of NCBI NO: 21593687 NR Description: peroxidase [Arabidopsis thaliana]
  misc_feature (37)..(343): Homolog of NCBI NO: 9759442 NR Description: peroxidase [Arabidopsis thaliana]
MHQHEIPATMRLSLLLVIVAALSARAAAQLPPAGGALKPDFYSQSCPRAERIIAEVMQTKQMANPTTAAGLLRVFFHDCFVSGCDASVLIASTQFQKSEHDAEINHSLPGDAFDAVVRAKLALELECPGVVSCADILALASGVLITMTGGPRYPVPLGRRDSLSSSPTAPDVELPHANFTVDRLIQMFGAKGFTVQELVALSGAHTLGFSHCKEFADRLYNFRNQGGKPEQFDPSMNPSYARGLQDVCRDYLKDPTIAAFNDIMTPGKFDNMYFVNLERGLGLLSTDEELWTDPRTKPLVQLYASNATAFFDDFGRAMEKLSLFGVKTGADGEVRRRCDAYNSGPAVAATIPKM

SEQ ID NO: 110336 - protein, 345 aa, Zea mays subsp. mays
  misc_feature (1)..(345): Ceres Seq. ID no. 12567004
  misc_feature (2)..(333): Homolog of NCBI NO: 15235600 NR Description: peroxidase, putative
  misc_feature (51)..(333): Homolog of NCBI NO: 1890317 NR Description: peroxidase ATP26a [Arabidopsis thaliana]
  misc_feature (1)..(333): Homolog of NCBI NO: 15242580 NR Description: peroxidase, putative; protein id: At5g40150.1
  misc_feature (24)..(333): Homolog of NCBI NO: 14334600 NR Description: putative peroxidase [Arabidopsis thaliana]
  misc_feature (28)..(333): Homolog of NCBI NO: 15221670 NR Description: peroxidase, putative; protein id: At1g24110.1
  misc_feature (24)..(333): Homolog of NCBI NO: 15232929 NR Description: peroxidase, putative
  misc_feature (3)..(333): Homolog of NCBI NO: 15236620 NR Description: peroxidase, putative; protein id: At4g17690.1
  misc_feature (28)..(334): Homolog of NCBI NO: 21593687 NR Description: peroxidase [Arabidopsis thaliana]
  misc_feature (28)..(334): Homolog of NCBI NO: 18422742 NR Description: peroxidase, putative
  misc_feature (28)..(334): Homolog of NCBI NO: 9759442 NR Description: peroxidase [Arabidopsis thaliana]
MRLSLLLVIVAALSARAAAQLPPAGGALKPDFYSQSCPRAERIIAEVMQTKQMANPTTAAGLLRVFFHDCFVSGCDASVLIASTQFQKSEHDAEINHSLPGDAFDAVVRAKLALELECPGVVSCADILALASGVLITMTGGPRYPVPLGRRDSLSSSPTAPDVELPHANFTVDRLIQMFGAKGFTVQELVALSGAHTLGFSHCKEFADRLYNFRNQGGKPEQFDPSMNPSYARGLQDVCRDYLKDPTIAAFNDIMTPGKFDNMYFVNLERGLGLLSTDEELWTDPRTKPLVQLYASNATAFFDDFGRAMEKLSLFGVKTGADGEVRRRCDAYNSGPAVAATIPKM

SEQ ID NO: 110337 - DNA, 844 bp, Zea mays subsp. mays
  misc_feature (1)..(844): Ceres Seq. ID no. 13598823
  misc_feature: MA Experiment ID: 108504 Result: Up-regulated in Transcription
  misc_feature: MA Experiment 108504 PARAMETER Experiment Name: Zm_Drought_P Parameter: Age (day) Value: 8
  misc_feature: MA Experiment 108504 PARAMETER Experiment Name: Zm_Drought_P Parameter: Organism Value: Zea mays
  misc_feature: MA Experiment 108504 PARAMETER Experiment Name: Zm_Drought_P Parameter: Plant Line Value: 35A19
  misc_feature: MA Experiment 108504 PARAMETER Experiment Name: Zm_Drought_P Parameter: Timepoint (hr) Value: 12
  misc_feature: MA Experiment 108504 PARAMETER Experiment Name: Zm_Drought_P Parameter: Tissue Value: Aerial
  misc_feature: MA Experiment 108504 PARAMETER Experiment Name: Zm_Drought_P Parameter: Treatment Value: Drought vs. No Drought
  misc_feature: MA Experiment ID: 108535 Result: Up-regulated in Transcription
  misc_feature: MA Experiment 108535 PARAMETER Experiment Name: Zm_Meristem_P Parameter: Age (day) Value: 8
  misc_feature: MA Experiment 108535 PARAMETER Experiment Name: Zm_Meristem_P Parameter: Organism Value: Zea mays
  misc_feature: MA Experiment 108535 PARAMETER Experiment Name: Zm_Meristem_P Parameter: Plant Line Value: 35A19
  misc_feature: MA Experiment 108535 PARAMETER Experiment Name: Zm_Meristem_P Parameter: Tissue Value: Root Meristem vs. Above Root Meristem
  misc_feature: MA Experiment ID: 108539 Result: Up-regulated in Transcription
  misc_feature: MA Experiment 108539 PARAMETER Experiment Name: Zm_20percent_PEG_P Parameter: Age (day) Value: 8
  misc_feature: MA Experiment 108539 PARAMETER Experiment Name: Zm_20percent_PEG_P Parameter: Organism Value: Zea mays
  misc_feature: MA Experiment 108539 PARAMETER Experiment Name: Zm_20percent_PEG_P Parameter: Plant Line Value: 35A19
  misc_feature: MA Experiment 108539 PARAMETER Experiment Name: Zm_20percent_PEG_P Parameter: Timepoint (hr) Value: 1
  misc_feature: MA Experiment 108539 PARAMETER Experiment Name: Zm_20percent_PEG_P Parameter: Tissue Value: Aerial
  misc_feature: MA Experiment 108539 PARAMETER Experiment Name: Zm_20percent_PEG_P Parameter: Treatment Value: 20percent PEG vs. No Treatment
  misc_feature: MA Experiment ID: 108540 Result: Up-regulated in Transcription
  misc_feature: MA Experiment 108540 PARAMETER Experiment Name: Zm_20percent_PEG_P Parameter: Age (day) Value: 8
  misc_feature: MA Experiment 108540 PARAMETER Experiment Name: Zm_20percent_PEG_P Parameter: Organism Value: Zea mays
  misc_feature: MA Experiment 108540 PARAMETER Experiment Name: Zm_20percent_PEG_P Parameter: Plant Line Value: 35A19
  misc_feature: MA Experiment 108540 PARAMETER Experiment Name: Zm_20percent_PEG_P Parameter: Timepoint (hr) Value: 6
  misc_feature: MA Experiment 108540 PARAMETER Experiment Name: Zm_20percent_PEG_P Parameter: Tissue Value: Aerial
  misc_feature: MA Experiment 108540 PARAMETER Experiment Name: Zm_20percent_PEG_P Parameter: Treatment Value: 20percent PEG vs. No Treatment
  misc_feature: MA Experiment ID: 108556 Result: Up-regulated in Transcription
  misc_feature: MA Experiment 108556 PARAMETER Experiment Name: Zm_Drought_P Parameter: Age (day) Value: 9
  misc_feature: MA Experiment 108556 PARAMETER Experiment Name: Zm_Drought_P Parameter: Organism Value: Zea mays
  misc_feature: MA Experiment 108556 PARAMETER Experiment Name: Zm_Drought_P Parameter: Plant Line Value: 35A19
  misc_feature: MA Experiment 108556 PARAMETER Experiment Name: Zm_Drought_P Parameter: Timepoint (hr) Value: 24
  misc_feature: MA Experiment 108556 PARAMETER Experiment Name: Zm_Drought_P Parameter: Tissue Value: Aerial
  misc_feature: MA Experiment 108556 PARAMETER Experiment Name: Zm_Drought_P Parameter: Treatment Value: Drought vs. No Drought
  misc_feature: MA Experiment ID: 108597 Result: Up-regulated in Transcription
  misc_feature: MA Experiment 108597 PARAMETER Experiment Name: Zm_100uM_ABA_P Parameter: Age (day) Value: 9
  misc_feature: MA Experiment 108597 PARAMETER Experiment Name: Zm_100uM_ABA_P Parameter: Organism Value: Zea mays
  misc_feature: MA Experiment 108597 PARAMETER Experiment Name: Zm_100uM_ABA_P Parameter: Plant Line Value: 35A19
  misc_feature: MA Experiment 108597 PARAMETER Experiment Name: Zm_100uM_ABA_P Parameter: Timepoint (hr) Value: 24
  misc_feature: MA Experiment 108597 PARAMETER Experiment Name: Zm_100uM_ABA_P Parameter: Tissue Value: Aerial
  misc_feature: MA Experiment 108597 PARAMETER Experiment Name: Zm_100uM_ABA_P Parameter: Treatment Value: 100uM ABA vs. No Treatment
  misc_feature: MA Experiment ID: 108689 Result: Up-regulated in Transcription
  misc_feature: MA Experiment 108689 PARAMETER Experiment Name: Zm_Drought_Roots_P Parameter: Age (day) Value: 9
  misc_feature: MA Experiment 108689 PARAMETER Experiment Name: Zm_Drought_Roots_P Parameter: Organism Value: Zea mays
  misc_feature: MA Experiment 108689 PARAMETER Experiment Name: Zm_Drought_Roots_P Parameter: Plant Line Value: 35A19
  misc_feature: MA Experiment 108689 PARAMETER Experiment Name: Zm_Drought_Roots_P Parameter: Timepoint (hr) Value: 24
  misc_feature: MA Experiment 108689 PARAMETER Experiment Name: Zm_Drought_Roots_P Parameter: Tissue Value: Roots
  misc_feature: MA Experiment 108689 PARAMETER Experiment Name: Zm_Drought_Roots_P Parameter: Treatment Value: Drought vs. No Drought
  misc_feature: MA Experiment ID: 20000479 Result: Up-regulated in Transcription
  misc_feature: MA Experiment 20000479 PARAMETER Experiment Name: Zm_Drought_P Parameter: Age (day) Value: 10
  misc_feature: MA Experiment 20000479 PARAMETER Experiment Name: Zm_Drought_P Parameter: Organism Value: Zea mays
  misc_feature: MA Experiment 20000479 PARAMETER Experiment Name: Zm_Drought_P Parameter: Plant Line Value: 35A19
  misc_feature: MA Experiment 20000479 PARAMETER Experiment Name: Zm_Drought_P Parameter: Timepoint (hr) Value: 48
  misc_feature: MA Experiment 20000479 PARAMETER Experiment Name: Zm_Drought_P Parameter: Tissue Value: Aerial
  misc_feature: MA Experiment 20000479 PARAMETER Experiment Name: Zm_Drought_P Parameter: Treatment Value: Drought vs. No Drought
  misc_feature: MA Experiment ID: 20000480 Result: Up-regulated in Transcription
  misc_feature: MA Experiment 20000480 PARAMETER Experiment Name: Zm_Drought_P Parameter: Age (day) Value: 11
  misc_feature: MA Experiment 20000480 PARAMETER Experiment Name: Zm_Drought_P Parameter: Organism Value: Zea mays
  misc_feature: MA Experiment 20000480 PARAMETER Experiment Name: Zm_Drought_P Parameter: Plant Line Value: 35A19
  misc_feature: MA Experiment 20000480 PARAMETER Experiment Name: Zm_Drought_P Parameter: Timepoint (hr) Value: 72
  misc_feature: MA Experiment 20000480 PARAMETER Experiment Name: Zm_Drought_P Parameter: Tissue Value: Aerial
  misc_feature: MA Experiment 20000480 PARAMETER Experiment Name: Zm_Drought_P Parameter: Treatment Value: Drought vs. No Drought
accaacgccgagctgtgagataggatgggcaagctgtggacgatcctcactcacctccactcccttgcagggccaacggtgatgctgctgtaccctctgtacgcgtccgtgcgggcgatggagagcccgtccaagctggacgacgagcagtggctcgcctactggatcctctactccttcgtcacgctcatggagatgctcctcgagtccctcatatactggatccccatctggtacgagctcaagctgctgttcatcgcgtggctcgtgctccccaacttcaggggcgccgccttcatctacgacaagttcgtgcgcgagcagctccggaagcacggcctcaccgccgccggctccgtcaagtcgtcgtcgccgtcgtccaaggacaaggacaagcccaagaacaagttcctcgccttcgtcacgcccaagaaggatcatgaagcttactgaagtgggttgcagtgatcccattcctggaccatgtcccggcaacctgtagctgtagtgcactccactagatttctgttgtgtttgttctcgacttgaaatagagcctgtacgatgtgtgtatggccattctgtatgtgtgagcatcaactctaacatggaatggagacaagagccaawwgtttaaamamaawaaagtkggaactggaggggggaaaaaaaaaaaaaaaaaaaaaaaaaaaaaaaaaaaaaaaaaaaaaaaaaaaaaaaaaaaattaaaaaaaaaaaaaaaaattttcgaaccsgssaaccccgggggggggcccggaccccaattcccccaaaagggggccgaataacgcccgcccccgggccgccgtttaacaacgccggg

SEQ ID NO: 110338 - protein, 142 aa, Zea mays subsp. mays
  misc_feature (1)..(142): Ceres Seq. ID no. 15222429
  misc_feature (5)..(101): Pfam Name: TB2/DP1, HVA22 family Pfam Description: TB2/DP1, HVA22 family
  misc_feature (4)..(98): Homolog of NCBI NO: 15221266 NR Description: AtHVA22a [Arabidopsis thaliana]
  misc_feature (20)..(132): Homolog of NCBI NO: 7484787 NR Description: abscisic acid-induced protein homolog F13M23.100
  misc_feature (20)..(106): Homolog of NCBI NO: 8777395 NR Description: gene_id:MFB16.12~pir||T05517~similar to unknown
  misc_feature (1)..(118): Homolog of NCBI NO: 18416458 NR Description: abscisic acid-induced - like protein [Arabidopsis
  misc_feature (7)..(101): Homolog of NCBI NO: 4884934 NR Description: AtHVA22b [Arabidopsis thaliana]
  misc_feature (7)..(101): Homolog of NCBI NO: 15241840 NR Description: AtHVA22b-related protein [Arabidopsis thaliana]
  misc_feature (4)..(98): Homolog of NCBI NO: 15222421 NR Description: AtHVA22c [Arabidopsis thaliana]
  misc_feature (1)..(106): Homolog of NCBI NO: 18423191 NR Description: expressed protein [Arabidopsis thaliana]
  misc_feature (1)..(104): Homolog of NCBI NO: 1076715 NR Description: abscisic acid-induced protein HVA22 - barley
  misc_feature (1)..(104): Homolog of NCBI NO: 33342176 NR Description: hypothetical protein [Triticum aestivum]
MGKLWTILTHLHSLAGPTVMLLYPLYASVRAMESPSKLDDEQWLAYWILYSFVTLMEMLLESLIYWIPIWYELKLLFIAWLVLPNFRGAAFIYDKFVREQLRKHGLTAAGSVKSSSPSSKDKDKPKNKFLAFVTPKKDHEAY

SEQ ID NO: 110339 - protein, 123 aa, Zea mays subsp. mays
  misc_feature (1)..(123): Ceres Seq. ID no. 15222430
  misc_feature (1)..(82): Pfam Name: TB2/DP1, HVA22 family Pfam Description: TB2/DP1, HVA22 family
  misc_feature (1)..(79): Homolog of NCBI NO: 15222421 NR Description: AtHVA22c [Arabidopsis thaliana]
  misc_feature (1)..(82): Homolog of NCBI NO: 4884934 NR Description: AtHVA22b [Arabidopsis thaliana]
  misc_feature (1)..(82): Homolog of NCBI NO: 15241840 NR Description: AtHVA22b-related protein [Arabidopsis thaliana]
  misc_feature (1)..(79): Homolog of NCBI NO: 15221266 NR Description: AtHVA22a [Arabidopsis thaliana]
  misc_feature (1)..(113): Homolog of NCBI NO: 7484787 NR Description: abscisic acid-induced protein homolog F13M23.100
  misc_feature (1)..(87): Homolog of NCBI NO: 8777395 NR Description: gene_id:MFB16.12~pir||T05517~similar to unknown
  misc_feature (1)..(99): Homolog of NCBI NO: 18416458 NR Description: abscisic acid-induced - like protein [Arabidopsis
  misc_feature (1)..(87): Homolog of NCBI NO: 18423191 NR Description: expressed protein [Arabidopsis thaliana]
  misc_feature (1)..(85): Homolog of NCBI NO: 1076715 NR Description: abscisic acid-induced protein HVA22 - barley
  misc_feature (1)..(85): Homolog of NCBI NO: 33342176 NR Description: hypothetical protein [Triticum aestivum]
MLLYPLYASVRAMESPSKLDDEQWLAYWILYSFVTLMEMLLESLIYWIPIWYELKLLFIAWLVLPNFRGAAFIYDKFVREQLRKHGLTAAGSVKSSSPSSKDKDKPKNKFLAFVTPKKDHEAY

SEQ ID NO: 110340 - protein, 111 aa, Zea mays subsp. mays
  misc_feature (1)..(111): Ceres Seq. ID no. 15222431
  misc_feature (1)..(70): Pfam Name: TB2/DP1, HVA22 family Pfam Description: TB2/DP1, HVA22 family
  misc_feature (1)..(67): Homolog of NCBI NO: 15222421 NR Description: AtHVA22c [Arabidopsis thaliana]
  misc_feature (1)..(70): Homolog of NCBI NO: 4884934 NR Description: AtHVA22b [Arabidopsis thaliana]
  misc_feature (1)..(70): Homolog of NCBI NO: 15241840 NR Description: AtHVA22b-related protein [Arabidopsis thaliana]
  misc_feature (1)..(67): Homolog of NCBI NO: 15221266 NR Description: AtHVA22a [Arabidopsis thaliana]
  misc_feature (1)..(101): Homolog of NCBI NO: 7484787 NR Description: abscisic acid-induced protein homolog F13M23.100
  misc_feature (1)..(75): Homolog of NCBI NO: 8777395 NR Description: gene_id:MFB16.12~pir||T05517~similar to unknown
  misc_feature (1)..(87): Homolog of NCBI NO: 18416458 NR Description: abscisic acid-induced - like protein [Arabidopsis
  misc_feature (1)..(75): Homolog of NCBI NO: 18423191 NR Description: expressed protein [Arabidopsis thaliana]
  misc_feature (1)..(73): Homolog of NCBI NO: 1076715 NR Description: abscisic acid-induced protein HVA22 - barley
  misc_feature (1)..(73): Homolog of NCBI NO: 33342176 NR Description: hypothetical protein [Triticum aestivum]
MESPSKLDDEQWLAYWILYSFVTLMEMLLESLIYWIPIWYELKLLFIAWLVLPNFRGAAFIYDKFVREQLRKHGLTAAGSVKSSSPSSKDKDKPKNKFLAFVTPKKDHEAY

SEQ ID NO: 110341 - DNA, 1069 bp, Zea mays subsp. mays
  misc_feature (1)..(1069): Ceres Seq. ID no. 15180167
  misc_feature: MA Experiment ID: 108535 Result: Up-regulated in Transcription
  misc_feature: MA Experiment 108535 PARAMETER Experiment Name: Zm_Meristem_P Parameter: Age (day) Value: 8
  misc_feature: MA Experiment 108535 PARAMETER Experiment Name: Zm_Meristem_P Parameter: Organism Value: Zea mays
  misc_feature: MA Experiment 108535 PARAMETER Experiment Name: Zm_Meristem_P Parameter: Plant Line Value: 35A19
  misc_feature: MA Experiment 108535 PARAMETER Experiment Name: Zm_Meristem_P Parameter: Tissue Value: Root Meristem vs. Above Root Meristem
  misc_feature: MA Experiment ID: 20000488 Result: Up-regulated in Transcription
  misc_feature: MA Experiment 20000488 PARAMETER Experiment Name: Zm_50mM_NH4NO3_L_to_H_P Parameter: Organism Value: Zea mays
  misc_feature: MA Experiment 20000488 PARAMETER Experiment Name: Zm_50mM_NH4NO3_L_to_H_P Parameter: Timepoint (hr) Value: 8
  misc_feature: MA Experiment 20000488 PARAMETER Experiment Name: Zm_50mM_NH4NO3_L_to_H_P Parameter: Tissue Value: Leaves
  misc_feature: MA Experiment 20000488 PARAMETER Experiment Name: Zm_50mM_NH4NO3_L_to_H_P Parameter: Treatment Value: 50mM NH4NO3 vs. 100mM Mannitol
  misc_feature: MA Experiment ID: 20000492 Result: Up-regulated in Transcription
  misc_feature: MA Experiment 20000492 PARAMETER Experiment Name: Zm_Hybrid_Seed_Dev_P Parameter: DAP Value: 12
  misc_feature: MA Experiment 20000492 PARAMETER Experiment Name: Zm_Hybrid_Seed_Dev_P Parameter: Organism Value: Zea mays
  misc_feature: MA Experiment 20000492 PARAMETER Experiment Name: Zm_Hybrid_Seed_Dev_P Parameter: Plant Line Value: 35A19
  misc_feature: MA Experiment 20000492 PARAMETER Experiment Name: Zm_Hybrid_Seed_Dev_P Parameter: Tissue Value: Fert Kernel vs. Unfert Floret
  misc_feature: MA Experiment ID: 20000626 Result: Up-regulated in Transcription
  misc_feature: MA Experiment 20000626 PARAMETER Experiment Name: Zm_Herbicide-Treatments_P Parameter: Timepoint (hr) Value: 12
  misc_feature: MA Experiment 20000626 PARAMETER Experiment Name: Zm_Herbicide-Treatments_P Parameter: Tissue Value: Aerial
  misc_feature: MA Experiment 20000626 PARAMETER Experiment Name: Zm_Herbicide-Treatments_P Parameter: Treatment Value: Roundup vs. No Treatment
  misc_feature: MA Experiment ID: 20001606 Result: Up-regulated in Transcription
  misc_feature: MA Experiment 20001606 PARAMETER Experiment Name: Zm_50ppm_KNO3_L-to-H_P Parameter: Age (day) Value: 19
  misc_feature: MA Experiment 20001606 PARAMETER Experiment Name: Zm_50ppm_KNO3_L-to-H_P Parameter: Organism Value: Zea mays
  misc_feature: MA Experiment 20001606 PARAMETER Experiment Name: Zm_50ppm_KNO3_L-to-H_P Parameter: Plant Line Value: 35A19
  misc_feature: MA Experiment 20001606 PARAMETER Experiment Name: Zm_50ppm_KNO3_L-to-H_P Parameter: Timepoint (hr) Value: 8
  misc_feature: MA Experiment 20001606 PARAMETER Experiment Name: Zm_50ppm_KNO3_L-to-H_P Parameter: Tissue Value: Shoots
  misc_feature: MA Experiment 20001606 PARAMETER Experiment Name: Zm_50ppm_KNO3_L-to-H_P Parameter: Treatment Value: 50ppm KNO3 vs. 50ppm KCl
acgccctgttgccttctctcgacttcgagagcaccgccgcacggcatagcgcggctcgcacggccgagccccgacattctaccgcactccttccgctgcacccctttccattctaccgccggcgacgccaaagttcttgggcctcctcatcggctacctttccgccggcgacaggaaacaacgaaccaaaccacttctctgtcgagaggcttcgcgctcctctcttcgccctctgctgttatttttcttaacccggctttccctcgattgctgcgtaatgaggaagctcaagttccatgagcagaagctcctcaagaggcacaatttcttggagtacaagagggagggcggccaccgcgaggcgctcgtcacacagcgctaccgcctcgtggagagggacgactacaagaagtacaatgggatatgcttaatggtgcaaaagctcgttaacatcataaagcagatggacccaagagaccctttcagaatccagatgacagacttgattctcgataagctgtataatatgggtgtaatttcaacaaaagagagcttgttaaagtgtgagaaactttcagtgagcgccttctgcaggcggagacttgcaacagttatggtgaagctcaagtttgcagagcaccttaaggaggctgtgacgtacatcgaacaggggcatgtgcgtgtcggtccagatgcagtcacggacccagcctttcttgtgaccagaaacatggaggacttcatcacctgggtggattcctcaaagatcaagaggaaggtcatggagtacaatgatgcattagatgattatgatgccatgttctgagaaaatcattctgcagaaatttatgtgcccgtcagtagtgtaatcttaagcctgccacatatgggtcttttctgaagaaatctgtgggagttgtcttctgcagggctacttgcatttgtattgcacctgcagatgtgatgcaattttgtggttggttgaaggcacattataaattcatatctgatgtagttgtgcaattgtctttgttaaagagcgggtttgcccggatttcccctagtctgc

SEQ ID NO: 110342 - protein, 182 aa, Zea mays subsp. mays
  misc_feature (1)..(182): Ceres Seq. ID no. 15180168
  misc_feature (1)..(106): Pfam Name: Ribosomal protein S4/S9 N-terminal domain Pfam Description: Ribosomal protein S4/S9 N-terminal domain
  misc_feature (116)..(182): Homolog of NCBI NO: 37540310 NR Description: similar to chromosome 15 open reading frame 12
  misc_feature (1)..(181): Homolog of NCBI NO: 39595782 NR Description: Hypothetical protein CBG12733 [Caenorhabditis
  misc_feature (1)..(179): Homolog of NCBI NO: 8922794 NR Description: chromosome 15 open reading frame 12
  misc_feature (1)..(179): Homolog of NCBI NO: 34864645 NR Description: similar to RIKEN cDNA 1190002L16 [Rattus
  misc_feature (1)..(179): Homolog of NCBI NO: 6321942 NR Description: part of small (ribosomal) subunit (SSU)
  misc_feature (1)..(179): Homolog of NCBI NO: 19527196 NR Description: RIKEN cDNA 1190002L16; U3 snoRNP protein 3
  misc_feature (1)..(181): Homolog of NCBI NO: 11358773 NR Description: ribosomal protein-like - Arabidopsis thaliana
  misc_feature (1)..(181): Homolog of NCBI NO: 21554411 NR Description: ribosomal protein-like [Arabidopsis thaliana]
  misc_feature (1)..(181): Homolog of NCBI NO: 18417773 NR Description: ribosomal protein S4/S9 related [Arabidopsis
  misc_feature (1)..(181): Homolog of NCBI NO: 38346067 NR Description: OSJNBa0084K01.7 [Oryza sativa (japonica
MRKLKFHEQKLLKRHNFLEYKREGGHREALVTQRYRLVERDDYKKYNGICLMVQKLVNIIKQMDPRDPFRIQMTDLILDKLYNMGVISTKESLLKCEKLSVSAFCRRRLATVMVKLKFAEHLKEAVTYIEQGHVRVGPDAVTDPAFLVTRNMEDFITWVDSSKIKRKVMEYNDALDDYDAMF

SEQ ID NO: 110343 - protein, 131 aa, Zea mays subsp. mays
  misc_feature (1)..(131): Ceres Seq. ID no. 15180169
  misc_feature (1)..(55): Pfam Name: Ribosomal protein S4/S9 N-terminal domain Pfam Description: Ribosomal protein S4/S9 N-terminal domain
  misc_feature (65)..(131): Homolog of NCBI NO: 37540310 NR Description: similar to chromosome 15 open reading frame 12
  misc_feature (1)..(130): Homolog of NCBI NO: 39595782 NR Description: Hypothetical protein CBG12733 [Caenorhabditis
  misc_feature (1)..(128): Homolog of NCBI NO: 8922794 NR Description: chromosome 15 open reading frame 12
  misc_feature (1)..(128): Homolog of NCBI NO: 34864645 NR Description: similar to RIKEN cDNA 1190002L16 [Rattus
  misc_feature (1)..(128): Homolog of NCBI NO: 6321942 NR Description: part of small (ribosomal) subunit (SSU)
  misc_feature (1)..(128): Homolog of NCBI NO: 19527196 NR Description: RIKEN cDNA 1190002L16; U3 snoRNP protein 3
  misc_feature (1)..(130): Homolog of NCBI NO: 11358773 NR Description: ribosomal protein-like - Arabidopsis thaliana
  misc_feature (1)..(130): Homolog of NCBI NO: 21554411 NR Description: ribosomal protein-like [Arabidopsis thaliana]
  misc_feature (1)..(130): Homolog of NCBI NO: 18417773 NR Description: ribosomal protein S4/S9 related [Arabidopsis
  misc_feature (1)..(130): Homolog of NCBI NO: 38346067 NR Description: OSJNBa0084K01.7 [Oryza sativa (japonica
MVQKLVNIIKQMDPRDPFRIQMTDLILDKLYNMGVISTKESLLKCEKLSVSAFCRRRLATVMVKLKFAEHLKEAVTYIEQGHVRVGPDAVTDPAFLVTRNMEDFITWVDSSKIKRKVMEYNDALDDYDAMF

SEQ ID NO: 110344 - protein, 120 aa, Zea mays subsp. mays
  misc_feature (1)..(120): Ceres Seq. ID no. 15180170
  misc_feature (45)..(92): Pfam Name: S4 domain Pfam Description: S4 domain
  misc_feature (54)..(120): Homolog of NCBI NO: 37540310 NR Description: similar to chromosome 15 open reading frame 12
  misc_feature (1)..(119): Homolog of NCBI NO: 39595782 NR Description: Hypothetical protein CBG12733 [Caenorhabditis
  misc_feature (1)..(117): Homolog of NCBI NO: 34864645 NR Description: similar to RIKEN cDNA 1190002L16 [Rattus
  misc_feature (1)..(117): Homolog of NCBI NO: 8922794 NR Description: chromosome 15 open reading frame 12
  misc_feature (1)..(117): Homolog of NCBI NO: 6321942 NR Description: part of small (ribosomal) subunit (SSU)
  misc_feature (1)..(117): Homolog of NCBI NO: 19527196 NR Description: RIKEN cDNA 1190002L16; U3 snoRNP protein 3
  misc_feature (1)..(119): Homolog of NCBI NO: 11358773 NR Description: ribosomal protein-like - Arabidopsis thaliana
  misc_feature (1)..(119): Homolog of NCBI NO: 21554411 NR Description: ribosomal protein-like [Arabidopsis thaliana]
  misc_feature (1)..(119): Homolog of NCBI NO: 18417773 NR Description: ribosomal protein S4/S9 related [Arabidopsis
  misc_feature (1)..(119): Homolog of NCBI NO: 38346067 NR Description: OSJNBa0084K01.7 [Oryza sativa (japonica
MDPRDPFRIQMTDLILDKLYNMGVISTKESLLKCEKLSVSAFCRRRLATVMVKLKFAEHLKEAVTYIEQGHVRVGPDAVTDPAFLVTRNMEDFITWVDSSKIKRKVMEYNDALDDYDAMF

SEQ ID NO: 110345 - DNA, 1490 bp, Zea mays subsp. mays
  misc_feature (1)..(1490): Ceres Seq. ID no. 14309641
actccccgcgccacgcgcctgactgggtgcactgcactggtggtgtgcacgcccctcgtcagtcgtcactcactcgctaccccatatcccattccccccgacggcgcctctggcagcaaggaacaatatgtccaatagggccacccattggtgttatgcctgtcagcgcccaattcgtcttcgcgggcaggatatcatatgtcccaactgcagtgatggttttatccaagaaatcagtgagatgggtggcgtactgaacacttatgggctaactgaaccggactttgaagagcgccaggccagaagatttggaatgatggatgccatatcttccctcatgcggcaacggctgtcagaaataggaagggatagtttgtttgatattcacggtagacaagggacaggtactgaatatggaaggaggtcaactgctattcctacgctggtatttggtggcatcccttctcctgcagttggtagcagtgatgtcaatgttgtcatcagggaaggccgcagagctggcgctgcccgtccgaatttcagtagcttagttgttggtcccagtctggaagctctatttgagcagctactactccagaacaaccgtcaaggcccaccacctgctccacagtcagctattgactccatgcctgtggtaaagataaatcgcaggcatcttgacgaagatccacagtgtgcagtttgcaaagacaaattcgaggttggagcagaggcgcgggagatgccgtgcaagcacttgtaccatactgactgcatcatcccctggctggttcagcacaactcctgccctgtttgccgtcatccgctgccatcacagcgatcaggcagtagtaccagcagcgcccgtgtgccttcagcatactacaacgaaacagctgatcctcctgcggtcgccagggcagatttggatcctgtgccttcagcatactacaacgaaacagcggatcctcctgcggtcaccagagcatatttcgatcctgctccaggaaactacggcagcgaaagccaggaaagtcacgaccccttctcctttctctggccatttggcccgtcgagttcttaccaatatgaagaaaatgttgatgaacctgcagtatacgatccaaaccatatagcatattctgcatggcactatgaccactgactgaaaccctgagttaaagtcaagatatctgcaattcgtgccttgagctctcagctttggtgaggcaaagggctgcttgccgtataaaaaatggatggttattgtgttcagtgcatacccttgctacgcatgtccgttgtggagatatcagctgtgtatagaactgggcgcaacaaactctgctgtaatgcccgtatatattccttttcggtatatcaagtctaaagctatagtgcataagtgctgtaatcggtgaactgagtgcatccagaatatcatgtcatggtaaacataattataattacatggttgtctttttagactg

SEQ ID NO: 110346 - protein, 345 aa, Zea mays subsp. mays
  misc_feature (1)..(345): Ceres Seq. ID no. 14309642
  misc_feature (190)..(230): Pfam Name: Zinc finger, C3HC4 type (RING finger) Pfam Description: Zinc finger, C3HC4 type (RING finger)
  misc_feature (147)..(242): Homolog of NCBI NO: 37622892 NR Description: ring finger protein 126 isoform 1 [Homo sapiens]
  misc_feature (22)..(235): Homolog of NCBI NO: 15219060 NR Description: hypothetical protein [Arabidopsis thaliana]
  misc_feature (135)..(241): Homolog of NCBI NO: 22655083 NR Description: putative RING zinc finger protein [Arabidopsis
  misc_feature (2)..(38): Homolog of NCBI NO: 34902106 NR Description: unknown protein [Oryza sativa (japonica
  misc_feature (89)..(246): Homolog of NCBI NO: 34902106 NR Description: unknown protein [Oryza sativa (japonica
  misc_feature (8)..(236): Homolog of NCBI NO: 15231003 NR Description: expressed protein [Arabidopsis thaliana]
  misc_feature (8)..(236): Homolog of NCBI NO: 11994207 NR Description: gene_id:MPN9.20~unknown protein [Arabidopsis
  misc_feature (2)..(247): Homolog of NCBI NO: 18410530 NR Description: expressed protein [Arabidopsis thaliana]
  misc_feature (2)..(257): Homolog of NCBI NO: 18405518 NR Description: RING-H2 finger protein (RHC1a) [Arabidopsis
  misc_feature (1)..(273): Homolog of NCBI NO: 34908968 NR Description: P0003D09.21 [Oryza sativa (japonica
MSNRATHWCYACQRPIRLRGQDIICPNCSDGFIQEISEMGGVLNTYGLTEPDFEERQARRFGMMDAISSLMRQRLSEIGRDSLFDIHGRQGTGTEYGRRSTAIPTLVFGGIPSPAVGSSDVNVVIREGRRAGAARPNFSSLVVGPSLEALFEQLLLQNNRQGPPPAPQSAIDSMPVVKINRRHLDEDPQCAVCKDKFEVGAEAREMPCKHLYHTDCIIPWLVQHNSCPVCRHPLPSQRSGSSTSSARVPSAYYNETADPPAVARADLDPVPSAYYNETADPPAVTRAYFDPAPGNYGSESQESHDPFSFLWPFGPSSSYQYEENVDEPAVYDPNHIAYSAWHYDH

SEQ ID NO: 110347 - protein, 307 aa, Zea mays subsp. mays
  misc_feature (1)..(307): Ceres Seq. ID no. 14309643
  misc_feature (152)..(192): Pfam Name: Zinc finger, C3HC4 type (RING finger) Pfam Description: Zinc finger, C3HC4 type (RING finger)
  misc_feature (1)..(208): Homolog of NCBI NO: 14719329 NR Description: putative RING-H2 finger protein [Oryza sativa]
  misc_feature (109)..(204): Homolog of NCBI NO: 37622892 NR Description: ring finger protein 126 isoform 1 [Homo sapiens]
  misc_feature (1)..(197): Homolog of NCBI NO: 15219060 NR Description: hypothetical protein [Arabidopsis thaliana]
  misc_feature (97)..(203): Homolog of NCBI NO: 22655083 NR Description: putative RING zinc finger protein [Arabidopsis
  misc_feature (51)..(208): Homolog of NCBI NO: 34902106 NR Description: unknown protein [Oryza sativa (japonica
  misc_feature (1)..(198): Homolog of NCBI NO: 15231003 NR Description: expressed protein [Arabidopsis thaliana]
  misc_feature (1)..(198): Homolog of NCBI NO: 11994207 NR Description: gene_id:MPN9.20~unknown protein [Arabidopsis
  misc_feature (1)..(209): Homolog of NCBI NO: 18410530 NR Description: expressed protein [Arabidopsis thaliana]
  misc_feature (1)..(219): Homolog of NCBI NO: 18405518 NR Description: RING-H2 finger protein (RHC1a) [Arabidopsis
  misc_feature (1)..(235): Homolog of NCBI NO: 34908968 NR Description: P0003D09.21 [Oryza sativa (japonica
MGGVLNTYGLTEPDFEERQARRFGMMDAISSLMRQRLSEIGRDSLFDIHGRQGTGTEYGRRSTAIPTLVFGGIPSPAVGSSDVNVVIREGRRAGAARPNFSSLVVGPSLEALFEQLLLQNNRQGPPPAPQSAIDSMPVVKINRRHLDEDPQCAVCKDKFEVGAEAREMPCKHLYHTDCIIPWLVQHNSCPVCRHPLPSQRSGSSTSSARVPSAYYNETADPPAVARADLDPVPSAYYNETADPPAVTRAYFDPAPGNYGSESQESHDPFSFLWPFGPSSSYQYEENVDEPAVYDPNHIAYSAWHYDH

SEQ ID NO: 110348 - protein, 283 aa, Zea mays subsp. mays
  misc_feature (1)..(283): Ceres Seq. ID no. 14309644
  misc_feature (128)..(168): Pfam Name: Zinc finger, C3HC4 type (RING finger) Pfam Description: Zinc finger, C3HC4 type (RING finger)
  misc_feature (27)..(184): Homolog of NCBI NO: 34902106 NR Description: unknown protein [Oryza sativa (japonica
  misc_feature (1)..(174): Homolog of NCBI NO: 15231003 NR Description: expressed protein [Arabidopsis thaliana]
  misc_feature (1)..(174): Homolog of NCBI NO: 11994207 NR Description: gene_id:MPN9.20~unknown protein [Arabidopsis
  misc_feature (1)..(184): Homolog of NCBI NO: 14719329 NR Description: putative RING-H2 finger protein [Oryza sativa]
  misc_feature (1)..(173): Homolog of NCBI NO: 15219060 NR Description: hypothetical protein [Arabidopsis thaliana]
  misc_feature (73)..(179): Homolog of NCBI NO: 22655083 NR Description: putative RING zinc finger protein [Arabidopsis
  misc_feature (85)..(180): Homolog of NCBI NO: 37622892 NR Description: ring finger protein 126 isoform 1 [Homo sapiens]
  misc_feature (1)..(185): Homolog of NCBI NO: 18410530 NR Description: expressed protein [Arabidopsis thaliana]
  misc_feature (1)..(195): Homolog of NCBI NO: 18405518 NR Description: RING-H2 finger protein (RHC1a) [Arabidopsis
  misc_feature (1)..(211): Homolog of NCBI NO: 34908968 NR Description: P0003D09.21 [Oryza sativa (japonica
MMDAISSLMRQRLSEIGRDSLFDIHGRQGTGTEYGRRSTAIPTLVFGGIPSPAVGSSDVNVVIREGRRAGAARPNFSSLVVGPSLEALFEQLLLQNNRQGPPPAPQSAIDSMPVVKINRRHLDEDPQCAVCKDKFEVGAEAREMPCKHLYHTDCIIPWLVQHNSCPVCRHPLPSQRSGSSTSSARVPSAYYNETADPPAVARADLDPVPSAYYNETADPPAVTRAYFDPAPGNYGSESQESHDPFSFLWPFGPSSSYQYEENVDEPAVYDPNHIAYSAWHYDH

SEQ ID NO: 110349 - DNA, 611 bp, Zea mays subsp. mays
  misc_feature (1)..(611): Ceres Seq. ID no. 13493427
atgcacaacacaacgcttataatacttacaacaaaagataagcccacgaatcagtagatcgaggtcccgcccagtccagcaaaagcacacacggagatgtcccagctgagctctgctggccacatggctgcgacgttcctcctcatcctcctcgcctccgcagcagcaacggtgtcagctgaccaacaagtctctgcctgccagaatgacatagacgcactgtggcgcagctgcaagcagttcgtccagaaggaggggcccaagatgcctccgtccgaggactgctgcaaaaccatcaaggccttagacgcgcacgcgtcctgcatctgcgactacgtcggctccccggacgccaggaataagctagacctggacaaggtgttcttcgttaccaaacagtgcggcgtcaccgtccccaagggctgcggatcaaagcaggactgaagagcggctgaatctgaatggagcaagttggctaacatacgcacggcagctacaaatacttataggaataaataaagttggtcaactgttggtttcatggtgttggagtacaacaactgtactgttcttatcctcatatatgatatatgaactctagttcatcacat

SEQ ID NO: 110350 - protein, 115 aa, Zea mays subsp. mays
  misc_feature (1)..(115): Ceres Seq. ID no. 13493428
  misc_feature (46)..(110): Pfam Name: Protease inhibitor/seed storage/LTP family Pfam Description: Protease inhibitor/seed storage/LTP family
  misc_feature (16)..(113): Homolog of NCBI NO: 15234923 NR Description: protease inhibitor/seed storage/lipid transfer
  misc_feature (1)..(114): Homolog of NCBI NO: 37531054 NR Description: unknown protein [Oryza sativa (japonica
MSQLSSAGHMAATFLLILLASAAATVSADQQVSACQNDIDALWRSCKQFVQKEGPKMPPSEDCCKTIKALDAHASCICDYVGSPDARNKLDLDKVFFVTKQCGVTVPKGCGSKQD

SEQ ID NO: 110351 - protein, 106 aa, Zea mays subsp. mays
  misc_feature (1)..(106): Ceres Seq. ID no. 13493429
  misc_feature (37)..(101): Pfam Name: Protease inhibitor/seed storage/LTP family Pfam Description: Protease inhibitor/seed storage/LTP family
  misc_feature (7)..(104): Homolog of NCBI NO: 15234923 NR Description: protease inhibitor/seed storage/lipid transfer
  misc_feature (1)..(105): Homolog of NCBI NO: 37531054 NR Description: unknown protein [Oryza sativa (japonica
MAATFLLILLASAAATVSADQQVSACQNDIDALWRSCKQFVQKEGPKMPPSEDCCKTIKALDAHASCICDYVGSPDARNKLDLDKVFFVTKQCGVTVPKGCGSKQD

SEQ ID NO: 110352 - protein, 59 aa, Zea mays subsp. mays
  misc_feature (1)..(59): Ceres Seq. ID no. 13493430
  misc_feature (1)..(54): Pfam Name: Protease inhibitor/seed storage/LTP family Pfam Description: Protease inhibitor/seed storage/LTP family
  misc_feature (1)..(57): Homolog of NCBI NO: 15234923 NR Description: protease inhibitor/seed storage/lipid transfer
  misc_feature (1)..(58): Homolog of NCBI NO: 37531054 NR Description: unknown protein [Oryza sativa (japonica
MPPSEDCCKTIKALDAHASCICDYVGSPDARNKLDLDKVFFVTKQCGVTVPKGCGSKQD

SEQ ID NO: 110353 - DNA, 1010 bp, Zea mays subsp. mays
  misc_feature (1)..(1010): Ceres Seq. ID no. 14305591
gctactgccgatccgtgccctcacaccgcctacttgactcctcccgaacttccacatctctgctctgccttcccagtctcccatccctgaaaacctcacaaaaccctcgtttgctccccaccaccccgccgcgccgccgcctgtaccagctgcgtcaagatgagtcggcaccctgaggtgaagtgggctcagaggatcgacaaggtttacatcactgtacagttacctgacgcaaaggatgctaaggtcaatttggatccagatggtgtcttcacattctctggcagcgctggtacaaacttgtatgaattgaaactagatctgaatgacaaagtaaacgttgaggctagcaaaataagtgtgggggtcaggtccatattctgtatcgtagaaaaagctgaagccaaatggtggaagaaactcgttcgagatgatcaaagggcacctcactttgtgaaagttgattgggacaaatgggttgatgaagatgatgatggtgctgatatcaacatggatgggatggacttctcgaatttcggtggcatgggtggtatgggcggcatgggtggcatgggtgatatggctggtatgggtggtcttggtggcatgggtgggatgggtgatcttggtggcatgggtggtatgggaatggatgatttcgaagatgagagtgatgatgaagaagaattgtcgaaacctcaagctgcggacaaggctgttgaggctgaggagacggagtcagcggaaaccaagactgaggcggctcagagcagttgaagatgcttatgatctaagctagattgtatcctcatgttaattctgctgaatcggaggacaaaccttacatttgtggtgctggcaagtcccagtggcgtgccatgaaaatttacgttccgtcttttaactgggtatcctagtgtcgtgctcagcatattatggatattgtttccgtaatgcttcctttggtcgccaatccatgtggttaagagtttgttttactggattgctct

SEQ ID NO: 110354 - protein, 205 aa, Zea mays subsp. mays
  misc_feature (1)..(205): Ceres Seq. ID no. 14305592
  misc_feature (5)..(202): Homolog of NCBI NO: 18376119 NR Description: related to Hsp90 associated co-chaperone
  misc_feature (5)..(205): Homolog of NCBI NO: 32415503 NR Description: hypothetical protein [Neurospora crassa]
  misc_feature (1)..(130): Homolog of NCBI NO: 12231292 NR Description: ripening regulated protein DDTFR8 [Lycopersicon
  misc_feature (5)..(168): Homolog of NCBI NO: 23482571 NR Description: 34 kDa phosphoprotein [Plasmodium yoelii yoelii]
  misc_feature (1)..(131): Homolog of NCBI NO: 40882701 NR Description: putative ripening regulated protein
  misc_feature (1)..(140): Homolog of NCBI NO: 11934654 NR Description: p23 [Brassica napus]
  misc_feature (3)..(153): Homolog of NCBI NO: 7487014 NR Description: hypothetical protein T14P8.5 - Arabidopsis
  misc_feature (1)..(163): Homolog of NCBI NO: 30679149 NR Description: glycine-rich protein [Arabidopsis thaliana]
  misc_feature (1)..(163): Homolog of NCBI NO: 11229591 NR Description: p23 co-chaperone [Arabidopsis thaliana]
  misc_feature (1)..(202): Homolog of NCBI NO: 38637531 NR Description: putative p23 co-chaperone
MSRHPEVKWAQRIDKVYITVQLPDAKDAKVNLDPDGVFTFSGSAGTNLYELKLDLNDKVNVEASKISVGVRSIFCIVEKAEAKWWKKLVRDDQRAPHFVKVDWDKWVDEDDDGADINMDGMDFSNFGGMGGMGGMGGMGDMAGMGGLGGMGGMGDLGGMGGMGMDDFEDESDDEEELSKPQAADKAVEAEETESAETKTEAAQSS

SEQ ID NO: 110355 - protein, 105 aa, Zea mays subsp. mays
  misc_feature (1)..(105): Ceres Seq. ID no. 14305593
MKMMMVLISTWMGWTSRISVAWVVWAAWVAWVIWLVWVVLVAWVGWVILVAWVVWEWMISKMRVMMKKNCRNLKLRTRLLRLRRRSQRKPRLRRLRAVEDAYDLS

SEQ ID NO: 110356 - protein, 103 aa, Zea mays subsp. mays
  misc_feature (1)..(103): Ceres Seq. ID no. 14305594
MMMVLISTWMGWTSRISVAWVVWAAWVAWVIWLVWVVLVAWVGWVILVAWVVWEWMISKMRVMMKKNCRNLKLRTRLLRLRRRSQRKPRLRRLRAVEDAYDLS

SEQ ID NO: 110357 - DNA, 722 bp, Zea mays subsp. mays
  misc_feature (1)..(722): Ceres Seq. ID no. 12556636
acatccaaattcccaatcccaacccccccaaggcacactccacctccgcaaccaaacgcgctagggtttccgcaccgcacctctagtcctccaccccaccccactaccggcgatggccaccgcggcggcgcagggcggtacgacaagccggcgctccggaagcccgtcttcaccaaggtcgaccagctcaagccgggcactaacgggcacaccctcaccgtcaaggtcgtcagcgccacccccgtgcccggccgnnnncgcccggnnncacnngccgccgcctcgtcccgcgcgccgcgcatcgccgagtgcctcgtcggagacgagaccggcgtcatcgtattcaccgcccgcaacgaccaagttgatttgctgaagcccgatgccacggtgatcttgcgcaatgccaaaatagacatgttcaaaggatcaatgaggcttgcagtggacaaatgggggcggattgaggctacagagccagctagcttcacagtgaaggaagacaacaacttgtcccttgtagagtatgaattggttaacgtggctgaataaccgtcgaatcgtttcttgcccccccttacttctttttcacgcacgccataagatgataagaaaacgaacagcatctcgaagctgagtttatttgttacggtggtcgataaggtcaaggcttctgctgttacacctttggatccaatccattaagatgaattaccccttgc

SEQ ID NO: 110358 - protein, 183 aa, Zea mays subsp. mays
  misc_feature (1)..(183): Ceres Seq. ID no. 12556637
  misc_feature (122)..(181): Homolog of NCBI NO: 6573753 NR Description: F20B24.1 [Arabidopsis thaliana]
  misc_feature (51)..(121): Homolog of NCBI NO: 6573753 NR Description: F20B24.1 [Arabidopsis thaliana]
  misc_feature (53)..(179): Homolog of NCBI NO: 15219562 NR Description: hypothetical protein; protein id: At1g03810.1
  misc_feature (51)..(181): Homolog of NCBI NO: 30681801 NR Description: expressed protein [Arabidopsis thaliana]
  misc_feature (51)..(181): Homolog of NCBI NO: 18391179 NR Description: expressed protein
  misc_feature (49)..(183): Homolog of NCBI NO: 18395285 NR Description: expressed protein
  misc_feature (53)..(181): Homolog of NCBI NO: 15235304 NR Description: putative protein
  misc_feature (51)..(181): Homolog of NCBI NO: 34909622 NR Description: P0435B05.31 [Oryza sativa (japonica
  misc_feature (9)..(183): Homolog of NCBI NO: 18403397 NR Description: Expressed protein
  misc_feature (48)..(183): Homolog of NCBI NO: 34904470 NR Description: OSJNBa0086P08.14 [Oryza sativa (japonica
TSKFPIPTPPRHTPPPQPNALGFPHRTSSPPPHPTTGDGHRGGAGRYDKPALRKPVFTKVDQLKPGTNGHTLTVKVVSATPVPGXXRPXXXAAASSRAPRIAECLVGDETGVIVFTARNDQVDLLKPDATVILRNAKIDMFKGSMRLAVDKWGRIEATEPASFTVKEDNNLSLVEYELVNVAE

SEQ ID NO: 110359 - DNA, 1967 bp, Zea mays subsp. mays
  misc_feature (1)..(1967): Ceres Seq. ID no. 15180570
agttccccaaattcccaacgccgccgcgacggcgctgctagctagtctttggtgttgtaggtgttcgattcctgattccaaattccagactccaaactcggttcttcaatcgacagattccgatttacatcccaaagctcttcggattgaaatccagccgcgacccaagagataagagtatttgggattagtagataggatagtagaatagaagaggaacactttcgctgatgattacggcggaggagaagagccccgaaaggggaggaggaggaggaggcgaacccgcgcgcggaggcttttctggagatcatctgccgcgtcccggcgggggaggtggaggcggcgctgtccgcttgcggcatcggccccacggccgaggtcgaggaactggtgctcaagtcccgcgaatgctacaagcgccctaagtccgccgtccgcttcttccgctgggcggggcagtccgtgtcgcacaccgcctacgcatggaacctccttgtcgacatcctcggcaaggccgccatgttcgagcccatgtgggacgccatccgctccatgaagcaggagggcggcggcgggctcgtctccgtcgccaccttcgcctccgtcttcgcctcctactgcgccgctggcaacatcaaagatgcaatcgcggccttagacgtcatggaccgctacggcctcaagcacgacgccgtcgcgctcaactcgctgctctcggcgatttgccgcgtcgagggtcgcgcgcaggatgcgcaggacgtcttcgagcgtaccaaggccaccatcccacccgacggcgacacgttcgcgatactgctcgaggcatgggagaaggaggggaacgcggtgcgcgccaagagcgtctttggcgagatggtcgtccgcatcggctgggacgcagccaacgtatccgcgtacgactccttcctctccactctcgttcggggcggcctgttggacgaggccttcaaatttctgcaggtgatgcggagcaagggctgcttgccggggatcaattttttttctacagctgtggatctggtcgtccgcaagggtgactacctcaacgccgtagccatctggcacatgatggtctctgaagccggcctcgttcccaatttctcaatgtacagcgccatgattggtctccactgcaatgctggtagcatagacgatgctcttgggttgcttgatgaaatgcccctcaacggcgtctttgcaaattctgtcacatacaacaccatactggaaggattcatcaagcatcgcaaggctcgtgaggctgaaagtttcctaacggagatgagcaagaatgagcaactgcctactgcatccaattgcgctgctgctatcagcttgttctttaaggagtttaacccatctgcagcaatcgacgtgtggcgctgtattgtggagcacaacattaccccagctgaggactctgccaaagagctaatagcagggctgcttgattttggcaggtttactgaggtgacgaagcgtgctgatgagatgattgacatgagagttgagttgtcacggtccacaatggagaatatgaagcgtgcttttgctaaggctggcaggcaccaatcatatgacaacattgcaagaaggctaaagcgatattagctgcacatgaatgctttaatcagctgaaactttgcggctcacggggtagacgtttaacgcctggactgcttaattgcatgacaaccaagaatttggactagcctggatcctggaatgtaagtctggaaatctggaactgtactctgatcccacaagcagtggtcgggatgttagtgtagctcttgtagattccggaccccatttgttagctggttactcatcgagtgtaataagtggctagtttagtgaggctgcacattatcgctgtttatttttcatatatattttatgaatatgaaattgggttatgtaagtatcagatattcctggcg

SEQ ID NO: 110360 - protein, 370 aa, Zea mays subsp. mays
  misc_feature (1)..(370): Ceres Seq. ID no. 15180571
  misc_feature (1)..(266): Homolog of NCBI NO: 15228825 NR Description: pentatricopeptide (PPR) repeat-containing protein
  misc_feature (1)..(363): Homolog of NCBI NO: 21686921 NR Description: putative reverse transcriptase
  misc_feature (1)..(368): Homolog of NCBI NO: 15241508 NR Description: pentatricopeptide (PPR) repeat-containing protein
  misc_feature (1)..(368): Homolog of NCBI NO: 15228788 NR Description: pentatricopeptide (PPR) repeat-containing protein
  misc_feature (1)..(368): Homolog of NCBI NO: 15228767 NR Description: pentatricopeptide (PPR) repeat-containing protein
  misc_feature (1)..(369): Homolog of NCBI NO: 15219049 NR Description: hypothetical protein [Arabidopsis thaliana]
  misc_feature (1)..(369): Homolog of NCBI NO: 15223927 NR Description: pentatricopeptide (PPR) repeat-containing protein
  misc_feature (1)..(356): Homolog of NCBI NO: 15223926 NR Description: pentatricopeptide (PPR) repeat-containing protein
  misc_feature (1)..(367): Homolog of NCBI NO: 14488357 NR Description: unknown protein [Oryza sativa (japonica
  misc_feature (1)..(369): Homolog of NCBI NO: 21741854 NR Description: OSJNBa0019D11.15 [Oryza sativa (japonica
MFEPMWDAIRSMKQEGGGGLVSVATFASVFASYCAAGNIKDAIAALDVMDRYGLKHDAVALNSLLSAICRVEGRAQDAQDVFERTKATIPPDGDTFAILLEAWEKEGNAVRAKSVFGEMVVRIGWDAANVSAYDSFLSTLVRGGLLDEAFKFLQVMRSKGCLPGINFFSTAVDLVVRKGDYLNAVAIWHMMVSEAGLVPNFSMYSAMIGLHCNAGSIDDALGLLDEMPLNGVFANSVTYNTILEGFIKHRKAREAESFLTEMSKNEQLPTASNCAAAISLFFKEFNPSAAIDVWRCIVEHNITPAEDSAKELIAGLLDFGRFTEVTKRADEMIDMRVELSRSTMENMKRAFAKAGRHQSYDNIARRLKRY

SEQ ID NO: 110361 - protein, 366 aa, Zea mays subsp. mays
  misc_feature (1)..(366): Ceres Seq. ID no. 15180572
  misc_feature (1)..(262): Homolog of NCBI NO: 15228825 NR Description: pentatricopeptide (PPR) repeat-containing protein
  misc_feature (1)..(359): Homolog of NCBI NO: 21686921 NR Description: putative reverse transcriptase
  misc_feature (1)..(364): Homolog of NCBI NO: 15241508 NR Description: pentatricopeptide (PPR) repeat-containing protein
  misc_feature (1)..(364): Homolog of NCBI NO: 15228788 NR Description: pentatricopeptide (PPR) repeat-containing protein
  misc_feature (1)..(364): Homolog of NCBI NO: 15228767 NR Description: pentatricopeptide (PPR) repeat-containing protein
  misc_feature (1)..(365): Homolog of NCBI NO: 15219049 NR Description: hypothetical protein [Arabidopsis thaliana]
  misc_feature (1)..(365): Homolog of NCBI NO: 15223927 NR Description: pentatricopeptide (PPR) repeat-containing protein
  misc_feature (1)..(352): Homolog of NCBI NO: 15223926 NR Description: pentatricopeptide (PPR) repeat-containing protein
  misc_feature (1)..(363): Homolog of NCBI NO: 14488357 NR Description: unknown protein [Oryza sativa (japonica
  misc_feature (1)..(365): Homolog of NCBI NO: 21741854 NR Description: OSJNBa0019D11.15 [Oryza sativa (japonica
MWDAIRSMKQEGGGGLVSVATFASVFASYCAAGNIKDAIAALDVMDRYGLKHDAVALNSLLSAICRVEGRAQDAQDVFERTKATIPPDGDTFAILLEAWEKEGNAVRAKSVFGEMVVRIGWDAANVSAYDSFLSTLVRGGLLDEAFKFLQVMRSKGCLPGINFFSTAVDLVVRKGDYLNAVAIWHMMVSEAGLVPNFSMYSAMIGLHCNAGSIDDALGLLDEMPLNGVFANSVTYNTILEGFIKHRKAREAESFLTEMSKNEQLPTASNCAAAISLFFKEFNPSAAIDVWRCIVEHNITPAEDSAKELIAGLLDFGRFTEVTKRADEMIDMRVELSRSTMENMKRAFAKAGRHQSYDNIARRLKRY

SEQ ID NO: 110362 - protein, 359 aa, Zea mays subsp. mays
  misc_feature (1)..(359): Ceres Seq. ID no. 15180573
  misc_feature (1)..(255): Homolog of NCBI NO: 15228825 NR Description: pentatricopeptide (PPR) repeat-containing protein
  misc_feature (1)..(352): Homolog of NCBI NO: 21686921 NR Description: putative reverse transcriptase
  misc_feature (1)..(357): Homolog of NCBI NO: 15241508 NR Description: pentatricopeptide (PPR) repeat-containing protein
  misc_feature (1)..(357): Homolog of NCBI NO: 15228788 NR Description: pentatricopeptide (PPR) repeat-containing protein
  misc_feature (1)..(357): Homolog of NCBI NO: 15228767 NR Description: pentatricopeptide (PPR) repeat-containing protein
  misc_feature (1)..(358): Homolog of NCBI NO: 15219049 NR Description: hypothetical protein [Arabidopsis thaliana]
  misc_feature (1)..(358): Homolog of NCBI NO: 15223927 NR Description: pentatricopeptide (PPR) repeat-containing protein
  misc_feature (1)..(345): Homolog of NCBI NO: 15223926 NR Description: pentatricopeptide (PPR) repeat-containing protein
  misc_feature (1)..(356): Homolog of NCBI NO: 14488357 NR Description: unknown protein [Oryza sativa (japonica
  misc_feature (1)..(358): Homolog of NCBI NO: 21741854 NR Description: OSJNBa0019D11.15 [Oryza sativa (japonica
MKQEGGGGLVSVATFASVFASYCAAGNIKDAIAALDVMDRYGLKHDAVALNSLLSAICRVEGRAQDAQDVFERTKATIPPDGDTFAILLEAWEKEGNAVRAKSVFGEMVVRIGWDAANVSAYDSFLSTLVRGGLLDEAFKFLQVMRSKGCLPGINFFSTAVDLVVRKGDYLNAVAIWHMMVSEAGLVPNFSMYSAMIGLHCNAGSIDDALGLLDEMPLNGVFANSVTYNTILEGFIKHRKAREAESFLTEMSKNEQLPTASNCAAAISLFFKEFNPSAAIDVWRCIVEHNITPAEDSAKELIAGLLDFGRFTEVTKRADEMIDMRVELSRSTMENMKRAFAKAGRHQSYDNIARRLKRY

SEQ ID NO: 110363 - DNA, 1108 bp, Zea mays subsp. mays
  misc_feature (1)..(1108): Ceres Seq. ID no. 14312699
gattagccgagtcctttattgcaaaaacacgcatcacctccgtggttccgtcgccatctcgttcccgtgacccacccaccccgtcgcgtctcgacctggcttcctcctcctcgaggaccgccgtgcaggagcggagctccccgccgcttctctctccgccttccgagaggcccgacccctgataccacgctgagggcggtggtattaggagattagcgatggcgaggtggcggccggcggcgctgctggtagtggctctggcggcggttctatcggcggcgtggcgggcggatgcgctatcggttacggtgaccgacaccgagtgcatccacgagttcgtgccctatgagggcgacaccgtgtccgggaacttcgtcgtcgtcgaccacgacatcttctggagctccgaccacccaggaatcgacctcacggtaacgtcaccaggtggcaacactgtgtacacattgaagggaaaatctggtgagaaatttgagtttaaagctccaagaggtggcatgtataagttctgcttccataacccatatggagcacctgaaactgtttctttctacatccatgttgggcacatacccaatgagcacaatctgccgaaagatgagcacttggaccctatcaatgttaaaatcgcggagctgaaggaagcattagaatccgtcaccgccgagcagaagtacctaaaagcacgcgaagctcgtcaccgacacactaatgagagcaccagaaagcgtgtcatgttctatacgatggcggagtacctggctttcatggctgctagcgcgttgcaggtcctctacatccgccgcttgttcagtaaaaatgtgggatacaacagagtgtaggatagaaatctacttcaaaggcgacagtggaagcaccgcatatgatggtcggagcgggaaacattctctgccagtttgacaaattgtagttctgcaccctcctttttttgttagtttataagaaacactttaatttatcatcatgtacttttagcaacacttgtgatatgttaagtgcatttggtgctgaacattgttccataactaatcttcagaggtttgttatgaaagttagtatcgctctgccg

SEQ ID NO: 110364 - protein, 213 aa, Zea mays subsp. mays
  misc_feature (1)..(213): Ceres Seq. ID no. 14312700
  misc_feature (17)..(210): Pfam Name: emp24/gp25L/p24 family Pfam Description: emp24/gp25L/p24 family
  misc_feature (8)..(204): Homolog of NCBI NO: 9790015 NR Description: coated vesicle membrane protein; Sid394p [Mus
  misc_feature (8)..(204): Homolog of NCBI NO: 5803149 NR Description: coated vesicle membrane protein [Homo sapiens]
  misc_feature (10)..(204): Homolog of NCBI NO: 29477153 NR Description: Similar to coated vesicle membrane protein [Danio
  misc_feature (8)..(204): Homolog of NCBI NO: 13929014 NR Description: coated vesicle membrane protein [Rattus
  misc_feature (9)..(204): Homolog of NCBI NO: 40056982 NR Description: emp24/gp25L/p24 family protein [Dictyostelium
  misc_feature (17)..(213): Homolog of NCBI NO: 15231496 NR Description: emp24/gp25L/p24 family [Arabidopsis thaliana]
  misc_feature (13)..(213): Homolog of NCBI NO: 21595553 NR Description: putative coated vesicle membrane protein
  misc_feature (100)..(213): Homolog of NCBI NO: 22331264 NR Description: expressed protein [Arabidopsis thaliana]
  misc_feature (5)..(213): Homolog of NCBI NO: 17979492 NR Description: AT3g22845/MWI23_22 [Arabidopsis thaliana]
  misc_feature (4)..(213): Homolog of NCBI NO: 30017578 NR Description: putative cop-coated vesicle membrane protein
MARWRPAALLVVALAAVLSAAWRADALSVTVTDTECIHEFVPYEGDTVSGNFVVVDHDIFWSSDHPGIDLTVTSPGGNTVYTLKGKSGEKFEFKAPRGGMYKFCFHNPYGAPETVSFYIHVGHIPNEHNLPKDEHLDPINVKIAELKEALESVTAEQKYLKAREARHRHTNESTRKRVMFYTMAEYLAFMAASALQVLYIRRLFSKNVGYNRV

SEQ ID NO: 110365 - protein, 114 aa, Zea mays subsp. mays
  misc_feature (1)..(114): Ceres Seq. ID no. 14312701
  misc_feature (1)..(111): Pfam Name: emp24/gp25L/p24 family Pfam Description: emp24/gp25L/p24 family
  misc_feature (1)..(105): Homolog of NCBI NO: 40056982 NR Description: emp24/gp25L/p24 family protein [Dictyostelium
  misc_feature (1)..(114): Homolog of NCBI NO: 15231496 NR Description: emp24/gp25L/p24 family [Arabidopsis thaliana]
  misc_feature (1)..(114): Homolog of NCBI NO: 21595553 NR Description: putative coated vesicle membrane protein
  misc_feature (1)..(105): Homolog of NCBI NO: 9790015 NR Description: coated vesicle membrane protein; Sid394p [Mus
  misc_feature (1)..(105): Homolog of NCBI NO: 29477153 NR Description: Similar to coated vesicle membrane protein [Danio
  misc_feature (1)..(105): Homolog of NCBI NO: 13929014 NR Description: coated vesicle membrane protein [Rattus
  misc_feature (1)..(105): Homolog of NCBI NO: 5803149 NR Description: coated vesicle membrane protein [Homo sapiens]
  misc_feature (1)..(114): Homolog of NCBI NO: 22331264 NR Description: expressed protein [Arabidopsis thaliana]
  misc_feature (1)..(114): Homolog of NCBI NO: 17979492 NR Description: AT3g22845/MWI23_22 [Arabidopsis thaliana]
  misc_feature (1)..(114): Homolog of NCBI NO: 30017578 NR Description: putative cop-coated vesicle membrane protein
MYKFCFHNPYGAPETVSFYIHVGHIPNEHNLPKDEHLDPINVKIAELKEALESVTAEQKYLKAREARHRHTNESTRKRVMFYTMAEYLAFMAASALQVLYIRRLFSKNVGYNRV

SEQ ID NO: 110366 - DNA, 429 bp, Zea mays subsp. mays
  misc_feature (1)..(429): Ceres Seq. ID no. 14312687
cacacccacacagcaagccagcagagcagaaagcagccgcagccccagcccccacaagacgaggcaacaatggcgctagaagcagccaccgccccccgcgcactcctcgccgcgtgcctcgtcctgctggtcctcggcggcggcaccggcccgtcgtcggtgctgcgcggcgccggggcgcaggccggcgggcagtgcctgccgcagctgaaccgcctcctggcgtgccgcgcgtacctggtgcccggcgcgccggaccccagcgcggactgctgcagcgcgctgagcgccgtgtcgcacgagtgcgcggggggcggtggctgcttatatggctgtggctgccttgtgactcgtgtgggtctgtgggctgcggggtggttctaaagctctgcagccccgagtgtttatttattaattattgttgaggtt

SEQ ID NO: 110367 - protein, 140 aa, Zea mays subsp. mays
  misc_feature (1)..(140): Ceres Seq. ID no. 14312688
HPHSKPAEQKAAAAPAPTRRGNNGARSSHRPPRTPRRVPRPAGPRRRHRPVVGAARRRGAGRRAVPAAAEPPPGVPRVPGARRAGPQRGLLQRAERRVARVRGGRWLLIWLWLPCDSCGSVGCGVVLKLCSPECLFINYC

SEQ ID NO: 110368 - protein, 127 aa, Zea mays subsp. mays
  misc_feature (1)..(127): Ceres Seq. ID no. 14312689
  misc_feature (38)..(105): Homolog of NCBI NO: 6137299 NR Description: YY1 protein precursor
  misc_feature (28)..(99): Homolog of NCBI NO: 283005 NR Description: osc4 protein - rice
  misc_feature (28)..(99): Homolog of NCBI NO: 736716 NR Description: rice anther specific protein
  misc_feature (24)..(98): Homolog of NCBI NO: 400249 NR Description: MFS14 PROTEIN PRECURSOR
  misc_feature (24)..(103): Homolog of NCBI NO: 6689676 NR Description: LTP-like protein; anther specific protein [Zea
HTHTASQQSRKQPQPQPPQDEATMALEAATAPRALLAACLVLLVLGGGTGPSSVLRGAGAQAGGQCLPQLNRLLACRAYLVPGAPDPSADCCSALSAVSHECAGGGGCLYGCGCLVTRVGLWAAGWF

SEQ ID NO: 110369 - protein, 104 aa, Zea mays subsp. mays
  misc_feature (1)..(104): Ceres Seq. ID no. 14312690
  misc_feature (15)..(82): Homolog of NCBI NO: 6137299 NR Description: YY1 protein precursor
  misc_feature (5)..(76): Homolog of NCBI NO: 283005 NR Description: osc4 protein - rice
  misc_feature (5)..(76): Homolog of NCBI NO: 736716 NR Description: rice anther specific protein
  misc_feature (1)..(75): Homolog of NCBI NO: 400249 NR Description: MFS14 PROTEIN PRECURSOR
  misc_feature (1)..(80): Homolog of NCBI NO: 6689676 NR Description: LTP-like protein; anther specific protein [Zea
MALEAATAPRALLAACLVLLVLGGGTGPSSVLRGAGAQAGGQCLPQLNRLLACRAYLVPGAPDPSADCCSALSAVSHECAGGGGCLYGCGCLVTRVGLWAAGWF

SEQ ID NO: 110370 - DNA, 565 bp, Zea mays subsp. mays
  misc_feature (1)..(565): Ceres Seq. ID no. 15175817
actacacacaaacacacaatggcaccagaaaggatgctcctcggcgtctgtgccgtgctgatggtggtcggcgtcacgaacgcggcggagggccaggtggcgtcggtcgtcgtgggcctggcgaggtgcgccgacatcacgaggaagaacatgaaggctgaggccggtttcaagggtcttcaggtggcgatcaagtgcaagaacagcaacggcgagtacgagacaaaggccgtgagtgagatccaaagctccggagccttcagcgtcccactcgccgccgacctccacggcgccgactgccacgcgcagctccacagctttggatctctcttttttgttccataaaattgttagatctttcacttcagattgattttgttcgacatgtgcgtgttcttcttactagttacattctttctgtttctgtggaccattggactgtattctgtcgtgcaataattgttgggaggcctgagtttgttagtcgttccattctgaaaactggtatctgttctgtaatggttgtccctatcaataatgaaataattgcgtttgatccttgaat

SEQ ID NO: 110371 - protein, 114 aa, Zea mays subsp. mays
  misc_feature (1)..(114): Ceres Seq. ID no. 15175818
  misc_feature (16)..(106): Homolog of NCBI NO: 37531076 NR Description: putative proline-rich protein
  misc_feature (16)..(109): Homolog of NCBI NO: 37531074 NR Description: putative proline-rich protein
  misc_feature (7)..(106): Homolog of NCBI NO: 37531086 NR Description: putative proline-rich protein
  misc_feature (8)..(105): Homolog of NCBI NO: 37531094 NR Description: putative proline-rich protein
  misc_feature (8)..(105): Homolog of NCBI NO: 18676394 NR Description: proline-rich protein [Oryza sativa]
  misc_feature (8)..(106): Homolog of NCBI NO: 37531092 NR Description: putative proline-rich protein
  misc_feature (9)..(109): Homolog of NCBI NO: 37531058 NR Description: putative proline-rich protein
  misc_feature (8)..(106): Homolog of NCBI NO: 37531088 NR Description: putative proline-rich protein
  misc_feature (8)..(106): Homolog of NCBI NO: 37531090 NR Description: putative proline-rich protein
  misc_feature (12)..(106): Homolog of NCBI NO: 6689616 NR Description: proline-rich protein [Zea mays]
TTHKHTMAPERMLLGVCAVLMVVGVTNAAEGQVASVVVGLARCADITRKNMKAEAGFKGLQVAIKCKNSNGEYETKAVSEIQSSGAFSVPLAADLHGADCHAQLHSFGSLFFVP

SEQ ID NO: 110372 - protein, 108 aa, Zea mays subsp. mays
  misc_feature (1)..(108): Ceres Seq. ID no. 15175819
  misc_feature (10)..(100): Homolog of NCBI NO: 37531076 NR Description: putative proline-rich protein
  misc_feature (10)..(103): Homolog of NCBI NO: 37531074 NR Description: putative proline-rich protein
  misc_feature (1)..(100): Homolog of NCBI NO: 37531086 NR Description: putative proline-rich protein
  misc_feature (2)..(99): Homolog of NCBI NO: 37531094 NR Description: putative proline-rich protein
  misc_feature (2)..(99): Homolog of NCBI NO: 18676394 NR Description: proline-rich protein [Oryza sativa]
  misc_feature (2)..(100): Homolog of NCBI NO: 37531092 NR Description: putative proline-rich protein
  misc_feature (3)..(103): Homolog of NCBI NO: 37531058 NR Description: putative proline-rich protein
  misc_feature (2)..(100): Homolog of NCBI NO: 37531088 NR Description: putative proline-rich protein
  misc_feature (2)..(100): Homolog of NCBI NO: 37531090 NR Description: putative proline-rich protein
  misc_feature (6)..(100): Homolog of NCBI NO: 6689616 NR Description: proline-rich protein [Zea mays]
MAPERMLLGVCAVLMVVGVTNAAEGQVASVVVGLARCADITRKNMKAEAGFKGLQVAIKCKNSNGEYETKAVSEIQSSGAFSVPLAADLHGADCHAQLHSFGSLFFVP

SEQ ID NO: 110373 - protein, 103 aa, Zea mays subsp. mays
  misc_feature (1)..(103): Ceres Seq. ID no. 15175820
  misc_feature (5)..(95): Homolog of NCBI NO: 37531076 NR Description: putative proline-rich protein
  misc_feature (5)..(98): Homolog of NCBI NO: 37531074 NR Description: putative proline-rich protein
  misc_feature (1)..(95): Homolog of NCBI NO: 37531086 NR Description: putative proline-rich protein
  misc_feature (1)..(94): Homolog of NCBI NO: 37531094 NR Description: putative proline-rich protein
  misc_feature (1)..(94): Homolog of NCBI NO: 18676394 NR Description: proline-rich protein [Oryza sativa]
  misc_feature (1)..(95): Homolog of NCBI NO: 37531092 NR Description: putative proline-rich protein
  misc_feature (1)..(98): Homolog of NCBI NO: 37531058 NR Description: putative proline-rich protein
  misc_feature (1)..(95): Homolog of NCBI NO: 37531088 NR Description: putative proline-rich protein
  misc_feature (1)..(95): Homolog of NCBI NO: 37531090 NR Description: putative proline-rich protein
  misc_feature (1)..(95): Homolog of NCBI NO: 6689616 NR Description: proline-rich protein [Zea mays]
MLLGVCAVLMVVGVTNAAEGQVASVVVGLARCADITRKNMKAEAGFKGLQVAIKCKNSNGEYETKAVSEIQSSGAFSVPLAADLHGADCHAQLHSFGSLFFVP

SEQ ID NO: 110374 - DNA, 1515 bp, Zea mays subsp. mays
  misc_feature (1)..(1515): Ceres Seq. ID no. 12566239
gataatagttccttgaaaaccggtgcctttttctagcggcgaggaggcaggcggtagcggaatctggcaccggccatcacgtcccctcccgccgcttcctcctccctgccctacctttccccagatccgaatccattaaaccagcggatcttgcatcggggcgcgtccacggcatccgggcaagcgagtggtggagccagcagccatgagatggtatgcatcggtagcctcctgagggcgctggtgctgcgtgcggcgtcgtctgcgggcaggcgccgggggcccaggattctgtgtggccgcgcgacggatgtgcgcgtgacgccacggcacggacacggctggcgcgggttccgggcggtcacgggaaggatgatgctggactcctctgagtctgcctcttccgccgccgccgccgccgcggaggcgggagctggggcggtggcaggccaggcgcagccgcagcgccgcgcggtgggggccgtgccccaggcgcacgatggtggctacgccagcggcggatgggagagagaagatggtaaactgagttgtggatactcaagttttagagggaagagagctacaatggaggatttctatgatgtaaaactaactgaaattgatggacaagctattagcctgttcggtgtttttgacggtcatggtggatcacgtgctgctgagtatttgagggagcacttgtttgagaaccttctcaagcaccctgatttcttgacggatacaaagcttgctataagcgaaacatatcagaaaaccgatacagatttcttggaatcggaagcaagtgctttcagagatgatggttcaacagcttcaactgcaattttggtgggtgaccgtctgtatgttgcaaatgttggtgattctcgtgctgttatttcaaaagctggcaaagctatggcactttcagaagatcacaaacctaacaggattgatgagcgaaagagaatagaaaatgctggtggtattgtcatttgggctggtacttggagggtaggtggtgtattggcgatgtctcgtgcatttggcaatcgtttactgaagccatatgtggtggcggaacctgaaattcaggaagaacagttcagtgatgagctggaatgcctggttctcgctagtgacgggctttgggatgttgtggaaaatgaggaagccgtttcccttggcaaatcagaggacacgccagagtctgcagctcggaaattgacagagatcgcttattctcgtggcagcgctgacaatatcacgtgtatcgtggttcaatttcaccatgacaaaaccggatgagccatgtggcggccaatttcagttgtaccctgcttcaggctattattatcctgcaagccgggtggtggggcttctctcagatttatcgctcttgtagcaacttccaagaactcgtccattgattcttttgttgtcttgtaggaaacatttgttccaacaggtgtaatagatattttcaatgggttaatttctaataaaactatgttt

SEQ ID NO: 110375 - protein, 365 aa, Zea mays subsp. mays
  misc_feature (1)..(365): Ceres Seq. ID no. 12566240
  misc_feature (112)..(352): Pfam Name: Protein phosphatase 2C Pfam Description: Protein phosphatase 2C
  misc_feature (101)..(364): Homolog of NCBI NO: 11358728 NR Description: protein phosphatase 2C-like protein - Arabidopsis
  misc_feature (97)..(361): Homolog of NCBI NO: 38345197 NR Description: OSJNBa0015K02.7 [Oryza sativa (japonica
  misc_feature (102)..(359): Homolog of NCBI NO: 20146110 NR Description: protein phosphatase 2C [Mesembryanthemum
  misc_feature (101)..(364): Homolog of NCBI NO: 18416366 NR Description: protein phosphatase 2C -like protein
  misc_feature (101)..(364): Homolog of NCBI NO: 15238651 NR Description: Protein phosphatase 2C-like protein; protein id:
  misc_feature (94)..(365): Homolog of NCBI NO: 30689144 NR Description: protein phosphatase 2C (PP2C), putative
  misc_feature (126)..(365): Homolog of NCBI NO: 34912708 NR Description: putative protein phosphatase 2C-like protein
  misc_feature (126)..(364): Homolog of NCBI NO: 9757995 NR Description: protein phosphatase 2C-like [Arabidopsis thaliana]
  misc_feature (1)..(364): Homolog of NCBI NO: 18086420 NR Description: AT5g53140/MFH8_8 [Arabidopsis thaliana]
  misc_feature (1)..(364): Homolog of NCBI NO: 18423476 NR Description: protein phosphatase 2C (PP2C)
MVCIGSLLRALVLRAASSAGRRRGPRILCGRATDVRVTPRHGHGWRGFRAVTGRMMLDSSESASSAAAAAAEAGAGAVAGQAQPQRRAVGAVPQAHDGGYASGGWEREDGKLSCGYSSFRGKRATMEDFYDVKLTEIDGQAISLFGVFDGHGGSRAAEYLREHLFENLLKHPDFLTDTKLAISETYQKTDTDFLESEASAFRDDGSTASTAILVGDRLYVANVGDSRAVISKAGKAMALSEDHKPNRIDERKRIENAGGIVIWAGTWRVGGVLAMSRAFGNRLLKPYVVAEPEIQEEQFSDELECLVLASDGLWDVVENEEAVSLGKSEDTPESAARKLTEIAYSRGSADNITCIVVQFHHDKTG

SEQ ID NO: 110376 - protein, 311 aa, Zea mays subsp. mays
  misc_feature (1)..(311): Ceres Seq. ID no. 12566241
  misc_feature (58)..(298): Pfam Name: Protein phosphatase 2C Pfam Description: Protein phosphatase 2C
  misc_feature (47)..(310): Homolog of NCBI NO: 11358728 NR Description: protein phosphatase 2C-like protein - Arabidopsis
  misc_feature (43)..(307): Homolog of NCBI NO: 38345197 NR Description: OSJNBa0015K02.7 [Oryza sativa (japonica
  misc_feature (48)..(305): Homolog of NCBI NO: 20146110 NR Description: protein phosphatase 2C [Mesembryanthemum
  misc_feature (47)..(310): Homolog of NCBI NO: 18416366 NR Description: protein phosphatase 2C -like protein
  misc_feature (47)..(310): Homolog of NCBI NO: 15238651 NR Description: Protein phosphatase 2C-like protein; protein id:
  misc_feature (40)..(311): Homolog of NCBI NO: 30689144 NR Description: protein phosphatase 2C (PP2C), putative
  misc_feature (72)..(311): Homolog of NCBI NO: 34912708 NR Description: putative protein phosphatase 2C-like protein
  misc_feature (72)..(310): Homolog of NCBI NO: 9757995 NR Description: protein phosphatase 2C-like [Arabidopsis thaliana]
  misc_feature (1)..(310): Homolog of NCBI NO: 18086420 NR Description: AT5g53140/MFH8_8 [Arabidopsis thaliana]
  misc_feature (1)..(310): Homolog of NCBI NO: 18423476 NR Description: protein phosphatase 2C (PP2C)
MMLDSSESASSAAAAAAEAGAGAVAGQAQPQRRAVGAVPQAHDGGYASGGWEREDGKLSCGYSSFRGKRATMEDFYDVKLTEIDGQAISLFGVFDGHGGSRAAEYLREHLFENLLKHPDFLTDTKLAISETYQKTDTDFLESEASAFRDDGSTASTAILVGDRLYVANVGDSRAVISKAGKAMALSEDHKPNRIDERKRIENAGGIVIWAGTWRVGGVLAMSRAFGNRLLKPYVVAEPEIQEEQFSDELECLVLASDGLWDVVENEEAVSLGKSEDTPESAARKLTEIAYSRGSADNITCIVVQFHHDKTG

SEQ ID NO: 110377 - protein, 310 aa, Zea mays subsp. mays
  misc_feature (1)..(310): Ceres Seq. ID no. 12566242
  misc_feature (57)..(297): Pfam Name: Protein phosphatase 2C Pfam Description: Protein phosphatase 2C
  misc_feature (47)..(304): Homolog of NCBI NO: 20146110 NR Description: protein phosphatase 2C [Mesembryanthemum
  misc_feature (46)..(309): Homolog of NCBI NO: 18416366 NR Description: protein phosphatase 2C -like protein
  misc_feature (46)..(309): Homolog of NCBI NO: 15238651 NR Description: Protein phosphatase 2C-like protein; protein id:
  misc_feature (39)..(310): Homolog of NCBI NO: 30689144 NR Description: protein phosphatase 2C (PP2C), putative
  misc_feature (46)..(309): Homolog of NCBI NO: 11358728 NR Description: protein phosphatase 2C-like protein - Arabidopsis
  misc_feature (42)..(306): Homolog of NCBI NO: 38345197 NR Description: OSJNBa0015K02.7 [Oryza sativa (japonica
  misc_feature (71)..(310): Homolog of NCBI NO: 34912708 NR Description: putative protein phosphatase 2C-like protein
  misc_feature (71)..(309): Homolog of NCBI NO: 9757995 NR Description: protein phosphatase 2C-like [Arabidopsis thaliana]
  misc_feature (1)..(309): Homolog of NCBI NO: 18086420 NR Description: AT5g53140/MFH8_8 [Arabidopsis thaliana]
  misc_feature (1)..(309): Homolog of NCBI NO: 18423476 NR Description: protein phosphatase 2C (PP2C)
MLDSSESASSAAAAAAEAGAGAVAGQAQPQRRAVGAVPQAHDGGYASGGWEREDGKLSCGYSSFRGKRATMEDFYDVKLTEIDGQAISLFGVFDGHGGSRAAEYLREHLFENLLKHPDFLTDTKLAISETYQKTDTDFLESEASAFRDDGSTASTAILVGDRLYVANVGDSRAVISKAGKAMALSEDHKPNRIDERKRIENAGGIVIWAGTWRVGGVLAMSRAFGNRLLKPYVVAEPEIQEEQFSDELECLVLASDGLWDVVENEEAVSLGKSEDTPESAARKLTEIAYSRGSADNITCIVVQFHHDKTG

SEQ ID NO: 110378 - DNA, 836 bp, Zea mays subsp. mays
  misc_feature (1)..(836): Ceres Seq. ID no. 13586031
aaaccaaaataatcgccaccgctctccgcaccgaaccgaagcagcggcgatgtcggcggagaagccggctcccgtgcgcgtgctctactgcggcgtctgcggcctcccggccgagtactgcgagttcggccccgacttcgagcgctgcaagccctggctgcgcgcgcacgcgcccggcgtctaccccgacgaccttgtcgccgcctcctcctcacccggcggcggcgacaaggacgtcgacaaggtcggggatcgcctccagggcgtcgggatctccgacggctccaccggcgccgcaggggatgcttccgcgtctaagccccaagaggcgaaacgcctgcctggtggtaagctcaagaaaaaggagaagcaagaagtggtcattgagaagattgtccgtaacaagcgcaaatgtgttactgtggtgaaagggcttgaattgtttggtgtaaagcttagtgatgcttcgaagaagcttgggaagaagtttgcaaccggagcttctgttgttaagggccctacggagaaggagcaaatcgacgtacaaggggacatctcatatgatattgtggagttcattacagatacatggcctgatgtacctgagtcggccattttcttcattgaagatggaaggaaggttcctgctgcttgatgccatatggtttataaggcacgagaccaggcatatagggccataccagctcgtctcttgtccgaagtcatgaactgttgttccggtttttaggcctacttcacaagtggcatttttttttaccaccgtcacctgcttccatgtatgaaatcaaatctatacagttaccaatttactgttt

SEQ ID NO: 110379 - protein, 217 aa, Zea mays subsp. mays
  misc_feature (1)..(217): Ceres Seq. ID no. 13586032
  misc_feature (87)..(205): Homolog of NCBI NO: 4755083 NR Description: density regulated protein drp1 [Homo sapiens]
  misc_feature (24)..(191): Homolog of NCBI NO: 13386092 NR Description: density-regulated protein [Mus musculus]
  misc_feature (24)..(191): Homolog of NCBI NO: 4755083 NR Description: density regulated protein drp1 [Homo sapiens]
  misc_feature (27)..(193): Homolog of NCBI NO: 6322474 NR Description: Hypothetical ORF; Yjr014wp [Saccharomyces
  misc_feature (24)..(205): Homolog of NCBI NO: 34872329 NR Description: similar to density-regulated protein [Rattus
  misc_feature (27)..(210): Homolog of NCBI NO: 19113595 NR Description: hypothetical protein [Schizosaccharomyces pombe]
  misc_feature (19)..(108): Homolog of NCBI NO: 11357422 NR Description: hypothetical protein F14F18.70 - Arabidopsis
  misc_feature (105)..(216): Homolog of NCBI NO: 11357422 NR Description: hypothetical protein F14F18.70 - Arabidopsis
  misc_feature (19)..(216): Homolog of NCBI NO: 22326739 NR Description: expressed protein [Arabidopsis thaliana]
  misc_feature (9)..(208): Homolog of NCBI NO: 34903554 NR Description: P0001B06.29 [Oryza sativa (japonica
NQNNRHRSPHRTEAAAMSAEKPAPVRVLYCGVCGLPAEYCEFGPDFERCKPWLRAHAPGVYPDDLVAASSSPGGGDKDVDKVGDRLQGVGISDGSTGAAGDASASKPQEAKRLPGGKLKKKEKQEVVIEKIVRNKRKCVTVVKGLELFGVKLSDASKKLGKKFATGASVVKGPTEKEQIDVQGDISYDIVEFITDTWPDVPESAIFFIEDGRKVPAA

SEQ ID NO: 110380 - protein, 201 aa, Zea mays subsp. mays
  misc_feature (1)..(201): Ceres Seq. ID no. 13586033
  misc_feature (71)..(189): Homolog of NCBI NO: 4755083 NR Description: density regulated protein drp1 [Homo sapiens]
  misc_feature (8)..(175): Homolog of NCBI NO: 13386092 NR Description: density-regulated protein [Mus musculus]
  misc_feature (8)..(175): Homolog of NCBI NO: 4755083 NR Description: density regulated protein drp1 [Homo sapiens]
  misc_feature (11)..(177): Homolog of NCBI NO: 6322474 NR Description: Hypothetical ORF; Yjr014wp [Saccharomyces
  misc_feature (8)..(189): Homolog of NCBI NO: 34872329 NR Description: similar to density-regulated protein [Rattus
  misc_feature (11)..(194): Homolog of NCBI NO: 19113595 NR Description: hypothetical protein [Schizosaccharomyces pombe]
  misc_feature (3)..(92): Homolog of NCBI NO: 11357422 NR Description: hypothetical protein F14F18.70 - Arabidopsis
  misc_feature (89)..(200): Homolog of NCBI NO: 11357422 NR Description: hypothetical protein F14F18.70 - Arabidopsis
  misc_feature (3)..(200): Homolog of NCBI NO: 22326739 NR Description: expressed protein [Arabidopsis thaliana]
  misc_feature (1)..(192): Homolog of NCBI NO: 34903554 NR Description: P0001B06.29 [Oryza sativa (japonica
MSAEKPAPVRVLYCGVCGLPAEYCEFGPDFERCKPWLRAHAPGVYPDDLVAASSSPGGGDKDVDKVGDRLQGVGISDGSTGAAGDASASKPQEAKRLPGGKLKKKEKQEVVIEKIVRNKRKCVTVVKGLELFGVKLSDASKKLGKKFATGASVVKGPTEKEQIDVQGDISYDIVEFITDTWPDVPESAIFFIEDGRKVPAA

SEQ ID NO: 110381 - protein, 141 aa, Zea mays subsp. mays
  misc_feature (1)..(141): Ceres Seq. ID no. 13586034
TKIIATALRTEPKQRRCRRRSRLPCACSTAASAASRPSTASSAPTSSAASPGCARTRPASTPTTLSPPPPHPAAATRTSTRSGIASRASGSPTAPPAPQGMLPRLSPKRRNACLVVSSRKRRSKKWSLRRLSVTSANVLLW

SEQ ID NO: 110382 - DNA, 1138 bp, Zea mays subsp. mays
  misc_feature (1)..(1138): Ceres Seq. ID no. 15180067
aaaaacactttccgtcagctgcaagaaaggagaaccaattctccctcgaaaaaaaagtcccgtcgttttcctcacagttccttcggcctccgcttccactcccacccgccccgccgtcgcgatgcacaagacggctcaggcatggttcaccggcgggaccgccgcctcctccggcgccgctgccgagtcgcagccgtccctgctcgctgactggaactcgtacgcccccacccgctccgacgcctcctcctcctccccgctccccttcgacatcgaagccgccgtccgctccgccaacgacaccgtctccggcaccttaagctcggtgaccaagggcgtgcgggagctgccggggagcttccagagcgccaccagcagcttcccctccggaaaggctctcatgtacttcggcctcttcctcgccaccggcatcttcttcgtcttcatcgccttcgcgctcttcctccccgtcatggtgctcatgccacagaagttcgccatctccttcacgctcgggtgcgcgctcatcattgcctcgctcttcgcgcttaaggggccagccaaccagctcgcccacatgacttccaaggagaggctaccgttttcagttggatttattggatgcatggtcggtacaatttatgtttctatggtgcttcacagctatttcctctctgtgatcttctcagtccttcaggttctggcccttgcatattacaccatatcctacttccctggaggatctagtggactgaaattcatctcgtctggtctgttgtcctcggcaacaagttgttttggtcgatgaccttcctttgtcaattgtcatacatttatttgatcataccatgttatcgctttaagatttttgtatgtagctgctgatcatccctttgaggctttgtttggtactctagtattgactcatctacatgtgttgaggtggattgatgtgtaaattagtttaagttacatcccatgatcccaatccacctcaatacatgtggattgtggtcaatactagagtacccaaactaggtctgatagagattccatggtgtttcctctcctgtcatcctgtttgtttgtctagacttggactggtgttgaatatataattatatagattatagagtgg

SEQ ID NO: 110383 - protein, 268 aa, Zea mays subsp. mays
  misc_feature (1)..(268): Ceres Seq. ID no. 15180068
  misc_feature (152)..(262): Homolog of NCBI NO: 19571762 NR Description: similar to C18E9.10 [Tetraodon nigroviridis]
  misc_feature (114)..(256): Homolog of NCBI NO: 17532001 NR Description: mammalian syntaxin 5 like (25.7 kD) (2J246)
  misc_feature (99)..(256): Homolog of NCBI NO: 39597537 NR Description: Hypothetical protein CBG03219 [Caenorhabditis
  misc_feature (133)..(262): Homolog of NCBI NO: 6319366 NR Description: similar to mammalian syntaxin 5; Sft2p
  misc_feature (121)..(268): Homolog of NCBI NO: 23619167 NR Description: hypothetical protein, conserved [Plasmodium
  misc_feature (131)..(254): Homolog of NCBI NO: 40746734 NR Description: hypothetical protein AN1297.2 [Aspergillus
  misc_feature (43)..(107): Homolog of NCBI NO: 7486785 NR Description: hypothetical protein M3E9.20 - Arabidopsis
  misc_feature (109)..(268): Homolog of NCBI NO: 7486785 NR Description: hypothetical protein M3E9.20 - Arabidopsis
  misc_feature (41)..(268): Homolog of NCBI NO: 15241114 NR Description: expressed protein [Arabidopsis thaliana]
  misc_feature (45)..(268): Homolog of NCBI NO: 18416771 NR Description: expressed protein [Arabidopsis thaliana]
KTLSVSCKKGEPILPRKKSPVVFLTVPSASASTPTRPAVAMHKTAQAWFTGGTAASSGAAAESQPSLLADWNSYAPTRSDASSSSPLPFDIEAAVRSANDTVSGTLSSVTKGVRELPGSFQSATSSFPSGKALMYFGLFLATGIFFVFIAFALFLPVMVLMPQKFAISFTLGCALIIASLFALKGPANQLAHMTSKERLPFSVGFIGCMVGTIYVSMVLHSYFLSVIFSVLQVLALAYYTISYFPGGSSGLKFISSGLLSSATSCFGR

SEQ ID NO: 110384 - protein, 228 aa, Zea mays subsp. mays
  misc_feature (1)..(228): Ceres Seq. ID no. 15180069
  misc_feature (112)..(222): Homolog of NCBI NO: 19571762 NR Description: similar to C18E9.10 [Tetraodon nigroviridis]
  misc_feature (74)..(216): Homolog of NCBI NO: 17532001 NR Description: mammalian syntaxin 5 like (25.7 kD) (2J246)
  misc_feature (59)..(216): Homolog of NCBI NO: 39597537 NR Description: Hypothetical protein CBG03219 [Caenorhabditis
  misc_feature (93)..(222): Homolog of NCBI NO: 6319366 NR Description: similar to mammalian syntaxin 5; Sft2p
  misc_feature (81)..(228): Homolog of NCBI NO: 23619167 NR Description: hypothetical protein, conserved [Plasmodium
  misc_feature (91)..(214): Homolog of NCBI NO: 40746734 NR Description: hypothetical protein AN1297.2 [Aspergillus
  misc_feature (3)..(67): Homolog of NCBI NO: 7486785 NR Description: hypothetical protein M3E9.20 - Arabidopsis
  misc_feature (69)..(228): Homolog of NCBI NO: 7486785 NR Description: hypothetical protein M3E9.20 - Arabidopsis
  misc_feature (1)..(228): Homolog of NCBI NO: 15241114 NR Description: expressed protein [Arabidopsis thaliana]
  misc_feature (5)..(228): Homolog of NCBI NO: 18416771 NR Description: expressed protein [Arabidopsis thaliana]
MHKTAQAWFTGGTAASSGAAAESQPSLLADWNSYAPTRSDASSSSPLPFDIEAAVRSANDTVSGTLSSVTKGVRELPGSFQSATSSFPSGKALMYFGLFLATGIFFVFIAFALFLPVMVLMPQKFAISFTLGCALIIASLFALKGPANQLAHMTSKERLPFSVGFIGCMVGTIYVSMVLHSYFLSVIFSVLQVLALAYYTISYFPGGSSGLKFISSGLLSSATSCFGR

SEQ ID NO: 110385 - protein, 135 aa, Zea mays subsp. mays
  misc_feature (1)..(135): Ceres Seq. ID no. 15180070
  misc_feature (12)..(119): Homolog of NCBI NO: 40786408 NR Description: hypothetical protein LOC375035 [Homo sapiens]
  misc_feature (19)..(129): Homolog of NCBI NO: 19571762 NR Description: similar to C18E9.10 [Tetraodon nigroviridis]
  misc_feature (1)..(123): Homolog of NCBI NO: 17532001 NR Description: mammalian syntaxin 5 like (25.7 kD) (2J246)
  misc_feature (1)..(123): Homolog of NCBI NO: 39597537 NR Description: Hypothetical protein CBG03219 [Caenorhabditis
  misc_feature (1)..(129): Homolog of NCBI NO: 6319366 NR Description: similar to mammalian syntaxin 5; Sft2p
  misc_feature (1)..(135): Homolog of NCBI NO: 23619167 NR Description: hypothetical protein, conserved [Plasmodium
  misc_feature (1)..(121): Homolog of NCBI NO: 40746734 NR Description: hypothetical protein AN1297.2 [Aspergillus
  misc_feature (1)..(135): Homolog of NCBI NO: 7486785 NR Description: hypothetical protein M3E9.20 - Arabidopsis
  misc_feature (1)..(135): Homolog of NCBI NO: 15241114 NR Description: expressed protein [Arabidopsis thaliana]
  misc_feature (1)..(135): Homolog of NCBI NO: 18416771 NR Description: expressed protein [Arabidopsis thaliana]
MYFGLFLATGIFFVFIAFALFLPVMVLMPQKFAISFTLGCALIIASLFALKGPANQLAHMTSKERLPFSVGFIGCMVGTIYVSMVLHSYFLSVIFSVLQVLALAYYTISYFPGGSSGLKFISSGLLSSATSCFGR

SEQ ID NO: 110386 - DNA, 667 bp, Zea mays subsp. mays
  misc_feature (1)..(667): Ceres Seq. ID no. 12484007
  misc_feature: MA Experiment ID: 108527 Result: Up-regulated in Transcription
  misc_feature: MA Experiment 108527 PARAMETER Experiment Name: Zm_5mM_NO_P Parameter: Age (day) Value: 8
  misc_feature: MA Experiment 108527 PARAMETER Experiment Name: Zm_5mM_NO_P Parameter: Organism Value: Zea mays
  misc_feature: MA Experiment 108527 PARAMETER Experiment Name: Zm_5mM_NO_P Parameter: Plant Line Value: 35A19
  misc_feature: MA Experiment 108527 PARAMETER Experiment Name: Zm_5mM_NO_P Parameter: Timepoint (hr) Value: 6
  misc_feature: MA Experiment 108527 PARAMETER Experiment Name: Zm_5mM_NO_P Parameter: Tissue Value: Aerial
  misc_feature: MA Experiment 108527 PARAMETER Experiment Name: Zm_5mM_NO_P Parameter: Treatment Value: 5mM NO vs. No Treatment
  misc_feature: MA Experiment ID: 108535 Result: Down-regulated in Transcription
  misc_feature: MA Experiment 108535 PARAMETER Experiment Name: Zm_Meristem_P Parameter: Age (day) Value: 8
  misc_feature: MA Experiment 108535 PARAMETER Experiment Name: Zm_Meristem_P Parameter: Organism Value: Zea mays
  misc_feature: MA Experiment 108535 PARAMETER Experiment Name: Zm_Meristem_P Parameter: Plant Line Value: 35A19
  misc_feature: MA Experiment 108535 PARAMETER Experiment Name: Zm_Meristem_P Parameter: Tissue Value: Root Meristem vs. Above Root Meristem
  misc_feature: MA Experiment ID: 20000108 Result: Down-regulated in Transcription
  misc_feature: MA Experiment 20000108 PARAMETER Experiment Name: Zm_Root-Tips_P Parameter: Age (day) Value: 12
  misc_feature: MA Experiment 20000108 PARAMETER Experiment Name: Zm_Root-Tips_P Parameter: Organism Value: Zea mays
  misc_feature: MA Experiment 20000108 PARAMETER Experiment Name: Zm_Root-Tips_P Parameter: Tissue Value: Root tips vs. Root mid region    35
  misc_feature: MA Experiment 20000108 PARAMETER Experiment Name: Zm_Root-Tips_P Parameter: Tissue Value: Root tips vs. Root mid region   Sequence Listing-Misc Features (4)
gcgccgtcccgtgctccctccgctagttctcccaattccttccccacctcctcggtcgtcgcctcccccagagagcaggagccgcctcgtccctgccggtcccgacccccatcccgtccgcgtccaacgccatgaatcccgagtacgggctcgggttcaggaggtacgacgacgccagcagcggcagcggcaggctgaggtgctttgggcactccgggatgggcggctcgaccgggttctgcgacgtggagaacggcttcgccatcgcggtgacggtgaacaagctgtctctgggcagcgtcacgcgcggcgtcgtccggctcgtcctcgaggagctgggcctgcccgtgccggacgagtactcggccaccggggagaaggggcctgacatgatgctcaacctgacgacaacgacgacgactacgccgccgcaactgagatgacggcgaaactgagattaccaggttgggttcgtaataatctgtggaacaagatatatagcgagcagaaggaaggtggggtacagggatttggtggacagtatatatacgcgtgccattttgattttgacgtggcatgtaaaactcggcaaattctggtatattacgaagctgggtgctgggaatagtggccagcagtacaagaaatggacatgctagtttgttgc

SEQ ID NO: 110387 - protein, 128 aa, Zea mays subsp. mays
  misc_feature (1)..(128): Ceres Seq. ID no. 12484008
RRPVLPPLVLPIPSPPPRSSPPPESRSRLVPAGPDPHPVRVQRHESRVRARVQEVRRRQQRQRQAEVLWALRDGRLDRVLRRGERLRHRGDGEQAVSGQRHARRRPARPRGAGPARAGRVLGHRGEGA

SEQ ID NO: 110388 - protein, 103 aa, Zea mays subsp. mays
  misc_feature (1)..(103): Ceres Seq. ID no. 12484009
  misc_feature (4)..(89): Homolog of NCBI NO: 18420844 NR Description: putative protein
MNPEYGLGFRRYDDASSGSGRLRCFGHSGMGGSTGFCDVENGFAIAVTVNKLSLGSVTRGVVRLVLEELGLPVPDEYSATGEKGPDMMLNLTTTTTTTPPQLR

SEQ ID NO: 110389 - protein, 74 aa, Zea mays subsp. mays
  misc_feature (1)..(74): Ceres Seq. ID no. 12484010
  misc_feature (1)..(60): Homolog of NCBI NO: 18420844 NR Description: putative protein
MGGSTGFCDVENGFAIAVTVNKLSLGSVTRGVVRLVLEELGLPVPDEYSATGEKGPDMMLNLTTTTTTTPPQLR

SEQ ID NO: 110390 - DNA, 807 bp, Zea mays subsp. mays
  misc_feature (1)..(807): Ceres Seq. ID no. 13586102
ggggttggcggttttgaaaaacctttttttttttttttttttttttttttttttttttttttttttttttttttttttttttttttttttttttttttttttttttttcatctagtatttaattttatataatgattaattagttctaatagcaaataattaatacaaatcatattacaccttttgcatggtattctcattcttaattttctgcaacatagttctaatagcaaacttccaaaacaggcacacagataaaagtactagtgcttcacatcatcacctcttgtgtggaactgaaggggaacatgtgatgctggcgacgaaatctcggaactagcgcagcaggaatcgaaccgcagccacggcatcacccttgtgctcacggagcgttctctccgcgatcttcttgtccagctcaagctcactagcgataatttcgacatcggcagggttgatcttgacagcagccaattctttctccctcagcctcatcgcgttccagtcagcctccttggatgaagcaagtgccgccatggcggattggacacgggatgaatcgagctgccggtcctcgacatgatcagtgagcttgtcgagcgccttgctctgctgctgaaggtccttggagtccaccgcgccctcgccctcggcggcaccggcccccgcggctgcagcggacgcagccatcgcagccttctcgtcgcccgccgcacccatcgccgtctaaaaccctaacccggatctacttttctccgatgagacgagtgtgtgcactgtgccacaggcggctgacgagatggccgt

SEQ ID NO: 110391 - protein, 52 aa, Zea mays subsp. mays
  misc_feature (1)..(52): Ceres Seq. ID no. 13586103
MISELVERLALLLKVLGVHRALALGGTGPRGCSGRSHRSLLVARRTHRRLKP

SEQ ID NO: 110392 - protein, 50 aa, Zea mays subsp. mays
  misc_feature (1)..(50): Ceres Seq. ID no. 13586104
  misc_feature (1)..(15): Homolog of NCBI NO: 40548804 NR Description: NADH dehydrogenase subunit 6 [Dirofilaria
MVFSFLIFCNIVLIANFQNRHTDKSTSASHHHLLCGTEGEHVMLATKSRN

SEQ ID NO: 110393 - protein, 43 aa, Zea mays subsp. mays
  misc_feature (1)..(43): Ceres Seq. ID no. 13586105
  misc_feature (10)..(43): Homolog of NCBI NO: 23487594 NR Description: hypothetical protein [Plasmodium yoelii yoelii]
GVGGFEKPFFFFFFFFFFFFFFFFFFFFFFFFFFFFHLVFNFI

SEQ ID NO: 110394 - DNA, 730 bp, Zea mays subsp. mays
  misc_feature (1)..(730): Ceres Seq. ID no. 12566590
accaccccacccattcactcgccttgcgcttcctcgccgccccagttccccaccccctgctcacccacccgtcccctcctgctcgcccatggctcccatcgctgtcggcgacgccctccccgacggccagctcgggtggttcgacgagaacgaccagctgcagcaggtctccgtccacgcgctcgccgccggcaagaaggtcatcctcttcggcgtccccggcgccttcaccccgacctgcagcaaccagcatgtgccaggcttcatcacacaggctgagcagctcaaagccaagggtgtagacgagatcctgcttatcagcgttaacgaccccttcgtcatgaaggcgtgggcgaagacctaccccgagaacaagcacgtgaagttcctcgccgacggatctggagcgtacaccaaggcgctcgacctcgagctcgatctcacggacaaaggtctgggcgtgcgctcgaagaggttcgctctcctggccgacgacctcacggtcaccgtcgcaaacatcgaggaaggcgggcagttcacgatctctggcgctgaggagatcctgaaggcgctttagaagccgcagcaacgatcggtctagtttgaactcgcctttgaataacttgtcgttggacaaggtctagttcggtgttgtgtatggaacggtcgtcactgagtcatgcacgatttggtatccgtgtgtttatgttcgccggtttgaggaactctc

SEQ ID NO: 110395 - protein, 191 aa, Zea mays subsp. mays
  misc_feature (1)..(191): Ceres Seq. ID no. 12566591
  misc_feature (35)..(189): Pfam Name: AhpC/TSA family Pfam Description: AhpC/TSA family
  misc_feature (30)..(191): Homolog of NCBI NO: 4704732 NR Description: peroxiredoxin TPx2 [Arabidopsis thaliana]
  misc_feature (30)..(191): Homolog of NCBI NO: 19548660 NR Description: peroxiredoxin [Populus tremula x Populus
  misc_feature (30)..(191): Homolog of NCBI NO: 30841938 NR Description: thioredoxin peroxidase 1 [Lycopersicon esculentum]
  misc_feature (30)..(191): Homolog of NCBI NO: 21593881 NR Description: type 2 peroxiredoxin, putative [Arabidopsis
  misc_feature (30)..(191): Homolog of NCBI NO: 18406870 NR Description: peroxiredoxin, putative
  misc_feature (30)..(191): Homolog of NCBI NO: 18654477 NR Description: thioredoxin peroxidase [Capsicum annuum]
  misc_feature (30)..(191): Homolog of NCBI NO: 15218876 NR Description: type 2 peroxiredoxin, putative
  misc_feature (30)..(191): Homolog of NCBI NO: 15218877 NR Description: type 2 peroxiredoxin, putative
  misc_feature (30)..(191): Homolog of NCBI NO: 4928472 NR Description: type 2 peroxiredoxin [Brassica rapa subsp.
  misc_feature (30)..(191): Homolog of NCBI NO: 34911078 NR Description: peroxiredoxin [Oryza sativa (japonica
PPHPFTRLALPRRPSSPPPAHPPVPSCSPMAPIAVGDALPDGQLGWFDENDQLQQVSVHALAAGKKVILFGVPGAFTPTCSNQHVPGFITQAEQLKAKGVDEILLISVNDPFVMKAWAKTYPENKHVKFLADGSGAYTKALDLELDLTDKGLGVRSKRFALLADDLTVTVANIEEGGQFTISGAEEILKAL

SEQ ID NO: 110396 - protein, 162 aa, Zea mays subsp. mays
  misc_feature (1)..(162): Ceres Seq. ID no. 12566592
  misc_feature (6)..(160): Pfam Name: AhpC/TSA family Pfam Description: AhpC/TSA family
  misc_feature (1)..(162): Homolog of NCBI NO: 4704732 NR Description: peroxiredoxin TPx2 [Arabidopsis thaliana]
  misc_feature (1)..(162): Homolog of NCBI NO: 19548660 NR Description: peroxiredoxin [Populus tremula x Populus
  misc_feature (1)..(162): Homolog of NCBI NO: 30841938 NR Description: thioredoxin peroxidase 1 [Lycopersicon esculentum]
  misc_feature (1)..(162): Homolog of NCBI NO: 21593881 NR Description: type 2 peroxiredoxin, putative [Arabidopsis
  misc_feature (1)..(162): Homolog of NCBI NO: 18406870 NR Description: peroxiredoxin, putative
  misc_feature (1)..(162): Homolog of NCBI NO: 18654477 NR Description: thioredoxin peroxidase [Capsicum annuum]
  misc_feature (1)..(162): Homolog of NCBI NO: 15218876 NR Description: type 2 peroxiredoxin, putative
  misc_feature (1)..(162): Homolog of NCBI NO: 15218877 NR Description: type 2 peroxiredoxin, putative
  misc_feature (1)..(162): Homolog of NCBI NO: 4928472 NR Description: type 2 peroxiredoxin [Brassica rapa subsp.
  misc_feature (1)..(162): Homolog of NCBI NO: 34911078 NR Description: peroxiredoxin [Oryza sativa (japonica
MAPIAVGDALPDGQLGWFDENDQLQQVSVHALAAGKKVILFGVPGAFTPTCSNQHVPGFITQAEQLKAKGVDEILLISVNDPFVMKAWAKTYPENKHVKFLADGSGAYTKALDLELDLTDKGLGVRSKRFALLADDLTVTVANIEEGGQFTISGAEEILKAL

SEQ ID NO: 110397 - protein, 99 aa, Zea mays subsp. mays
  misc_feature (1)..(99): Ceres Seq. ID no. 12566593
  misc_feature (23)..(99): Homolog of NCBI NO: 1082604 NR Description: mucin 5AC (clone JER58) - human (fragment)
  misc_feature (33)..(99): Homolog of NCBI NO: 34809533 NR Description: Epa5p [Candida glabrata]
  misc_feature (11)..(99): Homolog of NCBI NO: 6324372 NR Description: anchorage subunit of a-agglutinin; Aga1p
  misc_feature (23)..(99): Homolog of NCBI NO: 34809534 NR Description: Epa4p [Candida glabrata]
  misc_feature (23)..(99): Homolog of NCBI NO: 34809533 NR Description: Epa5p [Candida glabrata]
HPTHSLALRFLAAPVPHPLLTHPSPPARPWLPSLSATPSPTASSGGSTRTTSCSRSPSTRSPPARRSSSSASPAPSPRPAATSMCQASSHRLSSSKPRV

SEQ ID NO: 110398 - DNA, 600 bp, Zea mays subsp. mays
  misc_feature (1)..(600): Ceres Seq. ID no. 13586068
atacgactgggtcgctttgacttgcgtaggacactcccgactctagcctcctgcggcttccgcatcctccgcttcgtgtcgtctgccctgctgcccaagcctccggaggttctaccggagccggctcactctcgcgacaccgccgcggcctccggctatatatggacggcgaggaggcgccccttggcgcgctcaacctggctgagtacgcccccgccggcgcccgcaccgtcgactgctacaggcgtatccgcaagatcggcgagggcacctacggtgaggtatttgaagctgtggatattattactggggaaagagcagcacttaagaaaataaaactggatgatggcaaagaagggtttccacgccaaatcttgcgtgagattaaactattaaaaaagctggatcatgagaacatcatcagattgaaagagattgtagtatctcctggttctgcacatggaacaggcggatcagatgatcacatctataggggagatatctacatggtgtttgaatacatggaccatgatttgaagaaagtattgcaccatagtgccccatcccaagtcaaggtttatatggggcagctgctaaaag

SEQ ID NO: 110399 - protein, 146 aa, Zea mays subsp. mays
  misc_feature (1)..(146): Ceres Seq. ID no. 13586069
  misc_feature (27)..(145): Pfam Name: Protein kinase domain Pfam Description: Protein kinase domain
  misc_feature (6)..(145): Homolog of NCBI NO: 34905748 NR Description: cell division cycle 2-like protein kinase
  misc_feature (9)..(145): Homolog of NCBI NO: 7488728 NR Description: cdc2-like protein kinase cdc2MsC - alfalfa
  misc_feature (6)..(145): Homolog of NCBI NO: 15238314 NR Description: Cyclin-dependent kinase C;2 [Arabidopsis
  misc_feature (20)..(145): Homolog of NCBI NO: 12654861 NR Description: Similar to cell division cycle 2-like 5
  misc_feature (9)..(145): Homolog of NCBI NO: 26190145 NR Description: putative cyclin dependent kinase [Physcomitrella
  misc_feature (6)..(145): Homolog of NCBI NO: 15215944 NR Description: cyclin dependent kinase C [Lycopersicon
  misc_feature (20)..(145): Homolog of NCBI NO: 28828850 NR Description: similar to Arabidopsis thaliana (Mouse-ear
  misc_feature (20)..(145): Homolog of NCBI NO: 10719935 NR Description: Cell division cycle 2-like protein kinase 5
  misc_feature (6)..(145): Homolog of NCBI NO: 15238114 NR Description: Cyclin-dependent kinase C;1 [Arabidopsis
  misc_feature (6)..(145): Homolog of NCBI NO: 17064746 NR Description: cdc2-like protein kinase [Arabidopsis thaliana]
MDGEEAPLGALNLAEYAPAGARTVDCYRRIRKIGEGTYGEVFEAVDIITGERAALKKIKLDDGKEGFPRQILREIKLLKKLDHENIIRLKEIVVSPGSAHGTGGSDDHIYRGDIYMVFEYMDHDLKKVLHHSAPSQVKVYMGQLLK

SEQ ID NO: 110400 - protein, 111 aa, Zea mays subsp. mays
  misc_feature (1)..(111): Ceres Seq. ID no. 13586070
IRLGRFDLRRTLPTLASCGFRILRFVSSALLPKPPEVLPEPAHSRDTAAASGYIWTARRRPLARSTWLSTPPPAPAPSTATGVSARSARAPTVRYLKLWILLLGKEQHLRK

SEQ ID NO: 110401 - DNA, 1487 bp, Zea mays subsp. mays
  misc_feature (1)..(1487): Ceres Seq. ID no. 15180548
  misc_feature: MA Experiment ID: 108535 Result: Up-regulated in Transcription
  misc_feature: MA Experiment 108535 PARAMETER Experiment Name: Zm_Meristem_P Parameter: Age (day) Value: 8
  misc_feature: MA Experiment 108535 PARAMETER Experiment Name: Zm_Meristem_P Parameter: Organism Value: Zea mays
  misc_feature: MA Experiment 108535 PARAMETER Experiment Name: Zm_Meristem_P Parameter: Plant Line Value: 35A19
  misc_feature: MA Experiment 108535 PARAMETER Experiment Name: Zm_Meristem_P Parameter: Tissue Value: Root Meristem vs. Above Root Meristem
  misc_feature: MA Experiment ID: 20000492 Result: Up-regulated in Transcription
  misc_feature: MA Experiment 20000492 PARAMETER Experiment Name: Zm_Hybrid_Seed_Dev_P Parameter: DAP Value: 12
  misc_feature: MA Experiment 20000492 PARAMETER Experiment Name: Zm_Hybrid_Seed_Dev_P Parameter: Organism Value: Zea mays
  misc_feature: MA Experiment 20000492 PARAMETER Experiment Name: Zm_Hybrid_Seed_Dev_P Parameter: Plant Line Value: 35A19
  misc_feature: MA Experiment 20000492 PARAMETER Experiment Name: Zm_Hybrid_Seed_Dev_P Parameter: Tissue Value: Fert Kernel vs. Unfert Floret
gttcttccgtttccaccctctctctcgtggttctcccgtgctctgtgtccctagcggcgacgactgggcgatcgccgccgccttaagccaggtgctcaggtctgccacttggcacttcgccggcgacgagcacctaacagaaatggtgcgcagaagttgcttggtatccttattgccattggagaagccgtggcgtatgttctctctggaatgtatggcagtgtgagccaacttggaactgggaatgctatcctcattatacttcagcttttctttgctggtatcattgtcatctgtctagatgaactcctacagaaaggctatggtttgggatctggcatctctctgttcattgctacgaatatctgtgagaatatcatctggaaggcgtttagcccaacaaccatcaacagtgggcgtggtgctgaatttgaaggggcagtcattgcattgttccatctattgattactcgcacagataaagtccgtgctctacgcgaggctttctaccgtcagaatcttccaaatgtgaccaatttacttgctactgtattggtcttcctcatagttatctatttccaaggtttccgtgttgtacttccagtgaggtcaaagaatgcccgtggtcaacaaggctcatacccaatcaagctgttctatacatccaacatgcctatcattctgcactctgcgctaattaccaacctctatttcatatcccagcttctctacaggaaatacagtggaaatttccttgttaaccttcttgggaaatggaaggaatctgagtactctggccattctgttccggttggtggtcttgcttactatgtgactgcgccatcaagcttggctgatgttctggcaaatccagtccatgcattgttctatgtggtctttatgctgtcagcctgtgctctcttctcaaagacatggattgaagtttctggttcatcagcgaaggacgttgctaagcagctgaaggagcaacaaatggtgatgcccggccatcgtgagtcaaacctgcaaagggaactgaacagatacatcccaactgctgcagcatttggaggagtgtgcattggcgcgctaactgtcctagctgatttcatgggcgcaattggctcaggaactggcattctgctcgctgtcactatcatataccagtactttgagacattcgagaaggaaagggcaaccgagcttggtttctttggtttctaatcttcgtcgctggggtatagactgaatcttcctgcaagtgacagtaaatgcttggccggctgtttatgtttgtaattggagagcttatagtcagtttaggttgcgggctaatttacactgggaaatttgtagcaggttctgcatgcgtttttggggccagtatgggcattaagttgtgctcaattataaccactgtcatcatctcttgggattttccgttctcctgtattgactatagaattttggatcaattttgccgtctt

SEQ ID NO: 110402 - protein, 337 aa, Zea mays subsp. mays
  misc_feature (1)..(337): Ceres Seq. ID no. 15180549
  misc_feature (1)..(323): Pfam Name: eubacterial secY protein Pfam Description: eubacterial secY protein
  misc_feature (1)..(336): Homolog of NCBI NO: 29124421 NR Description: Similar to SEC61, alpha subunit (S. cerevisiae)
  misc_feature (1)..(336): Homolog of NCBI NO: 27882231 NR Description: SEC61, alpha subunit [Danio rerio]
  misc_feature (1)..(336): Homolog of NCBI NO: 15219158 NR Description: protein transport protein sec61 alpha subunit
  misc_feature (1)..(337): Homolog of NCBI NO: 15218887 NR Description: flower pigmentation protein ATAN11 [Arabidopsis
  misc_feature (1)..(337): Homolog of NCBI NO: 21593089 NR Description: putative protein transport protein SEC61 alpha
  misc_feature (1)..(337): Homolog of NCBI NO: 20260296 NR Description: putative protein transport protein SEC61 alpha
  misc_feature (1)..(337): Homolog of NCBI NO: 15226261 NR Description: protein transport protein SEC61 alpha subunit
  misc_feature (1)..(337): Homolog of NCBI NO: 6581004 NR Description: putative integral membrane protein [Phaseolus
  misc_feature (1)..(337): Homolog of NCBI NO: 15375074 NR Description: Sec61 alpha subunit [Hordeum vulgare]
  misc_feature (1)..(337): Homolog of NCBI NO: 8886324 NR Description: Sec61p [Triticum aestivum]
MYGSVSQLGTGNAILIILQLFFAGIIVICLDELLQKGYGLGSGISLFIATNICENIIWKAFSPTTINSGRGAEFEGAVIALFHLLITRTDKVRALREAFYRQNLPNVTNLLATVLVFLIVIYFQGFRVVLPVRSKNARGQQGSYPIKLFYTSNMPIILHSALITNLYFISQLLYRKYSGNFLVNLLGKWKESEYSGHSVPVGGLAYYVTAPSSLADVLANPVHALFYVVFMLSACALFSKTWIEVSGSSAKDVAKQLKEQQMVMPGHRESNLQRELNRYIPTAAAFGGVCIGALTVLADFMGAIGSGTGILLAVTIIYQYFETFEKERATELGFFGF

SEQ ID NO: 110403 - protein, 184 aa, Zea mays subsp. mays
  misc_feature (1)..(184): Ceres Seq. ID no. 15180550
  misc_feature (1)..(170): Pfam Name: eubacterial secY protein Pfam Description: eubacterial secY protein
  misc_feature (1)..(183): Homolog of NCBI NO: 29124421 NR Description: Similar to SEC61, alpha subunit (S. cerevisiae)
  misc_feature (1)..(183): Homolog of NCBI NO: 27882231 NR Description: SEC61, alpha subunit [Danio rerio]
  misc_feature (1)..(183): Homolog of NCBI NO: 15219158 NR Description: protein transport protein sec61 alpha subunit
  misc_feature (1)..(184): Homolog of NCBI NO: 15218887 NR Description: flower pigmentation protein ATAN11 [Arabidopsis
  misc_feature (1)..(184): Homolog of NCBI NO: 21593089 NR Description: putative protein transport protein SEC61 alpha
  misc_feature (1)..(184): Homolog of NCBI NO: 20260296 NR Description: putative protein transport protein SEC61 alpha
  misc_feature (1)..(184): Homolog of NCBI NO: 15226261 NR Description: protein transport protein SEC61 alpha subunit
  misc_feature (1)..(184): Homolog of NCBI NO: 6581004 NR Description: putative integral membrane protein [Phaseolus
  misc_feature (1)..(184): Homolog of NCBI NO: 15375074 NR Description: Sec61 alpha subunit [Hordeum vulgare]
  misc_feature (1)..(184): Homolog of NCBI NO: 8886324 NR Description: Sec61p [Triticum aestivum]
MPIILHSALITNLYFISQLLYRKYSGNFLVNLLGKWKESEYSGHSVPVGGLAYYVTAPSSLADVLANPVHALFYVVFMLSACALFSKTWIEVSGSSAKDVAKQLKEQQMVMPGHRESNLQRELNRYIPTAAAFGGVCIGALTVLADFMGAIGSGTGILLAVTIIYQYFETFEKERATELGFFGF

SEQ ID NO: 110404 - DNA, 1320 bp, Zea mays subsp. mays
  misc_feature (1)..(1320): Ceres Seq. ID no. 15179110
  misc_feature: MA Experiment ID: 108504 Result: Down-regulated in Transcription
  misc_feature: MA Experiment 108504 PARAMETER Experiment Name: Zm_Drought_P Parameter: Age (day) Value: 8
  misc_feature: MA Experiment 108504 PARAMETER Experiment Name: Zm_Drought_P Parameter: Organism Value: Zea mays
  misc_feature: MA Experiment 108504 PARAMETER Experiment Name: Zm_Drought_P Parameter: Plant Line Value: 35A19
  misc_feature: MA Experiment 108504 PARAMETER Experiment Name: Zm_Drought_P Parameter: Timepoint (hr) Value: 12
  misc_feature: MA Experiment 108504 PARAMETER Experiment Name: Zm_Drought_P Parameter: Tissue Value: Aerial
  misc_feature: MA Experiment 108504 PARAMETER Experiment Name: Zm_Drought_P Parameter: Treatment Value: Drought vs. No Drought
  misc_feature: MA Experiment ID: 108540 Result: Down-regulated in Transcription
  misc_feature: MA Experiment 108540 PARAMETER Experiment Name: Zm_20percent_PEG_P Parameter: Age (day) Value: 8
  misc_feature: MA Experiment 108540 PARAMETER Experiment Name: Zm_20percent_PEG_P Parameter: Organism Value: Zea mays
  misc_feature: MA Experiment 108540 PARAMETER Experiment Name: Zm_20percent_PEG_P Parameter: Plant Line Value: 35A19
  misc_feature: MA Experiment 108540 PARAMETER Experiment Name: Zm_20percent_PEG_P Parameter: Timepoint (hr) Value: 6
  misc_feature: MA Experiment 108540 PARAMETER Experiment Name: Zm_20percent_PEG_P Parameter: Tissue Value: Aerial
  misc_feature: MA Experiment 108540 PARAMETER Experiment Name: Zm_20percent_PEG_P Parameter: Treatment Value: 20percent PEG vs. No Treatment
  misc_feature: MA Experiment ID: 108544 Result: Down-regulated in Transcription
  misc_feature: MA Experiment ID: 108556 Result: Down-regulated in Transcription
  misc_feature: MA Experiment 108556 PARAMETER Experiment Name: Zm_Drought_P Parameter: Age (day) Value: 9
  misc_feature: MA Experiment 108556 PARAMETER Experiment Name: Zm_Drought_P Parameter: Organism Value: Zea mays
  misc_feature: MA Experiment 108556 PARAMETER Experiment Name: Zm_Drought_P Parameter: Plant Line Value: 35A19
  misc_feature: MA Experiment 108556 PARAMETER Experiment Name: Zm_Drought_P Parameter: Timepoint (hr) Value: 24
  misc_feature: MA Experiment 108556 PARAMETER Experiment Name: Zm_Drought_P Parameter: Tissue Value: Aerial
  misc_feature: MA Experiment 108556 PARAMETER Experiment Name: Zm_Drought_P Parameter: Treatment Value: Drought vs. No Drought
  misc_feature: MA Experiment ID: 108597 Result: Down-regulated in Transcription
  misc_feature: MA Experiment 108597 PARAMETER Experiment Name: Zm_100uM_ABA_P Parameter: Age (day) Value: 9
  misc_feature: MA Experiment 108597 PARAMETER Experiment Name: Zm_100uM_ABA_P Parameter: Organism Value: Zea mays
  misc_feature: MA Experiment 108597 PARAMETER Experiment Name: Zm_100uM_ABA_P Parameter: Plant Line Value: 35A19
  misc_feature: MA Experiment 108597 PARAMETER Experiment Name: Zm_100uM_ABA_P Parameter: Timepoint (hr) Value: 24
  misc_feature: MA Experiment 108597 PARAMETER Experiment Name: Zm_100uM_ABA_P Parameter: Tissue Value: Aerial
  misc_feature: MA Experiment 108597 PARAMETER Experiment Name: Zm_100uM_ABA_P Parameter: Treatment Value: 100uM ABA vs. No Treatment
  misc_feature: MA Experiment ID: 108689 Result: Down-regulated in Transcription
  misc_feature: MA Experiment 108689 PARAMETER Experiment Name: Zm_Drought_Roots_P Parameter: Age (day) Value: 9
  misc_feature: MA Experiment 108689 PARAMETER Experiment Name: Zm_Drought_Roots_P Parameter: Organism Value: Zea mays
  misc_feature: MA Experiment 108689 PARAMETER Experiment Name: Zm_Drought_Roots_P Parameter: Plant Line Value: 35A19
  misc_feature: MA Experiment 108689 PARAMETER Experiment Name: Zm_Drought_Roots_P Parameter: Timepoint (hr) Value: 24
  misc_feature: MA Experiment 108689 PARAMETER Experiment Name: Zm_Drought_Roots_P Parameter: Tissue Value: Roots
  misc_feature: MA Experiment 108689 PARAMETER Experiment Name: Zm_Drought_Roots_P Parameter: Treatment Value: Drought vs. No Drought
  misc_feature: MA Experiment ID: 20000477 Result: Down-regulated in Transcription
  misc_feature: MA Experiment 20000477 PARAMETER Experiment Name: Zm_5mM_SA_P Parameter: Age (day) Value: 10
  misc_feature: MA Experiment 20000477 PARAMETER Experiment Name: Zm_5mM_SA_P Parameter: Organism Value: Zea mays
  misc_feature: MA Experiment 20000477 PARAMETER Experiment Name: Zm_5mM_SA_P Parameter: Plant Line Value: 35A19
  misc_feature: MA Experiment 20000477 PARAMETER Experiment Name: Zm_5mM_SA_P Parameter: Timepoint (hr) Value: 48
  misc_feature: MA Experiment 20000477 PARAMETER Experiment Name: Zm_5mM_SA_P Parameter: Tissue Value: Aerial
  misc_feature: MA Experiment 20000477 PARAMETER Experiment Name: Zm_5mM_SA_P Parameter: Treatment Value: 5mM SA vs. No Treatment
  misc_feature: MA Experiment ID: 20000478 Result: Down-regulated in Transcription
  misc_feature: MA Experiment 20000478 PARAMETER Experiment Name: Zm_5mM_SA_P Parameter: Age (day) Value: 11
  misc_feature: MA Experiment 20000478 PARAMETER Experiment Name: Zm_5mM_SA_P Parameter: Organism Value: Zea mays
  misc_feature: MA Experiment 20000478 PARAMETER Experiment Name: Zm_5mM_SA_P Parameter: Plant Line Value: 35A19
  misc_feature: MA Experiment 20000478 PARAMETER Experiment Name: Zm_5mM_SA_P Parameter: Timepoint (hr) Value: 72
  misc_feature: MA Experiment 20000478 PARAMETER Experiment Name: Zm_5mM_SA_P Parameter: Tissue Value: Aerial
  misc_feature: MA Experiment 20000478 PARAMETER Experiment Name: Zm_5mM_SA_P Parameter: Treatment Value: 5mM SA vs. No Treatment
  misc_feature: MA Experiment ID: 20000479 Result: Down-regulated in Transcription
  misc_feature: MA Experiment 20000479 PARAMETER Experiment Name: Zm_Drought_P Parameter: Age (day) Value: 10
  misc_feature: MA Experiment 20000479 PARAMETER Experiment Name: Zm_Drought_P Parameter: Organism Value: Zea mays
  misc_feature: MA Experiment 20000479 PARAMETER Experiment Name: Zm_Drought_P Parameter: Plant Line Value: 35A19
  misc_feature: MA Experiment 20000479 PARAMETER Experiment Name: Zm_Drought_P Parameter: Timepoint (hr) Value: 48
  misc_feature: MA Experiment 20000479 PARAMETER Experiment Name: Zm_Drought_P Parameter: Tissue Value: Aerial
  misc_feature: MA Experiment 20000479 PARAMETER Experiment Name: Zm_Drought_P Parameter: Treatment Value: Drought vs. No Drought
  misc_feature: MA Experiment ID: 20000480 Result: Down-regulated in Transcription
  misc_feature: MA Experiment 20000480 PARAMETER Experiment Name: Zm_Drought_P Parameter: Age (day) Value: 11
  misc_feature: MA Experiment 20000480 PARAMETER Experiment Name: Zm_Drought_P Parameter: Organism Value: Zea mays
  misc_feature: MA Experiment 20000480 PARAMETER Experiment Name: Zm_Drought_P Parameter: Plant Line Value: 35A19
  misc_feature: MA Experiment 20000480 PARAMETER Experiment Name: Zm_Drought_P Parameter: Timepoint (hr) Value: 72
  misc_feature: MA Experiment 20000480 PARAMETER Experiment Name: Zm_Drought_P Parameter: Tissue Value: Aerial
  misc_feature: MA Experiment 20000480 PARAMETER Experiment Name: Zm_Drought_P Parameter: Treatment Value: Drought vs. No Drought
agccagctactccatctcccacccaacctccttggcaactggcattgccacccccacagtagagacagacagccacgcgcgcgaggcgctccactcaagctcaggccactctacctcgctctcggccatggcgtcaggggaagcagagccgctgcagtacacgaccaccgcgctgcgggtgtccatccactgcgagggctgcaggaagaaggtcaagaaggtgctccacagcatcgaaggcgtgtacaaggtgacggtggacgcggcgcagcacaaggtgaccgtcacaggcagcgtggaagcggccgcgctcgtccggcggctgcacaaggccggcaagcaggcggcgccgtggccttcgccggcgccggcaaacgtcgaggccaacaaggccgcgcctgctgcacccggggagggcggcgccaaggaggccgcggacacgaaggcggctgaggccgacgccaaggagaagaaaccggccaaggacaagggctcgggcaagaatgccggaacgggcgaggccgccgacgcgaaacccggcaaggacgtggccagcagcgacgccgccgaggtgatcgcggggcccaaggaggcggaaaaggcctcctcccctgagcctgtggccgcgaagccagacgccgccgaggagcccaaggacggcggcgagggcggcaggaagaagggcaagaagagtaagaagaacaagcccaaggacggcggcgagggggatgtcccggccccggccgcaaccccggcggcacctcccgagaagaaggcgccgcagcagccctcggctgtgccagcgccggcgcctggtcccgagcgcccgcacggcggcggcggcgcgttcccgtgctacgctgcgcagccggtgcttagctacaacgtggcgcacccgagctccagcgtgtcgtactgcgcgcccacggcagccgtgcccatgcccccgccgccgccgcagatggtgtcgtactggtacccgccatacccggccatggtgccggtgccggcggagtttgtgtacggcccgccgggcggcgtgcggtcgttcccgccgcacgagtcgtacaacaacatgttcaacgaggacaacgccaactcgtgcagcctcatgtgatgtcacgacgcgccggcgtggtgtccccgggccgtctacggtggctctcgtgaaccacaagcctccccgatggtgtctcgtgccgtcaaattaggcggacagcgctccagattttaattttttttactgtaccctcggctataaattgctcctcggcgcatcgtgtaatcagatggtggtggtattcttccacttgcaagctg

SEQ ID NO: 110405 - protein, 371 aa, Zea mays subsp. mays
  misc_feature (1)..(371): Ceres Seq. ID no. 15179111
  misc_feature (113)..(276): Pfam Name: Brain acid soluble protein 1 (BASP1 protein) Pfam Description: Brain acid soluble protein 1 (BASP1 protein)
  misc_feature (49)..(183): Homolog of NCBI NO: 18397481 NR Description: heavy-metal-associated domain-containing protein
  misc_feature (58)..(210): Homolog of NCBI NO: 38344257 NR Description: OSJNBa0008M17.10 [Oryza sativa (japonica
  misc_feature (51)..(249): Homolog of NCBI NO: 15219992 NR Description: heavy-metal-associated domain-containing protein
  misc_feature (49)..(371): Homolog of NCBI NO: 15241025 NR Description: heavy-metal-associated domain-containing protein
  misc_feature (50)..(371): Homolog of NCBI NO: 21536659 NR Description: unknown [Arabidopsis thaliana]
  misc_feature (50)..(371): Homolog of NCBI NO: 18405728 NR Description: copper chaperone (CCH)-related [Arabidopsis
  misc_feature (50)..(371): Homolog of NCBI NO: 27754505 NR Description: putative copper chaperone (CCH) protein
  misc_feature (43)..(328): Homolog of NCBI NO: 33146848 NR Description: copper chaperone (CCH)-related protein-like
  misc_feature (43)..(357): Homolog of NCBI NO: 12083536 NR Description: hypothetical protein [Oryza sativa]
  misc_feature (115)..(371): Homolog of NCBI NO: 33146848 NR Description: copper chaperone (CCH)-related protein-like
ASYSISHPTSLATGIATPTVETDSHAREALHSSSGHSTSLSAMASGEAEPLQYTTTALRVSIHCEGCRKKVKKVLHSIEGVYKVTVDAAQHKVTVTGSVEAAALVRRLHKAGKQAAPWPSPAPANVEANKAAPAAPGEGGAKEAADTKAAEADAKEKKPAKDKGSGKNAGTGEAADAKPGKDVASSDAAEVIAGPKEAEKASSPEPVAAKPDAAEEPKDGGEGGRKKGKKSKKNKPKDGGEGDVPAPAATPAAPPEKKAPQQPSAVPAPAPGPERPHGGGGAFPCYAAQPVLSYNVAHPSSSVSYCAPTAAVPMPPPPPQMVSYWYPPYPAMVPVPAEFVYGPPGGVRSFPPHESYNNMFNEDNANSCSLM

SEQ ID NO: 110406 - protein, 329 aa, Zea mays subsp. mays
  misc_feature (1)..(329): Ceres Seq. ID no. 15179112
  misc_feature (71)..(234): Pfam Name: Brain acid soluble protein 1 (BASP1 protein) Pfam Description: Brain acid soluble protein 1 (BASP1 protein)
  misc_feature (7)..(141): Homolog of NCBI NO: 18397481 NR Description: heavy-metal-associated domain-containing protein
  misc_feature (16)..(168): Homolog of NCBI NO: 38344257 NR Description: OSJNBa0008M17.10 [Oryza sativa (japonica
  misc_feature (9)..(207): Homolog of NCBI NO: 15219992 NR Description: heavy-metal-associated domain-containing protein
  misc_feature (7)..(329): Homolog of NCBI NO: 15241025 NR Description: heavy-metal-associated domain-containing protein
  misc_feature (8)..(329): Homolog of NCBI NO: 21536659 NR Description: unknown [Arabidopsis thaliana]
  misc_feature (8)..(329): Homolog of NCBI NO: 18405728 NR Description: copper chaperone (CCH)-related [Arabidopsis
  misc_feature (8)..(329): Homolog of NCBI NO: 27754505 NR Description: putative copper chaperone (CCH) protein
  misc_feature (1)..(286): Homolog of NCBI NO: 33146848 NR Description: copper chaperone (CCH)-related protein-like
  misc_feature (1)..(315): Homolog of NCBI NO: 12083536 NR Description: hypothetical protein [Oryza sativa]
  misc_feature (73)..(329): Homolog of NCBI NO: 33146848 NR Description: copper chaperone (CCH)-related protein-like
MASGEAEPLQYTTTALRVSIHCEGCRKKVKKVLHSIEGVYKVTVDAAQHKVTVTGSVEAAALVRRLHKAGKQAAPWPSPAPANVEANKAAPAAPGEGGAKEAADTKAAEADAKEKKPAKDKGSGKNAGTGEAADAKPGKDVASSDAAEVIAGPKEAEKASSPEPVAAKPDAAEEPKDGGEGGRKKGKKSKKNKPKDGGEGDVPAPAATPAAPPEKKAPQQPSAVPAPAPGPERPHGGGGAFPCYAAQPVLSYNVAHPSSSVSYCAPTAAVPMPPPPPQMVSYWYPPYPAMVPVPAEFVYGPPGGVRSFPPHESYNNMFNEDNANSCSLM

SEQ ID NO: 110407 - DNA, 634 bp, Zea mays subsp. mays
  misc_feature (1)..(634): Ceres Seq. ID no. 14305547
gaaaaacacacccagattctttcgattctttcacggttccacctctcccctccctctcgtgctcgatccatcgccgctgcctaatccccatggcctcagcgaacaacgacaaccgcgaggcggcgggcatcctgcggctgctgatggggatggcggcggcggcgcccgcctcggcattgcctcgggggggcggcggcggcggcggcggcggcctgatggtggtgcagcacgtcatcctcgacgtcgacggggaattgttctcgggcggggtcggcggcggcggcgtgccgccggcgtcgaaggccgcgatcgccgcgctgaaggaggtgaaggccggggagggcgagggcgagggcgaggacgcgctgggcgagtgcgccatctgcctggacgcggtggagggcaccggcaaggagatgccgtgcgggcaccgcttccacgggcgctgcctggagcggtggctcggcgtgcacggcaactgccccgtctgccgccgcgagctgccagcgccggccaaggaggaggaggaggacagcgcggcgtcggcggagggcggcgaggaggagagggtttaactgtttttgagatcaaatttgacaagctctagaatgaacatatctattttgtttgcgac

SEQ ID NO: 110408 - protein, 201 aa, Zea mays subsp. mays
  misc_feature (1)..(201): Ceres Seq. ID no. 14305548
  misc_feature (122)..(188): Pfam Name: TT viral ORF2 Pfam Description: TT viral ORF2
  misc_feature (40)..(189): Homolog of NCBI NO: 93144 NR Description: hypothetical protein - suid herpesvirus 1 (strain
  misc_feature (42)..(190): Homolog of NCBI NO: 465445 NR Description: PROBABLE NUCLEAR ANTIGEN
  misc_feature (40)..(189): Homolog of NCBI NO: 465445 NR Description: PROBABLE NUCLEAR ANTIGEN
  misc_feature (31)..(190): Homolog of NCBI NO: 27378597 NR Description: blr3486 [Bradyrhizobium japonicum]
  misc_feature (40)..(190): Homolog of NCBI NO: 22093662 NR Description: putative zwille protein [Oryza sativa (japonica
  misc_feature (39)..(190): Homolog of NCBI NO: 22960369 NR Description: hypothetical protein [Rhodobacter sphaeroides]
  misc_feature (40)..(193): Homolog of NCBI NO: 9453859 NR Description: EBNA-1 [Cynomolgus Epstein-Barr Virus Si-IIA]
  misc_feature (42)..(190): Homolog of NCBI NO: 93144 NR Description: hypothetical protein - suid herpesvirus 1 (strain
  misc_feature (39)..(190): Homolog of NCBI NO: 465445 NR Description: PROBABLE NUCLEAR ANTIGEN
  misc_feature (25)..(190): Homolog of NCBI NO: 93144 NR Description: hypothetical protein - suid herpesvirus 1 (strain
KNTPRFFRFFHGSTSPLPLVLDPSPLPNPHGLSEQRQPRGGGHPAAADGDGGGGARLGIASGGRRRRRRRPDGGAARHPRRRRGIVLGRGRRRRRAAGVEGRDRRAEGGEGRGGRGRGRGRAGRVRHLPGRGGGHRQGDAVRAPLPRALPGAVARRARQLPRLPPRAASAGQGGGGGQRGVGGGRRGGEGLTVFEIKFDKL

SEQ ID NO: 110409 - protein, 190 aa, Zea mays subsp. mays
  misc_feature (1)..(190): Ceres Seq. ID no. 14305549
  misc_feature (125)..(163): Pfam Name: Zinc finger, C3HC4 type (RING finger) Pfam Description: Zinc finger, C3HC4 type (RING finger)
  misc_feature (84)..(180): Homolog of NCBI NO: 15232595 NR Description: expressed protein [Arabidopsis thaliana]
  misc_feature (51)..(185): Homolog of NCBI NO: 34903272 NR Description: unnamed protein product [Oryza sativa (japonica
  misc_feature (94)..(173): Homolog of NCBI NO: 21554312 NR Description: unknown [Arabidopsis thaliana]
  misc_feature (94)..(173): Homolog of NCBI NO: 18396059 NR Description: zinc finger (C3HC4-type RING finger) protein
  misc_feature (88)..(177): Homolog of NCBI NO: 15238295 NR Description: COP1-interacting protein CIP8 [Arabidopsis
  misc_feature (30)..(181): Homolog of NCBI NO: 40882686 NR Description: hypothetical protein [Oryza sativa (japonica
  misc_feature (75)..(184): Homolog of NCBI NO: 18071392 NR Description: putative zinc finger protein [Oryza sativa]
  misc_feature (91)..(190): Homolog of NCBI NO: 18071374 NR Description: putative zinc finger protein [Oryza sativa]
  misc_feature (27)..(182): Homolog of NCBI NO: 18921323 NR Description: putative zinc finger protein [Oryza sativa]
  misc_feature (30)..(189): Homolog of NCBI NO: 34913258 NR Description: P0519E12.4 [Oryza sativa (japonica
KTHPDSFDSFTVPPLPSLSCSIHRRCLIPMASANNDNREAAGILRLLMGMAAAAPASALPRGGGGGGGGGLMVVQHVILDVDGELFSGGVGGGGVPPASKAAIAALKEVKAGEGEGEGEDALGECAICLDAVEGTGKEMPCGHRFHGRCLERWLGVHGNCPVCRRELPAPAKEEEEDSAASAEGGEEERV

SEQ ID NO: 110410 - protein, 161 aa, Zea mays subsp. mays
  misc_feature (1)..(161): Ceres Seq. ID no. 14305550
  misc_feature (96)..(134): Pfam Name: Zinc finger, C3HC4 type (RING finger) Pfam Description: Zinc finger, C3HC4 type (RING finger)
  misc_feature (55)..(151): Homolog of NCBI NO: 15232595 NR Description: expressed protein [Arabidopsis thaliana]
  misc_feature (22)..(156): Homolog of NCBI NO: 34903272 NR Description: unnamed protein product [Oryza sativa (japonica
  misc_feature (65)..(144): Homolog of NCBI NO: 21554312 NR Description: unknown [Arabidopsis thaliana]
  misc_feature (65)..(144): Homolog of NCBI NO: 18396059 NR Description: zinc finger (C3HC4-type RING finger) protein
  misc_feature (59)..(148): Homolog of NCBI NO: 15238295 NR Description: COP1-interacting protein CIP8 [Arabidopsis
  misc_feature (1)..(152): Homolog of NCBI NO: 40882686 NR Description: hypothetical protein [Oryza sativa (japonica
  misc_feature (46)..(155): Homolog of NCBI NO: 18071392 NR Description: putative zinc finger protein [Oryza sativa]
  misc_feature (62)..(161): Homolog of NCBI NO: 18071374 NR Description: putative zinc finger protein [Oryza sativa]
  misc_feature (1)..(153): Homolog of NCBI NO: 18921323 NR Description: putative zinc finger protein [Oryza sativa]
  misc_feature (1)..(160): Homolog of NCBI NO: 34913258 NR Description: P0519E12.4 [Oryza sativa (japonica
MASANNDNREAAGILRLLMGMAAAAPASALPRGGGGGGGGGLMVVQHVILDVDGELFSGGVGGGGVPPASKAAIAALKEVKAGEGEGEGEDALGECAICLDAVEGTGKEMPCGHRFHGRCLERWLGVHGNCPVCRRELPAPAKEEEEDSAASAEGGEEERV

SEQ ID NO: 110411 - DNA, 1704 bp, Zea mays subsp. mays
  misc_feature (1)..(1704): Ceres Seq. ID no. 15179117
aaaaaaaaacgtaagcagacttggccatagtccactgtccaccgcagctccgtcgaccgtcgtacagacgctgccggcgacgcgcgaagaagaggccgcgaagatggccgactcgccaacgatcgatgccgtctttcacaacgcggtcatcgtcaccatggatgatgcgttccgcgtcctccaggacggcgcggtcgccgtcgccggcgaccgcatcgccgctgtgggcccctccgctgatgtcctcgccgccttcccctgcgccgtgcagaccctcgacctgggtggccgcattgtccttccagagctcgtaaacacacacgtgcacacatcgcagcagctggcgcgagggatcgccgacgacgttgatctgatgacgtggctgcacgggaggatctggccctatgagtcacacatgacggaggaagactcctatgcctccaccctcctctgcggcattgaactcatccggtctggggtgacatgctttgcagaagcaggtgggcagtttgtttcagaaatggcacgtgcagtggagttattaggctttagagcgtgtttgacaaagtcaacaatggattgtggtgatggtttgcctccaaattggagttgctgctccactgatgattgcattcagtcacagaaggaactatatgaaaagcatcataatacagctgatgggcgtatcaggatatggtttgggttgagacagataatgaatgcaaccgatcgtttactgcttgaaacaagagatattgcccagaagctaaatactggaatccatatgcatattgcagaaataccatatgaaaatcaacttatacttcggaccaaaggaattgatcatggcacagtgacatatttagagaaaattgatttcctgaggagtaatttactggctgcccattctgtttggttgaatgtacctgagataggctttttttcaaaggctggtgttaaggtttctcactgtcctgcatctgccatgcgtatgttggggtttgctcctattagagaaatgctggattctggtgtttgtgtctctcttggtacagatggagcaccaagcaataatagaatgagcattgtggatgagatgtacttagcgtccctaattaacaaaggtcgtgaggcatatatcagtggaacaacaaacccaactgctcttcctgctgagacggtgctgaagatggctactattaatggtgcaaaagcagttctgtgggacaatgaaataggttcgctggaggttggcaaaaaggcggacttggtggtggtgaatccatttacatggtccatggtccccttacatgacagcattgccaacattgtctactgcatgcggacagagaatattgagtctgttatgtgcaatggtcggtggatcatgaaggatcataaaatcatgaatctcaatgaggaggaggtaatttcttcagctgtgaaaagagcgaacgacctccttgcacgagcaggcataaatctccccagacggatgaactacgtatagttattctcttgctattttgtcatgtatttgccagtttccaccatgccgcgctaatcctagtgctgcaagcttgcatgttggcccggagacatgtttgcaggatcgtagtcatcgcttgcagtttctaccagtgttgaatagaaaataatgtgcagttgtacatgtggcttcagtaataaaagcaccatggaagc

SEQ ID NO: 110412 - protein, 502 aa, Zea mays subsp. mays
  misc_feature (1)..(502): Ceres Seq. ID no. 15179118
  misc_feature (99)..(427): Pfam Name: Amidohydrolase family Pfam Description: Amidohydrolase family
  misc_feature (50)..(480): Homolog of NCBI NO: 23061120 NR Description: hypothetical protein [Pseudomonas fluorescens
  misc_feature (50)..(490): Homolog of NCBI NO: 34496487 NR Description: probable atrazine chlorohydrolase
  misc_feature (41)..(488): Homolog of NCBI NO: 29653861 NR Description: chlorohydrolase family protein [Coxiella burnetii
  misc_feature (97)..(488): Homolog of NCBI NO: 20808022 NR Description: Cytosine deaminase and related metal-dependent
  misc_feature (42)..(406): Homolog of NCBI NO: 23051073 NR Description: hypothetical protein [Methanosarcina barkeri]
  misc_feature (42)..(406): Homolog of NCBI NO: 21228381 NR Description: Chlorohydrolase family protein [Methanosarcina
  misc_feature (90)..(490): Homolog of NCBI NO: 15613309 NR Description: N-ethylammeline chlorohydrolase [Bacillus
  misc_feature (44)..(498): Homolog of NCBI NO: 19113705 NR Description: putative chlorohydrolase/deaminase
  misc_feature (44)..(493): Homolog of NCBI NO: 40743771 NR Description: hypothetical protein AN3194.2 [Aspergillus
  misc_feature (44)..(502): Homolog of NCBI NO: 23474809 NR Description: hypothetical protein [Desulfovibrio desulfuricans
KKNVSRLGHSPLSTAAPSTVVQTLPATREEEAAKMADSPTIDAVFHNAVIVTMDDAFRVLQDGAVAVAGDRIAAVGPSADVLAAFPCAVQTLDLGGRIVLPELVNTHVHTSQQLARGIADDVDLMTWLHGRIWPYESHMTEEDSYASTLLCGIELIRSGVTCFAEAGGQFVSEMARAVELLGFRACLTKSTMDCGDGLPPNWSCCSTDDCIQSQKELYEKHHNTADGRIRIWFGLRQIMNATDRLLLETRDIAQKLNTGIHMHIAEIPYENQLILRTKGIDHGTVTYLEKIDFLRSNLLAAHSVWLNVPEIGFFSKAGVKVSHCPASAMRMLGFAPIREMLDSGVCVSLGTDGAPSNNRMSIVDEMYLASLINKGREAYISGTTNPTALPAETVLKMATINGAKAVLWDNEIGSLEVGKKADLVVVNPFTWSMVPLHDSIANIVYCMRTENIESVMCNGRWIMKDHKIMNLNEEEVISSAVKRANDLLARAGINLPRRMNYV

SEQ ID NO: 110413 - protein, 468 aa, Zea mays subsp. mays
  misc_feature (1)..(468): Ceres Seq. ID no. 15179119
  misc_feature (65)..(393): Pfam Name: Amidohydrolase family Pfam Description: Amidohydrolase family
  misc_feature (56)..(456): Homolog of NCBI NO: 15613309 NR Description: N-ethylammeline chlorohydrolase [Bacillus
  misc_feature (10)..(464): Homolog of NCBI NO: 19113705 NR Description: putative chlorohydrolase/deaminase
  misc_feature (16)..(446): Homolog of NCBI NO: 23061120 NR Description: hypothetical protein [Pseudomonas fluorescens
  misc_feature (7)..(454): Homolog of NCBI NO: 29653861 NR Description: chlorohydrolase family protein [Coxiella burnetii
  misc_feature (8)..(372): Homolog of NCBI NO: 23051073 NR Description: hypothetical protein [Methanosarcina barkeri]
  misc_feature (8)..(372): Homolog of NCBI NO: 21228381 NR Description: Chlorohydrolase family protein [Methanosarcina
  misc_feature (63)..(454): Homolog of NCBI NO: 20808022 NR Description: Cytosine deaminase and related metal-dependent
  misc_feature (16)..(456): Homolog of NCBI NO: 34496487 NR Description: probable atrazine chlorohydrolase
  misc_feature (10)..(459): Homolog of NCBI NO: 40743771 NR Description: hypothetical protein AN3194.2 [Aspergillus
  misc_feature (10)..(468): Homolog of NCBI NO: 23474809 NR Description: hypothetical protein [Desulfovibrio desulfuricans
MADSPTIDAVFHNAVIVTMDDAFRVLQDGAVAVAGDRIAAVGPSADVLAAFPCAVQTLDLGGRIVLPELVNTHVHTSQQLARGIADDVDLMTWLHGRIWPYESHMTEEDSYASTLLCGIELIRSGVTCFAEAGGQFVSEMARAVELLGFRACLTKSTMDCGDGLPPNWSCCSTDDCIQSQKELYEKHHNTADGRIRIWFGLRQIMNATDRLLLETRDIAQKLNTGIHMHIAEIPYENQLILRTKGIDHGTVTYLEKIDFLRSNLLAAHSVWLNVPEIGFFSKAGVKVSHCPASAMRMLGFAPIREMLDSGVCVSLGTDGAPSNNRMSIVDEMYLASLINKGREAYISGTTNPTALPAETVLKMATINGAKAVLWDNEIGSLEVGKKADLVVVNPFTWSMVPLHDSIANIVYCMRTENIESVMCNGRWIMKDHKIMNLNEEEVISSAVKRANDLLARAGINLPRRMNYV

SEQ ID NO: 110414 - protein, 450 aa, Zea mays subsp. mays
  misc_feature (1)..(450): Ceres Seq. ID no. 15179120
  misc_feature (47)..(375): Pfam Name: Amidohydrolase family Pfam Description: Amidohydrolase family
  misc_feature (1)..(428): Homolog of NCBI NO: 23061120 NR Description: hypothetical protein [Pseudomonas fluorescens
  misc_feature (1)..(438): Homolog of NCBI NO: 34496487 NR Description: probable atrazine chlorohydrolase
  misc_feature (1)..(436): Homolog of NCBI NO: 29653861 NR Description: chlorohydrolase family protein [Coxiella burnetii
  misc_feature (45)..(436): Homolog of NCBI NO: 20808022 NR Description: Cytosine deaminase and related metal-dependent
  misc_feature (1)..(354): Homolog of NCBI NO: 23051073 NR Description: hypothetical protein [Methanosarcina barkeri]
  misc_feature (1)..(354): Homolog of NCBI NO: 21228381 NR Description: Chlorohydrolase family protein [Methanosarcina
  misc_feature (38)..(438): Homolog of NCBI NO: 15613309 NR Description: N-ethylammeline chlorohydrolase [Bacillus
  misc_feature (1)..(446): Homolog of NCBI NO: 19113705 NR Description: putative chlorohydrolase/deaminase
  misc_feature (1)..(441): Homolog of NCBI NO: 40743771 NR Description: hypothetical protein AN3194.2 [Aspergillus
  misc_feature (1)..(450): Homolog of NCBI NO: 23474809 NR Description: hypothetical protein [Desulfovibrio desulfuricans
MDDAFRVLQDGAVAVAGDRIAAVGPSADVLAAFPCAVQTLDLGGRIVLPELVNTHVHTSQQLARGIADDVDLMTWLHGRIWPYESHMTEEDSYASTLLCGIELIRSGVTCFAEAGGQFVSEMARAVELLGFRACLTKSTMDCGDGLPPNWSCCSTDDCIQSQKELYEKHHNTADGRIRIWFGLRQIMNATDRLLLETRDIAQKLNTGIHMHIAEIPYENQLILRTKGIDHGTVTYLEKIDFLRSNLLAAHSVWLNVPEIGFFSKAGVKVSHCPASAMRMLGFAPIREMLDSGVCVSLGTDGAPSNNRMSIVDEMYLASLINKGREAYISGTTNPTALPAETVLKMATINGAKAVLWDNEIGSLEVGKKADLVVVNPFTWSMVPLHDSIANIVYCMRTENIESVMCNGRWIMKDHKIMNLNEEEVISSAVKRANDLLARAGINLPRRMNYV

SEQ ID NO: 110415 - DNA, 1180 bp, Zea mays subsp. mays
  misc_feature (1)..(1180): Ceres Seq. ID no. 12407937
  misc_feature: MA Experiment ID: 108528 Result: Up-regulated in Transcription
  misc_feature: MA Experiment 108528 PARAMETER Experiment Name: Zm_Imbibed_Seeds_P Parameter: Age (day) Value: 5 vs. 2
  misc_feature: MA Experiment 108528 PARAMETER Experiment Name: Zm_Imbibed_Seeds_P Parameter: Organism Value: Zea mays
  misc_feature: MA Experiment 108528 PARAMETER Experiment Name: Zm_Imbibed_Seeds_P Parameter: Plant Line Value: 35A19
  misc_feature: MA Experiment 108528 PARAMETER Experiment Name: Zm_Imbibed_Seeds_P Parameter: Tissue Value: Aerial vs. Embryo
  misc_feature: MA Experiment ID: 108545 Result: Up-regulated in Transcription
  misc_feature: MA Experiment 108545 PARAMETER Experiment Name: Zm_Imbibed_Seeds_P Parameter: Age (day) Value: 3 vs. 2
  misc_feature: MA Experiment 108545 PARAMETER Experiment Name: Zm_Imbibed_Seeds_P Parameter: Organism Value: Zea mays
  misc_feature: MA Experiment 108545 PARAMETER Experiment Name: Zm_Imbibed_Seeds_P Parameter: Plant Line Value: 35A19
  misc_feature: MA Experiment 108545 PARAMETER Experiment Name: Zm_Imbibed_Seeds_P Parameter: Tissue Value: Aerial vs. Embryo
  misc_feature: MA Experiment ID: 108547 Result: Up-regulated in Transcription
  misc_feature: MA Experiment 108547 PARAMETER Experiment Name: Zm_Imbibed_Seeds_P Parameter: Age (day) Value: 4 vs. 2
  misc_feature: MA Experiment 108547 PARAMETER Experiment Name: Zm_Imbibed_Seeds_P Parameter: Organism Value: Zea mays
  misc_feature: MA Experiment 108547 PARAMETER Experiment Name: Zm_Imbibed_Seeds_P Parameter: Plant Line Value: 35A19
  misc_feature: MA Experiment 108547 PARAMETER Experiment Name: Zm_Imbibed_Seeds_P Parameter: Tissue Value: Aerial vs. Embryo
attatccgcactccgaccggtgccacctccaagctgagcccgctcctagactcccagtcccctccgcagtccgcaccgccgcctcgccatggaggcagctgccgccgccttcttgtcccctccccgcgtcgccctcgacgtccgcacactcttctccccgccccgttgcctccccgtctcgccctcatcccagctccgcctcgctgcccgcccccgcgcgctcgccggcgccaagccgcgggttcctgagcccccatcgagaacccgccgtcgacggcggtcgcggcgccagggatgtcgtcgcgatggtggtgccgttcctgaggggggccgcgtgggagcagccaccgccggacttggcctcgttcctgtacaagaaccggatcgtgtacttggggatgtgcctcgttccgtcggtcacggagctcatgctcgccgagtttctctacctccagtatgacgacgccgagaagccaatctacatgtacatcaattccactggcaccaccaagaatggcgagaagttaggctatgagacagaagctcttgcagtatatgatgctatgaggtatgttaaagttcctattttcactctgtgtgtcggtaatgcatggggagaagctgctttactcttagctgctggcgctaaaggtaaccgtgccgcacttccatcatcgacaataatgataaaacagccaattggtcgctttcaaggtcaggcaacagacgttgacattgcaagaaaagagattcgaaatgtcaagatagaaatggttaagctgctggcaagacacattggtaaaccaatggaagagattgctcgggacatcaggcgtcctaaatactttagccccagtgaagctgtggattatggcatcatcgacaaggtgatatacaacgagaaaatccaggaagatggcggtgttgtgtcagaactcaaaagatcaaatttgatatagcgttctttttccacaagtagacacgtctttgtatgtttagtggtcattcacgtgtgtttgagtattgagtagttaccactcgatcactcagtacctggttgtagaggcgtagagcacatagccaatgcattgaacaagcatttccttcccccctctgccgtttcaacgctgtattgcccttacccaacgggcgtgctgaaagatgaattttggtaggttgt

SEQ ID NO: 110416 - protein, 318 aa, Zea mays subsp. mays
  misc_feature (1)..(318): Ceres Seq. ID no. 12407938
  misc_feature (108)..(300): Pfam Name: Clp protease Pfam Description: Clp protease
  misc_feature (99)..(301): Homolog of NCBI NO: 18203214 NR Description: Putative ATP-dependent Clp protease proteolytic
  misc_feature (99)..(302): Homolog of NCBI NO: 23126723 NR Description: hypothetical protein [Nostoc punctiforme]
  misc_feature (99)..(302): Homolog of NCBI NO: 17231850 NR Description: ATP-dependent Clp protease proteolytic subunit
  misc_feature (99)..(302): Homolog of NCBI NO: 22299302 NR Description: ATP-dependent Clp protease proteolytic subunit 3
  misc_feature (115)..(306): Homolog of NCBI NO: 13812146 NR Description: ATP-dependent Clp protease proteolytic subunit
  misc_feature (284)..(318): Homolog of NCBI NO: 7488077 NR Description: probable Clp proteinase - Arabidopsis thaliana
  misc_feature (97)..(238): Homolog of NCBI NO: 7488077 NR Description: probable Clp proteinase - Arabidopsis thaliana
  misc_feature (50)..(233): Homolog of NCBI NO: 34903202 NR Description: unnamed protein product [Oryza sativa (japonica
  misc_feature (97)..(318): Homolog of NCBI NO: 19698857 NR Description: unknown protein [Arabidopsis thaliana]
  misc_feature (97)..(318): Homolog of NCBI NO: 18414804 NR Description: ATP-dependent Clp protease proteolytic subunit
YPHSDRCHLQAEPAPRLPVPSAVRTAASPWRQLPPPSCPLPASPSTSAHSSPRPVASPSRPHPSSASLPAPARSPAPSRGFLSPHREPAVDGGRGARDVVAMVVPFLRGAAWEQPPPDLASFLYKNRIVYLGMCLVPSVTELMLAEFLYLQYDDAEKPIYMYINSTGTTKNGEKLGYETEALAVYDAMRYVKVPIFTLCVGNAWGEAALLLAAGAKGNRAALPSSTIMIKQPIGRFQGQATDVDIARKEIRNVKIEMVKLLARHIGKPMEEIARDIRRPKYFSPSEAVDYGIIDKVIYNEKIQEDGGVVSELKRSNLI

SEQ ID NO: 110417 - protein, 217 aa, Zea mays subsp. mays
  misc_feature (1)..(217): Ceres Seq. ID no. 12407939
  misc_feature (7)..(199): Pfam Name: Clp protease Pfam Description: Clp protease
  misc_feature (1)..(200): Homolog of NCBI NO: 18203214 NR Description: Putative ATP-dependent Clp protease proteolytic
  misc_feature (1)..(201): Homolog of NCBI NO: 23126723 NR Description: hypothetical protein [Nostoc punctiforme]
  misc_feature (1)..(201): Homolog of NCBI NO: 17231850 NR Description: ATP-dependent Clp protease proteolytic subunit
  misc_feature (1)..(201): Homolog of NCBI NO: 22299302 NR Description: ATP-dependent Clp protease proteolytic subunit 3
  misc_feature (14)..(205): Homolog of NCBI NO: 13812146 NR Description: ATP-dependent Clp protease proteolytic subunit
  misc_feature (183)..(217): Homolog of NCBI NO: 7488077 NR Description: probable Clp proteinase - Arabidopsis thaliana
  misc_feature (1)..(137): Homolog of NCBI NO: 7488077 NR Description: probable Clp proteinase - Arabidopsis thaliana
  misc_feature (1)..(132): Homolog of NCBI NO: 34903202 NR Description: unnamed protein product [Oryza sativa (japonica
  misc_feature (1)..(217): Homolog of NCBI NO: 19698857 NR Description: unknown protein [Arabidopsis thaliana]
  misc_feature (1)..(217): Homolog of NCBI NO: 18414804 NR Description: ATP-dependent Clp protease proteolytic subunit
MVVPFLRGAAWEQPPPDLASFLYKNRIVYLGMCLVPSVTELMLAEFLYLQYDDAEKPIYMYINSTGTTKNGEKLGYETEALAVYDAMRYVKVPIFTLCVGNAWGEAALLLAAGAKGNRAALPSSTIMIKQPIGRFQGQATDVDIARKEIRNVKIEMVKLLARHIGKPMEEIARDIRRPKYFSPSEAVDYGIIDKVIYNEKIQEDGGVVSELKRSNLI

SEQ ID NO: 110418 - protein, 186 aa, Zea mays subsp. mays
  misc_feature (1)..(186): Ceres Seq. ID no. 12407940
  misc_feature (1)..(168): Pfam Name: Clp protease Pfam Description: Clp protease
  misc_feature (1)..(169): Homolog of NCBI NO: 18203214 NR Description: Putative ATP-dependent Clp protease proteolytic
  misc_feature (1)..(170): Homolog of NCBI NO: 23126723 NR Description: hypothetical protein [Nostoc punctiforme]
  misc_feature (1)..(170): Homolog of NCBI NO: 17231850 NR Description: ATP-dependent Clp protease proteolytic subunit
  misc_feature (1)..(170): Homolog of NCBI NO: 22299302 NR Description: ATP-dependent Clp protease proteolytic subunit 3
  misc_feature (1)..(174): Homolog of NCBI NO: 13812146 NR Description: ATP-dependent Clp protease proteolytic subunit
  misc_feature (152)..(186): Homolog of NCBI NO: 7488077 NR Description: probable Clp proteinase - Arabidopsis thaliana
  misc_feature (1)..(106): Homolog of NCBI NO: 7488077 NR Description: probable Clp proteinase - Arabidopsis thaliana
  misc_feature (1)..(101): Homolog of NCBI NO: 34903202 NR Description: unnamed protein product [Oryza sativa (japonica
  misc_feature (1)..(186): Homolog of NCBI NO: 19698857 NR Description: unknown protein [Arabidopsis thaliana]
  misc_feature (1)..(186): Homolog of NCBI NO: 18414804 NR Description: ATP-dependent Clp protease proteolytic subunit
MCLVPSVTELMLAEFLYLQYDDAEKPIYMYINSTGTTKNGEKLGYETEALAVYDAMRYVKVPIFTLCVGNAWGEAALLLAAGAKGNRAALPSSTIMIKQPIGRFQGQATDVDIARKEIRNVKIEMVKLLARHIGKPMEEIARDIRRPKYFSPSEAVDYGIIDKVIYNEKIQEDGGVVSELKRSNLI

SEQ ID NO: 110419 - DNA, 589 bp, Zea mays subsp. mays
  misc_feature (1)..(589): Ceres Seq. ID no. 15175545
atccagtcgcatctccctctccgaaatcaaggtagcgtacaccgctgcagtttctagagccctctctgccactcgtgatcccactagtcacaatgcctgccctcgccaagcccgcctcccgcaccgccaagcccgccgcggctccgaagccgaagcctgccgccgccaagccgaaggcggccaccgctggtgcctcccacccgccttacttcgagatgatcaaggaggctatcacggcgctcaaggagaggaccggctccagctcgcaagcgatcgccaagtatgtgggggacaagcacggcgcgtctctgccggccaacttcaagaagatgctttccatccagctccgtgggtccgggagcagtaccagaagaagaggacgtcgtccaagtgagctgcaatgtgtcaattgtgatgtaggagcactgctactctctgttctgatctttcttagtgaagcccattagaggaacaggtttttctcttgggtggagactcttcttggacgctttggttcctttggatggtgagcttgtaagccgctggccttttttttcattattatgccagactagtatgatttttgcac

SEQ ID NO: 110420 - protein, 130 aa, Zea mays subsp. mays
  misc_feature (1)..(130): Ceres Seq. ID no. 15175546
SSRISLSEIKVAYTAAVSRALSATRDPTSHNACPRQARLPHRQARRGSEAEACRRQAEGGHRWCLPPALLRDDQGGYHGAQGEDRLQLASDRQVCGGQARRVSAGQLQEDAFHPAPWVREQYQKKRTSSK

SEQ ID NO: 110421 - protein, 124 aa, Zea mays subsp. mays
  misc_feature (1)..(124): Ceres Seq. ID no. 15175547
  misc_feature (35)..(90): Pfam Name: linker histone H1 and H5 family Pfam Description: linker histone H1 and H5 family
  misc_feature (2)..(86): Homolog of NCBI NO: 15281584 NR Description: histone-like protein [Fritillaria liliacea]
  misc_feature (2)..(86): Homolog of NCBI NO: 15281578 NR Description: histone-like protein [Fritillaria liliacea]
  misc_feature (1)..(86): Homolog of NCBI NO: 121950 NR Description: HISTONE H1
  misc_feature (1)..(90): Homolog of NCBI NO: 729668 NR Description: Histone H1
  misc_feature (1)..(90): Homolog of NCBI NO: 7439658 NR Description: histone H1, stress-inducible - tomato
  misc_feature (1)..(86): Homolog of NCBI NO: 6474950 NR Description: variant of histone H1 [Lilium longiflorum]
  misc_feature (1)..(93): Homolog of NCBI NO: 18463959 NR Description: histone H1-like protein [Zea mays]
  misc_feature (1)..(93): Homolog of NCBI NO: 5230785 NR Description: histone H1 WH1B.1 [Triticum aestivum]
  misc_feature (4)..(90): Homolog of NCBI NO: 32489126 NR Description: OSJNBb0018J12.6 [Oryza sativa (japonica
  misc_feature (1)..(90): Homolog of NCBI NO: 22135471 NR Description: histone H1-like protein HON101 [Zea mays]
MPALAKPASRTAKPAAAPKPKPAAAKPKAATAGASHPPYFEMIKEAITALKERTGSSSQAIAKYVGDKHGASLPANFKKMLSIQLRGSGSSTRRRGRRPSELQCVNCDVGALLLSVLIFLSEAH

SEQ ID NO: 110422 - protein, 83 aa, Zea mays subsp. mays
  misc_feature (1)..(83): Ceres Seq. ID no. 15175548
  misc_feature (1)..(45): Homolog of NCBI NO: 15281584 NR Description: histone-like protein [Fritillaria liliacea]
  misc_feature (1)..(45): Homolog of NCBI NO: 15281578 NR Description: histone-like protein [Fritillaria liliacea]
  misc_feature (1)..(45): Homolog of NCBI NO: 121950 NR Description: HISTONE H1
  misc_feature (1)..(49): Homolog of NCBI NO: 729668 NR Description: Histone H1
  misc_feature (1)..(49): Homolog of NCBI NO: 7439658 NR Description: histone H1, stress-inducible - tomato
  misc_feature (1)..(45): Homolog of NCBI NO: 6474950 NR Description: variant of histone H1 [Lilium longiflorum]
  misc_feature (1)..(52): Homolog of NCBI NO: 18463959 NR Description: histone H1-like protein [Zea mays]
  misc_feature (1)..(52): Homolog of NCBI NO: 5230785 NR Description: histone H1 WH1B.1 [Triticum aestivum]
  misc_feature (1)..(49): Homolog of NCBI NO: 32489126 NR Description: OSJNBb0018J12.6 [Oryza sativa (japonica
  misc_feature (1)..(49): Homolog of NCBI NO: 22135471 NR Description: histone H1-like protein HON101 [Zea mays]
MIKEAITALKERTGSSSQAIAKYVGDKHGASLPANFKKMLSIQLRGSGSSTRRRGRRPSELQCVNCDVGALLLSVLIFLSEAH

SEQ ID NO: 110423 - DNA, 1225 bp, Zea mays subsp. mays
  misc_feature (1)..(1225): Ceres Seq. ID no. 15179121
  misc_feature: MA Experiment ID: 20000534 Result: Down-regulated in Transcription
  misc_feature: MA Experiment 20000534 PARAMETER Experiment Name: Zm_Hybrid_Pollen_P Parameter: Age (day) Value: 8
  misc_feature: MA Experiment 20000534 PARAMETER Experiment Name: Zm_Hybrid_Pollen_P Parameter: Organism Value: Zea mays
  misc_feature: MA Experiment 20000534 PARAMETER Experiment Name: Zm_Hybrid_Pollen_P Parameter: Plant Line Value: 35A19
  misc_feature: MA Experiment 20000534 PARAMETER Experiment Name: Zm_Hybrid_Pollen_P Parameter: Tissue Value: Pollen vs. Aerial
agaatcttctctcttgacaaggagcaagcctaatcccagaaccccacggtcgtgagaccctagctgccgtcgccgccgccgctgaccggcgacggcgatctagatgggggcgtcggcctccgtgctctcgttcccaacggccgccgcgttcccagcagccgccaccgccgtcgccggggccgccggctgcttcgcgctcggctacctcctggccttcacccgcctcccgcgccacgccgccggcccaggttcgggagggacctccgatgacgattccgaggatgactcggaagaagatgatgacgaaaactccggccgcagtcgcgcggcgaagcgggcgggagggcagaagagggccgggctccggctgctctactgggcacggaacgtggtgaccaagtccgactctgccagggaggcggaaaggtcccggtctcaggccgcggccagtcccctggagatcgagaaccttgctgagataatagaagatttcaaaatggtgttggttgtgaggaatgatctgaagatggggaaggggaagattgccgcacagtgcagtcatgcaactcttgggctattcaaaaaactccaacagagagctccaaaatcactaagaaggtgggagcggtgtgggcaagttaaagtggttgtgaaaatagaaagcgaggaagacatgctagttttacaagggagagcaaagtctttaaatctgccaactcacataaccatagacgctggaagaacacagattgctccaaattcaaggacagtcatggctattctggggccagctgatatggttgatgatgttactggcggtctgaagcttttgtagaaaaccaccttgtcagcattttcaacttgggtcttcatagagcagtgctgggactttgcaggccacagtggtctctgcacttgtactgatgtgcggcagaagaatgaaccttggccccgttggttgacctgagtttcttgtccatgaatttatttggaaggagagcttgcattcttttttcacttgtaccgaccgttatctttggagttgtgatgttagcagttcgaattctggtgttgacaacttatagaccatcatttcttctgtaacatagataagaaaatactatttgactattgtccatttccccttttttattttctttttaataattcgtgcagtagtggacacaatactgagttgctttggagaagtcatcttgattgcggc

SEQ ID NO: 110424 - protein, 243 aa, Zea mays subsp. mays
  misc_feature (1)..(243): Ceres Seq. ID no. 15179122
  misc_feature (139)..(229): Pfam Name: Domain of unknown function UPF0099 Pfam Description: Domain of unknown function UPF0099
  misc_feature (95)..(243): Homolog of NCBI NO: 9438135 NR Description: unknown [Ochlerotatus triseriatus]
  misc_feature (81)..(243): Homolog of NCBI NO: 40744736 NR Description: hypothetical protein AN1991.2 [Aspergillus
  misc_feature (129)..(242): Homolog of NCBI NO: 40889414 NR Description: Chain A, Crystal Structure Of Bit1
  misc_feature (110)..(242): Homolog of NCBI NO: 11359891 NR Description: hypothetical protein DKFZp434A1535.1 - human
  misc_feature (110)..(242): Homolog of NCBI NO: 7706351 NR Description: CGI-147 protein [Homo sapiens]
  misc_feature (110)..(243): Homolog of NCBI NO: 11357729 NR Description: hypothetical protein F2K13_20 - Arabidopsis
  misc_feature (94)..(243): Homolog of NCBI NO: 15228442 NR Description: expressed protein [Arabidopsis thaliana]
  misc_feature (110)..(243): Homolog of NCBI NO: 21592675 NR Description: unknown [Arabidopsis thaliana]
  misc_feature (110)..(243): Homolog of NCBI NO: 18418110 NR Description: expressed protein [Arabidopsis thaliana]
  misc_feature (1)..(243): Homolog of NCBI NO: 38345901 NR Description: OSJNBa0060D06.11 [Oryza sativa (japonica
MGASASVLSFPTAAAFPAAATAVAGAAGCFALGYLLAFTRLPRHAAGPGSGGTSDDDSEDDSEEDDDENSGRSRAAKRAGGQKRAGLRLLYWARNVVTKSDSAREAERSRSQAAASPLEIENLAEIIEDFKMVLVVRNDLKMGKGKIAAQCSHATLGLFKKLQQRAPKSLRRWERCGQVKVVVKIESEEDMLVLQGRAKSLNLPTHITIDAGRTQIAPNSRTVMAILGPADMVDDVTGGLKLL

SEQ ID NO: 110425 - DNA, 1231 bp, Zea mays subsp. mays
  misc_feature (1)..(1231): Ceres Seq. ID no. 13586122
  misc_feature: MA Experiment ID: 108529 Result: Up-regulated in Transcription
  misc_feature: MA Experiment 108529 PARAMETER Experiment Name: Zm_Imbibed_Seeds_P Parameter: Age (day) Value: 5 vs. 2
  misc_feature: MA Experiment 108529 PARAMETER Experiment Name: Zm_Imbibed_Seeds_P Parameter: Organism Value: Zea mays
  misc_feature: MA Experiment 108529 PARAMETER Experiment Name: Zm_Imbibed_Seeds_P Parameter: Plant Line Value: 35A19
  misc_feature: MA Experiment 108529 PARAMETER Experiment Name: Zm_Imbibed_Seeds_P Parameter: Tissue Value: Roots vs. Embryo
  misc_feature: MA Experiment ID: 108535 Result: Down-regulated in Transcription
  misc_feature: MA Experiment 108535 PARAMETER Experiment Name: Zm_Meristem_P Parameter: Age (day) Value: 8
  misc_feature: MA Experiment 108535 PARAMETER Experiment Name: Zm_Meristem_P Parameter: Organism Value: Zea mays
  misc_feature: MA Experiment 108535 PARAMETER Experiment Name: Zm_Meristem_P Parameter: Plant Line Value: 35A19
  misc_feature: MA Experiment 108535 PARAMETER Experiment Name: Zm_Meristem_P Parameter: Tissue Value: Root Meristem vs. Above Root Meristem
  misc_feature: MA Experiment ID: 108543 Result: Down-regulated in Transcription
  misc_feature: MA Experiment ID: 108687 Result: Down-regulated in Transcription
  misc_feature: MA Experiment 108687 PARAMETER Experiment Name: Zm_Embryos-Flowers__P Parameter: Tissue Value: Embryo vs. Aerial+
  misc_feature: MA Experiment ID: 108689 Result: Down-regulated in Transcription
  misc_feature: MA Experiment 108689 PARAMETER Experiment Name: Zm_Drought_Roots_P Parameter: Age (day) Value: 9
  misc_feature: MA Experiment 108689 PARAMETER Experiment Name: Zm_Drought_Roots_P Parameter: Organism Value: Zea mays
  misc_feature: MA Experiment 108689 PARAMETER Experiment Name: Zm_Drought_Roots_P Parameter: Plant Line Value: 35A19
  misc_feature: MA Experiment 108689 PARAMETER Experiment Name: Zm_Drought_Roots_P Parameter: Timepoint (hr) Value: 24
  misc_feature: MA Experiment 108689 PARAMETER Experiment Name: Zm_Drought_Roots_P Parameter: Tissue Value: Roots
  misc_feature: MA Experiment 108689 PARAMETER Experiment Name: Zm_Drought_Roots_P Parameter: Treatment Value: Drought vs. No Drought
ataatggcaaatttctcgtcgaataggtcagtgtgcacgcgtgaccgcgaaaagttgtttcgacctcctcggctgctgctttccgctgacctcgccgtgccattgagatgtcatagaacctgccgagccggtcgcaggcgcgaggagaatggggacggaggccgacgccgcagccgtggattcgcttcggtcgcagatcccgttccagaccgacggggagctcatcctcccgcgccgcgatgtggggctcgtcctcgtcgacctctgcaacggcttctgcaccgtcggcgccgggaacctcgctcctgttgcgccaaataagcagataagtaaaatggtggaagaggccgctaggctctctaagctgttctgtgatagaaacctgccgatctttgcattcctggatacccattatccagataagccggagccaccgtatcctcctcactgtatcattggtactggggaggagaacttcgttccagacctggagtggttggaaaaggagccaaatgtgactataaagaggaaaagttgtattgacggttacatcagctgcatagaggaggacgggtctagtgtttttgttgactgggtgggaaaatatcagatcaaaactgtcttggtactcgggatatgcacggacatctgtgttttggattttgcaagctcaactctggctgctcgaaatattgaccgagtgcctccattacgagatgtcgtgatttattcagaggggtgtgctacatatgaccttcctgttgagatcgctatgaatatcaaaggagctcttgcccatcctcaggacctgatgcatcatattggactctatatggccaaaggaaggggtgcaaaggttgttgacagggtggttattgaaccttgaataaaaaaaacttccctcatcgtagtgatgttgctagagtttcctgtcttctcatccttccattgtaacaatcagatatatatgcgtcttagcataaagttgttgagatactaatgctagcgacaactatgttgacttgtcgagtatgtagagatgggctcatcatttttttggtgagcttgtacataatttcctgaaaaaaaaaaaaaaaaaaaaaaaaaaaaaaaaaaaaaaaaaaaaaaaaaaaaaaaaaaaaaaaaaaaaaaaaaaaaaaaaaaaaaaaaaatttccccccccccccccssggggggggssssscmcccmccccccccaaaaagggggggg

SEQ ID NO: 110426 - protein, 245 aa, Zea mays subsp. mays
  misc_feature (1)..(245): Ceres Seq. ID no. 15220784
  misc_feature (31)..(220): Pfam Name: Isochorismatase family Pfam Description: Isochorismatase family
  misc_feature (12)..(241): Homolog of NCBI NO: 23042463 NR Description: hypothetical protein [Trichodesmium erythraeum
  misc_feature (11)..(219): Homolog of NCBI NO: 25412119 NR Description: hypothetical protein At2g22570 [imported] -
  misc_feature (1)..(220): Homolog of NCBI NO: 15144508 NR Description: unknown [Lycopersicon esculentum]
  misc_feature (11)..(244): Homolog of NCBI NO: 21537016 NR Description: unknown [Arabidopsis thaliana]
  misc_feature (11)..(244): Homolog of NCBI NO: 18400020 NR Description: isochorismatase hydrolase family [Arabidopsis
MGTEADAAAVDSLRSQIPFQTDGELILPRRDVGLVLVDLCNGFCTVGAGNLAPVAPNKQISKMVEEAARLSKLFCDRNLPIFAFLDTHYPDKPEPPYPPHCIIGTGEENFVPDLEWLEKEPNVTIKRKSCIDGYISCIEEDGSSVFVDWVGKYQIKTVLVLGICTDICVLDFASSTLAARNIDRVPPLRDVVIYSEGCATYDLPVEIAMNIKGALAHPQDLMHHIGLYMAKGRGAKVVDRVVIEP

SEQ ID NO: 110427 - protein, 183 aa, Zea mays subsp. mays
  misc_feature (1)..(183): Ceres Seq. ID no. 15220785
  misc_feature (1)..(158): Pfam Name: Isochorismatase family Pfam Description: Isochorismatase family
  misc_feature (1)..(179): Homolog of NCBI NO: 23042463 NR Description: hypothetical protein [Trichodesmium erythraeum
  misc_feature (1)..(157): Homolog of NCBI NO: 25412119 NR Description: hypothetical protein At2g22570 [imported] -
  misc_feature (1)..(158): Homolog of NCBI NO: 15144508 NR Description: unknown [Lycopersicon esculentum]
  misc_feature (1)..(182): Homolog of NCBI NO: 21537016 NR Description: unknown [Arabidopsis thaliana]
  misc_feature (1)..(182): Homolog of NCBI NO: 18400020 NR Description: isochorismatase hydrolase family [Arabidopsis
MVEEAARLSKLFCDRNLPIFAFLDTHYPDKPEPPYPPHCIIGTGEENFVPDLEWLEKEPNVTIKRKSCIDGYISCIEEDGSSVFVDWVGKYQIKTVLVLGICTDICVLDFASSTLAARNIDRVPPLRDVVIYSEGCATYDLPVEIAMNIKGALAHPQDLMHHIGLYMAKGRGAKVVDRVVIEP

SEQ ID NO: 110428 - DNA, 1208 bp, Zea mays subsp. mays
  misc_feature (1)..(1208): Ceres Seq. ID no. 12356503
  misc_feature: MA Experiment ID: 108556 Result: Down-regulated in Transcription
  misc_feature: MA Experiment 108556 PARAMETER Experiment Name: Zm_Drought_P Parameter: Age (day) Value: 9
  misc_feature: MA Experiment 108556 PARAMETER Experiment Name: Zm_Drought_P Parameter: Organism Value: Zea mays
  misc_feature: MA Experiment 108556 PARAMETER Experiment Name: Zm_Drought_P Parameter: Plant Line Value: 35A19
  misc_feature: MA Experiment 108556 PARAMETER Experiment Name: Zm_Drought_P Parameter: Timepoint (hr) Value: 24
  misc_feature: MA Experiment 108556 PARAMETER Experiment Name: Zm_Drought_P Parameter: Tissue Value: Aerial
  misc_feature: MA Experiment 108556 PARAMETER Experiment Name: Zm_Drought_P Parameter: Treatment Value: Drought vs. No Drought
atctaccgtgcggagggggaagagggagaggccaggagaggaaagcctgcagccaccatggattccgacctctggatctcgcgtctcacggccgccaagcggcagtttgcgctgcagcgcgcgcagcgccagcacgccgccccggcatcccatcacgatcgatttgggtatgatgatatcgaacctgaggatgatttgcactcagacttcccatgcccttactgttatgaagatcatgatgttgcttctctctgcgcccatttggaggacgagcaccctttcgagtctaaaattgtgtcttgcccagtttgctcagctaggatttcgaaggacttggtggatcatataacccttcagcatggctacctatttaaattgcagaaacatcaaagagtacgcagagttactggtaatggcaaccacaatctctcctatgcagggagagatcttcaactgcaagagacctacttaaaggtgcttcttggaaatagcagtcgaagcagcagtaccaatgcatcaagtacagtcaccgattcactgctaccctcactagttttaaatttatcatcaccagaagtagaagacgcatcaaagttttcagctcctgctgtggtggaaaataattggtttaaacgatcactgccttcaaaaacttggaaattaagaactgttgattccacccttagtcatgaagagagggagcgtaggaggaggagagctgctgtgagatcagcttttgtccagcatctccttgtcaccaccatttttgaagactagcagatcaagcacagctcatgcaaaggaatcttgtgggcgggccttttgcccactcatttatctggatggataaggcactaattatcttggataccatcacgctgttcatccggtctgctgggtaaccatgacaggaaaaatgaagcagcgggcgtcttaccttatatatgctctctggaagcagctgacatttgttttctggatcatattcataattctatgtaggctgtgacaggaatctctatagtagagccatgatgttttttttgggttgggtttcatcctgcgttggagaatgtgcccaaatttttttttttggagaatatgccttatctggatggataaggcactaaacatttgaagattatatttcggaggttggagaatatgacaatttgatttatatcactaaacatttgaagattatgttg

SEQ ID NO: 110429 - protein, 258 aa, Zea mays subsp. mays
  misc_feature (1)..(258): Ceres Seq. ID no. 12356504
  misc_feature (56)..(255): Pfam Name: Drought induced 19 protein (Di19) Pfam Description: Drought induced 19 protein (Di19)
  misc_feature (56)..(206): Homolog of NCBI NO: 30696095 NR Description: drought-induced protein -related [Arabidopsis
  misc_feature (20)..(185): Homolog of NCBI NO: 15239827 NR Description: drought-induced protein Di19-like protein
  misc_feature (20)..(185): Homolog of NCBI NO: 13937216 NR Description: AT5g49230/K21P3_11 [Arabidopsis thaliana]
  misc_feature (56)..(251): Homolog of NCBI NO: 15230782 NR Description: unknown protein; protein id: At3g06760.1
  misc_feature (56)..(240): Homolog of NCBI NO: 1076316 NR Description: drought-induced protein Di19 - Arabidopsis
  misc_feature (56)..(240): Homolog of NCBI NO: 15028023 NR Description: unknown protein [Arabidopsis thaliana]
  misc_feature (20)..(258): Homolog of NCBI NO: 28393233 NR Description: unknown protein [Arabidopsis thaliana]
  misc_feature (20)..(258): Homolog of NCBI NO: 15240426 NR Description: drought-induced protein - like; protein id:
  misc_feature (20)..(258): Homolog of NCBI NO: 25992529 NR Description: fiber protein Fb2 [Gossypium barbadense]
  misc_feature (56)..(258): Homolog of NCBI NO: 18377875 NR Description: AT3g06760/F3E22_10 [Arabidopsis thaliana]
IYRAEGEEGEARRGKPAATMDSDLWISRLTAAKRQFALQRAQRQHAAPASHHDRFGYDDIEPEDDLHSDFPCPYCYEDHDVASLCAHLEDEHPFESKIVSCPVCSARISKDLVDHITLQHGYLFKLQKHQRVRRVTGNGNHNLSYAGRDLQLQETYLKVLLGNSSRSSSTNASSTVTDSLLPSLVLNLSSPEVEDASKFSAPAVVENNWFKRSLPSKTWKLRTVDSTLSHEERERRRRRAAVRSAFVQHLLVTTIFED

SEQ ID NO: 110430 - protein, 239 aa, Zea mays subsp. mays
  misc_feature (1)..(239): Ceres Seq. ID no. 12356505
  misc_feature (37)..(236): Pfam Name: Drought induced 19 protein (Di19) Pfam Description: Drought induced 19 protein (Di19)
  misc_feature (37)..(187): Homolog of NCBI NO: 30696095 NR Description: drought-induced protein -related [Arabidopsis
  misc_feature (1)..(166): Homolog of NCBI NO: 15239827 NR Description: drought-induced protein Di19-like protein
  misc_feature (1)..(166): Homolog of NCBI NO: 13937216 NR Description: AT5g49230/K21P3_11 [Arabidopsis thaliana]
  misc_feature (37)..(232): Homolog of NCBI NO: 15230782 NR Description: unknown protein; protein id: At3g06760.1
  misc_feature (37)..(221): Homolog of NCBI NO: 1076316 NR Description: drought-induced protein Di19 - Arabidopsis
  misc_feature (37)..(221): Homolog of NCBI NO: 15028023 NR Description: unknown protein [Arabidopsis thaliana]
  misc_feature (1)..(239): Homolog of NCBI NO: 28393233 NR Description: unknown protein [Arabidopsis thaliana]
  misc_feature (1)..(239): Homolog of NCBI NO: 15240426 NR Description: drought-induced protein - like; protein id:
  misc_feature (1)..(239): Homolog of NCBI NO: 25992529 NR Description: fiber protein Fb2 [Gossypium barbadense]
  misc_feature (37)..(239): Homolog of NCBI NO: 18377875 NR Description: AT3g06760/F3E22_10 [Arabidopsis thaliana]
MDSDLWISRLTAAKRQFALQRAQRQHAAPASHHDRFGYDDIEPEDDLHSDFPCPYCYEDHDVASLCAHLEDEHPFESKIVSCPVCSARISKDLVDHITLQHGYLFKLQKHQRVRRVTGNGNHNLSYAGRDLQLQETYLKVLLGNSSRSSSTNASSTVTDSLLPSLVLNLSSPEVEDASKFSAPAVVENNWFKRSLPSKTWKLRTVDSTLSHEERERRRRRAAVRSAFVQHLLVTTIFED

SEQ ID NO: 110431 - DNA, 1168 bp, Zea mays subsp. mays
  misc_feature (1)..(1168): Ceres Seq. ID no. 15179380
gtttcgctctcagttggcggttagctagcttgcatactagcatcaggtgccccttgccgagccgtacgtgtgtcgtcgtcgacgacgatggtggcggcgcccagcaagtgccggccgtcggcggcagcgctggtggtggcaccgccgggggcccctcggcgccggctgcggtgccggtgctgcgaggacacgctgggcgtcccgcgccgccggctgcagccgcagctgcacctgaagcagcaggcacctgcggcgacgaccgcccccgccgcggcgccgccgccgaggccccggcggatcgtgctggtgcggcacggcgagagcgagggcaacgtggacgaggctgcatacacgcgcgtcccggaccccaggatcgggctcaccgccaagggctggcgcgaggccgacgactgcggccgccgcctgcgcgacctcttctcctctggatcccgcgaccaggacgactggaaggtctacttctacgcgtcgccgtaccgccgcagcctggagaccctgcgcggcatcggccacgccttcgagccccaccgcatcgccggcgtccgcgaggagccccgcctccgcgagcaggacttcggcaacttccaggaccgggagcagatgcgggtggagaaggagatccggcaacgctacggccgcttcttctaccgcttccccaacggcgagtcggcggcggacgtgtacgaccgcatcaccggcttccgggagaccctgctctccgacatcgtcctcggccgcttccagcccccgggccaccgcagcaccagcggagacatgaacatcgtgctcgtctcccacggcctcaccctccgcgtcttcctcatgcgctggtacaagtggaccgtccgccagttcgagggcctcgagaacctcgccaacggcggcgagctcgtcatgcagactggagaaggcggcaggtacagcctcctagtgcaccacacgcccgacgagctcagggcgttcggcctcaccgacgagatgctgcaggaccagatgtggcagaagacggccaggcccggcgagctcaaccaccgcttcatgacaaacggacagtccttctttgatccatttactgtaatctactagttcttgacgaccgaccacatgttatgtatgtgataagtgattaaatgtttttttttatggcggt

SEQ ID NO: 110432 - protein, 359 aa, Zea mays subsp. mays
  misc_feature (1)..(359): Ceres Seq. ID no. 15179381
  misc_feature (33)..(257): Pfam Name: Progesterone receptor Pfam Description: Progesterone receptor
  misc_feature (31)..(350): Homolog of NCBI NO: 29247944 NR Description: GLP_26_54603_52153 [Giardia lamblia ATCC 50803]
FALSWRLASLHTSIRCPLPSRTCVVVDDDGGGAQQVPAVGGSAGGGTAGGPSAPAAVPVLRGHAGRPAPPAAAAAAPEAAGTCGDDRPRRGAAAEAPADRAGAARRERGQRGRGCIHARPGPQDRAHRQGLARGRRLRPPPARPLLLWIPRPGRLEGLLLRVAVPPQPGDPARHRPRLRAPPHRRRPRGAPPPRAGLRQLPGPGADAGGEGDPATLRPLLLPLPQRRVGGGRVRPHHRLPGDPALRHRPRPLPAPGPPQHQRRHEHRARLPRPHPPRLPHALVQVDRPPVRGPREPRQRRRARHADWRRRQVQPPSAPHARRAQGVRPHRRDAAGPDVAEDGQARRAQPPLHDKRTVLL

SEQ ID NO: 110433 - protein, 338 aa, Zea mays subsp. mays
  misc_feature (1)..(338): Ceres Seq. ID no. 15179382
  misc_feature (69)..(288): Pfam Name: Phosphoglycerate mutase family Pfam Description: Phosphoglycerate mutase family
  misc_feature (67)..(140): Homolog of NCBI NO: 6320256 NR Description: Hypothetical ORF; Ydr051cp [Saccharomyces
  misc_feature (158)..(286): Homolog of NCBI NO: 6320256 NR Description: Hypothetical ORF; Ydr051cp [Saccharomyces
  misc_feature (52)..(296): Homolog of NCBI NO: 40741871 NR Description: hypothetical protein AN4983.2 [Aspergillus
  misc_feature (67)..(286): Homolog of NCBI NO: 32415611 NR Description: hypothetical protein [Neurospora crassa]
  misc_feature (67)..(286): Homolog of NCBI NO: 29469213 NR Description: unknown [Streptomyces murayamaensis]
  misc_feature (67)..(286): Homolog of NCBI NO: 21224153 NR Description: conserved hypothetical protein SC4H2.29
  misc_feature (67)..(286): Homolog of NCBI NO: 29829000 NR Description: hypothetical protein [Streptomyces avermitilis
  misc_feature (68)..(308): Homolog of NCBI NO: 15223983 NR Description: expressed protein [Arabidopsis thaliana]
  misc_feature (68)..(332): Homolog of NCBI NO: 15229917 NR Description: expressed protein [Arabidopsis thaliana]
  misc_feature (1)..(335): Homolog of NCBI NO: 34897810 NR Description: P0514G12.25 [Oryza sativa (japonica
MVAAPSKCRPSAAALVVAPPGAPRRRLRCRCCEDTLGVPRRRLQPQLHLKQQAPAATTAPAAAPPPRPRRIVLVRHGESEGNVDEAAYTRVPDPRIGLTAKGWREADDCGRRLRDLFSSGSRDQDDWKVYFYASPYRRSLETLRGIGHAFEPHRIAGVREEPRLREQDFGNFQDREQMRVEKEIRQRYGRFFYRFPNGESAADVYDRITGFRETLLSDIVLGRFQPPGHRSTSGDMNIVLVSHGLTLRVFLMRWYKWTVRQFEGLENLANGGELVMQTGEGGRYSLLVHHTPDELRAFGLTDEMLQDQMWQKTARPGELNHRFMTNGQSFFDPFTVIY

SEQ ID NO: 110434 - DNA, 1957 bp, Zea mays subsp. mays
  misc_feature (1)..(1957): Ceres Seq. ID no. 15179123
  misc_feature: MA Experiment ID: 108526 Result: Up-regulated in Transcription
  misc_feature: MA Experiment 108526 PARAMETER Experiment Name: Zm_5mM_NO_P Parameter: Age (day) Value: 8
  misc_feature: MA Experiment 108526 PARAMETER Experiment Name: Zm_5mM_NO_P Parameter: Organism Value: Zea mays
  misc_feature: MA Experiment 108526 PARAMETER Experiment Name: Zm_5mM_NO_P Parameter: Plant Line Value: 35A19
  misc_feature: MA Experiment 108526 PARAMETER Experiment Name: Zm_5mM_NO_P Parameter: Timepoint (hr) Value: 1
  misc_feature: MA Experiment 108526 PARAMETER Experiment Name: Zm_5mM_NO_P Parameter: Tissue Value: Aerial
  misc_feature: MA Experiment 108526 PARAMETER Experiment Name: Zm_5mM_NO_P Parameter: Treatment Value: 5mM NO vs. No Treatment
  misc_feature: MA Experiment ID: 108527 Result: Up-regulated in Transcription
  misc_feature: MA Experiment 108527 PARAMETER Experiment Name: Zm_5mM_NO_P Parameter: Age (day) Value: 8
  misc_feature: MA Experiment 108527 PARAMETER Experiment Name: Zm_5mM_NO_P Parameter: Organism Value: Zea mays
  misc_feature: MA Experiment 108527 PARAMETER Experiment Name: Zm_5mM_NO_P Parameter: Plant Line Value: 35A19
  misc_feature: MA Experiment 108527 PARAMETER Experiment Name: Zm_5mM_NO_P Parameter: Timepoint (hr) Value: 6
  misc_feature: MA Experiment 108527 PARAMETER Experiment Name: Zm_5mM_NO_P Parameter: Tissue Value: Aerial
  misc_feature: MA Experiment 108527 PARAMETER Experiment Name: Zm_5mM_NO_P Parameter: Treatment Value: 5mM NO vs. No Treatment
  misc_feature: MA Experiment ID: 108535 Result: Down-regulated in Transcription
  misc_feature: MA Experiment 108535 PARAMETER Experiment Name: Zm_Meristem_P Parameter: Age (day) Value: 8
  misc_feature: MA Experiment 108535 PARAMETER Experiment Name: Zm_Meristem_P Parameter: Organism Value: Zea mays
  misc_feature: MA Experiment 108535 PARAMETER Experiment Name: Zm_Meristem_P Parameter: Plant Line Value: 35A19
  misc_feature: MA Experiment 108535 PARAMETER Experiment Name: Zm_Meristem_P Parameter: Tissue Value: Root Meristem vs. Above Root Meristem
  misc_feature: MA Experiment ID: 108544 Result: Down-regulated in Transcription
  misc_feature: MA Experiment ID: 20000532 Result: Up-regulated in Transcription
  misc_feature: MA Experiment 20000532 PARAMETER Experiment Name: Zm_0.001percent_MeJA_P Parameter: Age (day) Value: 10
  misc_feature: MA Experiment 20000532 PARAMETER Experiment Name: Zm_0.001percent_MeJA_P Parameter: Organism Value: Zea mays
  misc_feature: MA Experiment 20000532 PARAMETER Experiment Name: Zm_0.001percent_MeJA_P Parameter: Plant Line Value: 35A19
  misc_feature: MA Experiment 20000532 PARAMETER Experiment Name: Zm_0.001percent_MeJA_P Parameter: Timepoint (hr) Value: 48
  misc_feature: MA Experiment 20000532 PARAMETER Experiment Name: Zm_0.001percent_MeJA_P Parameter: Tissue Value: Aerial
  misc_feature: MA Experiment 20000532 PARAMETER Experiment Name: Zm_0.001percent_MeJA_P Parameter: Treatment Value: 0.001percent MeJA vs. No Treatment
  misc_feature: MA Experiment ID: 20000630 Result: Up-regulated in Transcription
  misc_feature: MA Experiment 20000630 PARAMETER Experiment Name: Zm_Herbicide-Treatments_P Parameter: Timepoint (hr) Value: 4
  misc_feature: MA Experiment 20000630 PARAMETER Experiment Name: Zm_Herbicide-Treatments_P Parameter: Tissue Value: Aerial
  misc_feature: MA Experiment 20000630 PARAMETER Experiment Name: Zm_Herbicide-Treatments_P Parameter: Treatment Value: Roundup vs. No Treatment
aactgattatattttataacaataaccacaccggctaagcgccactgcacacgtcactcgctgtccgttctagcataccgcaccagacttcggcgccggtccgcgagcagatcaacagatggccacggcgacctacctctcctcctccttctcctcgccgccgccgccgtcatcacgcgcccgcctgcggcggcagacgaccagggcgggcgcgtcggcggcgacggaccgcccgcgcgaggtgctgtccccgaaacgccggctcccgctgcgggaggtgccgggtgactacggcccgccggtgctgggcgcggtccgcgaccggttcgagtacttctacgggccgggcggccgcgacggcttcttcgcctcccgcgtgcgcgcgcacggctccaccgtggtgcggctcaacatgccgccgggccccttcgtggcgcgcgacccgcgcgtggtggcgctcctggacgccgcctccttcccggtgctcttcgacacctcgctcgtcgacaagacggacctgttcacgggcaccttcatgccctccaccgacctcaccggcggctaccgcatgctctcgtacatcgaccccgccgagcccagccacggcccgctcaaggcgctcctcttctacctcctctcgcaccgtcggcagcacgtgatccccaagttccgcgaggtgtacggcgacctcttcggggtcgtggagaacgagctcgcccgggtcggcaaggccgacttcggccaccacaacgacgccgccgccttctccttcctctgccaggcgctgctggggcgcgaccccgccgagtccgcgctccatggcgacgggcccaagctgatcaccaagtgggtgctgttccagctcagcccgctgctcagcctcggcctgcccaagcacctcgaggactccctgctccactcgttccgcctcccgccggcgctggtcaggaaggactacggccggctcgccgacttcttccgcgacgcggccaggaccgtggtcgacgagggcgagcgcctcggcattgcgcgggaggaggcggtgcacaacatcctcttcgccacgtgcttcaactccttcggcggcatgaaaatcctgttcccgtcgctcgtcaagtggctgggccgcgccggcgcgcgcgcgcacggccggctggccacggaggtgcgcgacgccgtgcgcgcccacgccggcgaggtcaccatgaaggcgctggcggagatgccgctggtggagtcggccgtgtacgaggcgctgcgcatcgagccccccgtggccatgcagtacggccgcgccaagcgggacatggtggtggagagccacgactacggcttcgaggtgcgcgagggcgagatgctcttcggctaccagcccatggccaccaaggacccgcgcgtcttcgcgcgcgccgaggagtacgtgcccgacaggttcctcggggaggacggcgcgcagctgctccgccacgtcgtctggtccaacgggcccgagacggcgtcgcccacgctgcaggacaagcagtgcgccggcaaggacttcgtcgtgctcatcgcgcgccttctcgtcgccgagctcttcctccgctacgactccttcgacgtccaggtcggcgcctccgcgctggggtcgtcggtcaccatcacctcgctcaagaaagccaccttctgagttatgagctctgatcgaccgtccgtcaaagttgctagaggcgggcacgtgcaccaccgaatccctctcagaacttttttttttttgtagtgctatgctactgtgcgatcgtcaggtataacaaaatgtatattcttagtatagtgagagagcattttccccaggaacattcggtgtctggagatttgatgtcaggaaaaatttgctagcgatctgagggagacatgcacctactgttcatgttgcttatccatgacccatccatctatgtaaaatggcctgagatat

SEQ ID NO: 110435 - protein, 516 aa, Zea mays subsp. mays
  misc_feature (1)..(516): Ceres Seq. ID no. 15179124
  misc_feature (345)..(451): Pfam Name: Cytochrome P450 Pfam Description: Cytochrome P450
  misc_feature (7)..(516): Homolog of NCBI NO: 1352186 NR Description: Allene oxide synthase, chloroplast precursor
  misc_feature (9)..(514): Homolog of NCBI NO: 23956572 NR Description: allene oxide synthase [Solanum tuberosum]
  misc_feature (22)..(516): Homolog of NCBI NO: 15239032 NR Description: allene oxide synthase / cytochrome P450 74A
  misc_feature (30)..(516): Homolog of NCBI NO: 21616113 NR Description: allene oxide synthase [Cucumis melo]
  misc_feature (8)..(516): Homolog of NCBI NO: 33504426 NR Description: allene oxide synthase [Medicago truncatula]
  misc_feature (1)..(514): Homolog of NCBI NO: 16973300 NR Description: allene oxide synthase [Nicotiana attenuata]
  misc_feature (33)..(516): Homolog of NCBI NO: 7581989 NR Description: allene oxide synthase [Lycopersicon esculentum]
  misc_feature (8)..(516): Homolog of NCBI NO: 29373135 NR Description: allene oxide synthase [Citrus sinensis]
  misc_feature (7)..(516): Homolog of NCBI NO: 20160362 NR Description: allene oxide synthase [Solanum tuberosum]
  misc_feature (1)..(516): Homolog of NCBI NO: 31415935 NR Description: putative allene oxide synthase
MATATYLSSSFSSPPPPSSRARLRRQTTRAGASAATDRPREVLSPKRRLPLREVPGDYGPPVLGAVRDRFEYFYGPGGRDGFFASRVRAHGSTVVRLNMPPGPFVARDPRVVALLDAASFPVLFDTSLVDKTDLFTGTFMPSTDLTGGYRMLSYIDPAEPSHGPLKALLFYLLSHRRQHVIPKFREVYGDLFGVVENELARVGKADFGHHNDAAAFSFLCQALLGRDPAESALHGDGPKLITKWVLFQLSPLLSLGLPKHLEDSLLHSFRLPPALVRKDYGRLADFFRDAARTVVDEGERLGIAREEAVHNILFATCFNSFGGMKILFPSLVKWLGRAGARAHGRLATEVRDAVRAHAGEVTMKALAEMPLVESAVYEALRIEPPVAMQYGRAKRDMVVESHDYGFEVREGEMLFGYQPMATKDPRVFARAEEYVPDRFLGEDGAQLLRHVVWSNGPETASPTLQDKQCAGKDFVVLIARLLVAELFLRYDSFDVQVGASALGSSVTITSLKKATF

SEQ ID NO: 110436 - protein, 418 aa, Zea mays subsp. mays
  misc_feature (1)..(418): Ceres Seq. ID no. 15179125
  misc_feature (247)..(353): Pfam Name: Cytochrome P450 Pfam Description: Cytochrome P450
  misc_feature (1)..(418): Homolog of NCBI NO: 1352186 NR Description: Allene oxide synthase, chloroplast precursor
  misc_feature (1)..(416): Homolog of NCBI NO: 23956572 NR Description: allene oxide synthase [Solanum tuberosum]
  misc_feature (1)..(418): Homolog of NCBI NO: 15239032 NR Description: allene oxide synthase / cytochrome P450 74A
  misc_feature (1)..(418): Homolog of NCBI NO: 21616113 NR Description: allene oxide synthase [Cucumis melo]
  misc_feature (1)..(418): Homolog of NCBI NO: 33504426 NR Description: allene oxide synthase [Medicago truncatula]
  misc_feature (1)..(416): Homolog of NCBI NO: 16973300 NR Description: allene oxide synthase [Nicotiana attenuata]
  misc_feature (1)..(418): Homolog of NCBI NO: 7581989 NR Description: allene oxide synthase [Lycopersicon esculentum]
  misc_feature (1)..(418): Homolog of NCBI NO: 29373135 NR Description: allene oxide synthase [Citrus sinensis]
  misc_feature (1)..(418): Homolog of NCBI NO: 20160362 NR Description: allene oxide synthase [Solanum tuberosum]
  misc_feature (1)..(418): Homolog of NCBI NO: 31415935 NR Description: putative allene oxide synthase
MPPGPFVARDPRVVALLDAASFPVLFDTSLVDKTDLFTGTFMPSTDLTGGYRMLSYIDPAEPSHGPLKALLFYLLSHRRQHVIPKFREVYGDLFGVVENELARVGKADFGHHNDAAAFSFLCQALLGRDPAESALHGDGPKLITKWVLFQLSPLLSLGLPKHLEDSLLHSFRLPPALVRKDYGRLADFFRDAARTVVDEGERLGIAREEAVHNILFATCFNSFGGMKILFPSLVKWLGRAGARAHGRLATEVRDAVRAHAGEVTMKALAEMPLVESAVYEALRIEPPVAMQYGRAKRDMVVESHDYGFEVREGEMLFGYQPMATKDPRVFARAEEYVPDRFLGEDGAQLLRHVVWSNGPETASPTLQDKQCAGKDFVVLIARLLVAELFLRYDSFDVQVGASALGSSVTITSLKKATF

SEQ ID NO: 110437 - protein, 377 aa, Zea mays subsp. mays
  misc_feature (1)..(377): Ceres Seq. ID no. 15179126
  misc_feature (206)..(312): Pfam Name: Cytochrome P450 Pfam Description: Cytochrome P450
  misc_feature (1)..(377): Homolog of NCBI NO: 1352186 NR Description: Allene oxide synthase, chloroplast precursor
  misc_feature (1)..(375): Homolog of NCBI NO: 23956572 NR Description: allene oxide synthase [Solanum tuberosum]
  misc_feature (1)..(377): Homolog of NCBI NO: 15239032 NR Description: allene oxide synthase / cytochrome P450 74A
  misc_feature (1)..(377): Homolog of NCBI NO: 21616113 NR Description: allene oxide synthase [Cucumis melo]
  misc_feature (1)..(377): Homolog of NCBI NO: 33504426 NR Description: allene oxide synthase [Medicago truncatula]
  misc_feature (1)..(375): Homolog of NCBI NO: 16973300 NR Description: allene oxide synthase [Nicotiana attenuata]
  misc_feature (1)..(377): Homolog of NCBI NO: 7581989 NR Description: allene oxide synthase [Lycopersicon esculentum]
  misc_feature (1)..(377): Homolog of NCBI NO: 29373135 NR Description: allene oxide synthase [Citrus sinensis]
  misc_feature (1)..(377): Homolog of NCBI NO: 20160362 NR Description: allene oxide synthase [Solanum tuberosum]
  misc_feature (1)..(377): Homolog of NCBI NO: 31415935 NR Description: putative allene oxide synthase
MPSTDLTGGYRMLSYIDPAEPSHGPLKALLFYLLSHRRQHVIPKFREVYGDLFGVVENELARVGKADFGHHNDAAAFSFLCQALLGRDPAESALHGDGPKLITKWVLFQLSPLLSLGLPKHLEDSLLHSFRLPPALVRKDYGRLADFFRDAARTVVDEGERLGIAREEAVHNILFATCFNSFGGMKILFPSLVKWLGRAGARAHGRLATEVRDAVRAHAGEVTMKALAEMPLVESAVYEALRIEPPVAMQYGRAKRDMVVESHDYGFEVREGEMLFGYQPMATKDPRVFARAEEYVPDRFLGEDGAQLLRHVVWSNGPETASPTLQDKQCAGKDFVVLIARLLVAELFLRYDSFDVQVGASALGSSVTITSLKKATF

SEQ ID NO: 110438 - DNA, 1620 bp, Zea mays subsp. mays
  misc_feature (1)..(1620): Ceres Seq. ID no. 15180736
attagaatccacctcgcaccccgcgagcggtgacttccctagggtttagtcgcgccgccgccgccgccgaaacagcacatcgctctctcgatctcagccatggcggaggtggagcagccccaggacgcggtgaagctcttcaaccgctggaccttcgacgatgtccaggtgaacgatatctcgctgaacgactacctggctgtgactgcggcgaagcacgcgacattcctgccgcactccgcggggcgctactccaagaagcggttccgcaaggcgcagtgcgccatcgtcgagcgcctcaccaactcgctcatgatgcacgggcgcaacaacggcaagaaggtcatggccgtccgcatcatgaagcacaccctggagatcatccacctgctcactgacgccaatcccatccaggtggtcgtggacgccattatcaacaggtactaccttgctctcctgtcctcacttccgatctctgtactgtcaggctaataacagctaaacttattactttatgttgatactttttgaatgcggtaacttttcgtgaaacgtttgtttttactatccaattgaattgattcctatgaaattcatgtatcttcctatgaaatttatttgtaacttctgtcttctgaaggggactgcactttgatagagctatgatgtatttccttgctgcttgttgccagttttatatatttgatatggatttaaactgattggtatgaaatcatgtataatttgtctttcaaaggtgagtgctgtttgatataagttccttgctggcccctgctattttatatctgatagcatgatcgtggacaaatgccagctgttgaaattcgaaataaatgccatgtcccaatttctcatcataccagaatgtatgtctttaagctgattatagttgatcaatgtgcccatactctgccgtttccagtttcagtcaaaacgtgaatttggtctcgtattatctcattgcttttctgcgcattcgtttgcacggctcatgctaatatctcttatatttgctatttctatgtcaagtatgctgttatctatttaattgttttcatgcccccatgcagctcaaaggtatgtgctatgagatgtcaaactataactccaactattgattacacatgttggctcttgagatgtcaaactggtgttatgtgctgatgttgtctttgcagtggaccacgtgaggatgccacccgtattggttctgctggtgttgtgagaaggcaggctgtggatatctcacccctgagaagggtgaaccaggccatctacctcctcaccactggtgccagggagagcgctttcaggaacatcaaaaccattgctgagtgccttgcagatgagttgatcaacgctgccaagggctcttccaacagctacgccatcaagaagaaggacgagattgagcgtgttgccaaggccaaccgttgagtggagcttgtatcctggtgcacttgctctagagctacgtttctggcagccgtgttttttcttgtttttacccatgtttagactttgagacctatatctaaggttttggttctcagtgaacaatgaaaattactgtgaaatgcagttgttttggtgcaaaac

SEQ ID NO: 110439 - protein, 130 aa, Zea mays subsp. mays
  misc_feature (1)..(130): Ceres Seq. ID no. 15180737
  misc_feature (46)..(113): Pfam Name: Ribosomal protein S7p/S5e Pfam Description: Ribosomal protein S7p/S5e
  misc_feature (1)..(113): Homolog of NCBI NO: 15229897 NR Description: 40S ribosomal protein S5 (RPS5B) [Arabidopsis
  misc_feature (2)..(113): Homolog of NCBI NO: 34854534 NR Description: similar to ribosomal protein S5; 40S ribosomal
  misc_feature (1)..(113): Homolog of NCBI NO: 15294021 NR Description: 40S ribosomal protein S5 [Ictalurus punctatus]
  misc_feature (1)..(113): Homolog of NCBI NO: 40748265 NR Description: 40S ribosomal protein S5 [Capsicum annuum]
  misc_feature (8)..(113): Homolog of NCBI NO: 6831665 NR Description: 40S RIBOSOMAL PROTEIN S5
  misc_feature (1)..(113): Homolog of NCBI NO: 15228111 NR Description: 40S ribosomal protein S5 (RPS5A) [Arabidopsis
  misc_feature (1)..(113): Homolog of NCBI NO: 21617886 NR Description: 40S ribosomal protein S5 [Arabidopsis thaliana]
  misc_feature (1)..(113): Homolog of NCBI NO: 13904870 NR Description: ribosomal protein S5; 40S ribosomal protein S5
  misc_feature (2)..(113): Homolog of NCBI NO: 3717978 NR Description: 5S ribosomal protein [Mus musculus]
  misc_feature (1)..(113): Homolog of NCBI NO: 34893994 NR Description: putative 40S ribosomal protein S5
MAEVEQPQDAVKLFNRWTFDDVQVNDISLNDYLAVTAAKHATFLPHSAGRYSKKRFRKAQCAIVERLTNSLMMHGRNNGKKVMAVRIMKHTLEIIHLLTDANPIQVVVDAIINRYYLALLSSLPISVLSG

SEQ ID NO: 110440 - DNA, 1100 bp, Zea mays subsp. mays
  misc_feature (1)..(1100): Ceres Seq. ID no. 14305500
aaaacttagagagtgaaggttgaaagactcccgcgctttacgggtttggacctcacctcatacagtacgctcggctctactgggcagatgcacccatctgtttcgcggagaagcccgtcctcgtcggagactcggagtgtagaggactagaggggcgaagcgatccgaactccgagaaccccagggccagggctcagtccacagcgagagcagagaacgcagcggcctgccggcctccgcccctcactcccgcagccatggccgccgccgccgccgtggttgccgagcccaagaccaagtacgatcgccagctcaggaaagcagacatcgttttggttgctgcacgttcatatggtctaactggtttggtcagggttagcgtcaaggagcactgtgttatagaatcaaaaccagatcacttcttggatgatttgcgacttcacaatccatggactgaactaaagcaatttgcaaaatcaattgatataaatgataaagatcctgttgtccacaaacatactccatacattgttgtccttgtgagacttgctgaaaaatgggcagatgcccatgatggtaacatgccttcaactaggcaagaaaagaaggaatttaaggacctaattcgagcccacatgcttaatgtagatgaagaaaattacaaagaagctgtggactcttcatataaagtctcagtcactccaggaatcagtaatgagatccatcagataattgatgatgactctgcggaagtcaattcatcatcagaagatttctggattttagtggctgctttaaaggagtttatttccaaggagggtaatggtgagctacctctggagggaacaatacctgatatgacttcccttactgagagaagaagaggtgctccaaaggtgatgataaatttgcccaatcagcacgcatgcagtcttcaacgatggttctgctttcttttcactgagtggaggggcctcaacatagacaatgggttcaaacgtttccgtgttttgatatgtgttaattattgtaatgtcatgtatgctttcctgagaactaaaatacacggtcaaacatggtaaacccttttatttctgttc

SEQ ID NO: 110441 - protein, 274 aa, Zea mays subsp. mays
  misc_feature (1)..(274): Ceres Seq. ID no. 14305501
  misc_feature (19)..(201): Homolog of NCBI NO: 23274055 NR Description: amyloid beta precursor protein binding protein 1
  misc_feature (19)..(201): Homolog of NCBI NO: 21450341 NR Description: amyloid beta precursor protein binding protein 1
  misc_feature (19)..(201): Homolog of NCBI NO: 4502169 NR Description: amyloid beta precursor protein-binding protein 1
  misc_feature (19)..(201): Homolog of NCBI NO: 40889581 NR Description: Chain A, Appbp1-Uba3-Nedd8, An E1-Ubiquitin-Like
  misc_feature (1)..(214): Homolog of NCBI NO: 15225241 NR Description: auxin-resistance protein, putative [Arabidopsis
  misc_feature (1)..(216): Homolog of NCBI NO: 15220442 NR Description: auxin-resistance protein AXR1 [Arabidopsis
  misc_feature (2)..(20): Homolog of NCBI NO: 29124137 NR Description: putative ubiquitin-activating enzyme (alternative
  misc_feature (2)..(20): Homolog of NCBI NO: 29124136 NR Description: putative ubiquitin-activating enzyme (alternative
  misc_feature (14)..(206): Homolog of NCBI NO: 29124137 NR Description: putative ubiquitin-activating enzyme (alternative
  misc_feature (14)..(206): Homolog of NCBI NO: 29124136 NR Description: putative ubiquitin-activating enzyme (alternative
MAAAAAVVAEPKTKYDRQLRKADIVLVAARSYGLTGLVRVSVKEHCVIESKPDHFLDDLRLHNPWTELKQFAKSIDINDKDPVVHKHTPYIVVLVRLAEKWADAHDGNMPSTRQEKKEFKDLIRAHMLNVDEENYKEAVDSSYKVSVTPGISNEIHQIIDDDSAEVNSSSEDFWILVAALKEFISKEGNGELPLEGTIPDMTSLTERRRGAPKVMINLPNQHACSLQRWFCFLFTEWRGLNIDNGFKRFRVLICVNYCNVMYAFLRTKIHGQTW

SEQ ID NO: 110442 - protein, 166 aa, Zea mays subsp. mays
  misc_feature (1)..(166): Ceres Seq. ID no. 14305502
  misc_feature (1)..(99): Homolog of NCBI NO: 33416343 NR Description: Unknown (protein for MGC:66148) [Danio rerio]
  misc_feature (1)..(93): Homolog of NCBI NO: 14091760 NR Description: APP-binding protein 1 [Rattus norvegicus]
  misc_feature (1)..(93): Homolog of NCBI NO: 23274055 NR Description: amyloid beta precursor protein binding protein 1
  misc_feature (1)..(93): Homolog of NCBI NO: 21450341 NR Description: amyloid beta precursor protein binding protein 1
  misc_feature (1)..(93): Homolog of NCBI NO: 4502169 NR Description: amyloid beta precursor protein-binding protein 1
  misc_feature (1)..(93): Homolog of NCBI NO: 40889581 NR Description: Chain A, Appbp1-Uba3-Nedd8, An E1-Ubiquitin-Like
  misc_feature (1)..(106): Homolog of NCBI NO: 15225241 NR Description: auxin-resistance protein, putative [Arabidopsis
  misc_feature (1)..(108): Homolog of NCBI NO: 15220442 NR Description: auxin-resistance protein AXR1 [Arabidopsis
  misc_feature (1)..(98): Homolog of NCBI NO: 29124137 NR Description: putative ubiquitin-activating enzyme (alternative
  misc_feature (1)..(98): Homolog of NCBI NO: 29124136 NR Description: putative ubiquitin-activating enzyme (alternative
MPSTRQEKKEFKDLIRAHMLNVDEENYKEAVDSSYKVSVTPGISNEIHQIIDDDSAEVNSSSEDFWILVAALKEFISKEGNGELPLEGTIPDMTSLTERRRGAPKVMINLPNQHACSLQRWFCFLFTEWRGLNIDNGFKRFRVLICVNYCNVMYAFLRTKIHGQTW

SEQ ID NO: 110443 - protein, 148 aa, Zea mays subsp. mays
  misc_feature (1)..(148): Ceres Seq. ID no. 14305503
  misc_feature (1)..(81): Homolog of NCBI NO: 33416343 NR Description: Unknown (protein for MGC:66148) [Danio rerio]
  misc_feature (1)..(75): Homolog of NCBI NO: 14091760 NR Description: APP-binding protein 1 [Rattus norvegicus]
  misc_feature (1)..(75): Homolog of NCBI NO: 23274055 NR Description: amyloid beta precursor protein binding protein 1
  misc_feature (1)..(75): Homolog of NCBI NO: 21450341 NR Description: amyloid beta precursor protein binding protein 1
  misc_feature (1)..(75): Homolog of NCBI NO: 4502169 NR Description: amyloid beta precursor protein-binding protein 1
  misc_feature (1)..(75): Homolog of NCBI NO: 40889581 NR Description: Chain A, Appbp1-Uba3-Nedd8, An E1-Ubiquitin-Like
  misc_feature (1)..(88): Homolog of NCBI NO: 15225241 NR Description: auxin-resistance protein, putative [Arabidopsis
  misc_feature (1)..(90): Homolog of NCBI NO: 15220442 NR Description: auxin-resistance protein AXR1 [Arabidopsis
  misc_feature (1)..(80): Homolog of NCBI NO: 29124137 NR Description: putative ubiquitin-activating enzyme (alternative
  misc_feature (1)..(80): Homolog of NCBI NO: 29124136 NR Description: putative ubiquitin-activating enzyme (alternative
MLNVDEENYKEAVDSSYKVSVTPGISNEIHQIIDDDSAEVNSSSEDFWILVAALKEFISKEGNGELPLEGTIPDMTSLTERRRGAPKVMINLPNQHACSLQRWFCFLFTEWRGLNIDNGFKRFRVLICVNYCNVMYAFLRTKIHGQTW

SEQ ID NO: 110444 - DNA, 1013 bp, Zea mays subsp. mays
  misc_feature (1)..(1013): Ceres Seq. ID no. 14305493
gaataacatgcttcatttctaggttcccttttccattttttctagcgccctctgcctccatccaccgacgcggcgcccgacgcccgacgccgcactcacctcgcctcgctgaatcgtccccgccagacgtcgggtgcccgacgctgcagcacggcagccgcacaaccgcagctcccaccgctgccgcgctcctccgcgcaacctcgatcgcgcacagaggcccattccgccgaggagtggcacgaggagagacgacaggtgcggggatggggtcagttttgctgccaacgctgcggctgaagagtgaggtcgacgccgccatccgcgacaccctcgataaggtcctcgttctccgatttggtcgcgccaccgacgccacttgcctccacctagatgacatcctggctaaatcttcttgggacatatccaagtttgctatggtagcattagttgacatggactctgaggagattcaagtttacattgactactttgacatcactttggttccagcaaccattttcttcttcaatgcccatcacatgaagatggattcagggacacctgaccacacaaaatggataggttcttttagcagcaaacaggactttatcgatgtagttgaggcaatattcagaggtgcgatgaaaggcaaactgatagtgtcttgcccccttcctcctgagaggataccaagattccagcttcttttcaaggatgtctgagaaaactccaactcatcacgtgcacacaatcagctacctagcccaaggtaactaggtaagtagaaaagctgaagcttctataagagaagcacaacagaggggacagtgcaaggcgtgttcgtgcttcgaagaaacctaattgtgctggaaacagccattttcattctcaagattgtttgcgcaaatctctgcactaatctaatgtttttcttgtccatattgcatgtttaagtttgtatttaatcacgttcatcaaatatgacgggtatagatttcttgtctggtgtt

SEQ ID NO: 110445 - protein, 240 aa, Zea mays subsp. mays
  misc_feature (1)..(240): Ceres Seq. ID no. 14305494
  misc_feature (93)..(227): Pfam Name: Mitosis protein DIM1 Pfam Description: Mitosis protein DIM1
  misc_feature (91)..(218): Homolog of NCBI NO: 34810352 NR Description: Chain A, Dominant Negative Human Hdim1 (Hdim1
  misc_feature (91)..(224): Homolog of NCBI NO: 15241574 NR Description: YLS8, Dim1 homolog [Arabidopsis thaliana]
  misc_feature (89)..(221): Homolog of NCBI NO: 32417926 NR Description: hypothetical protein [Neurospora crassa]
  misc_feature (91)..(224): Homolog of NCBI NO: 37535532 NR Description: putative thioredoxin-like U5 small
  misc_feature (89)..(222): Homolog of NCBI NO: 6325339 NR Description: Homolog of S. pombe dim1+; Dib1p [Saccharomyces
  misc_feature (89)..(222): Homolog of NCBI NO: 40744243 NR Description: conserved hypothetical protein [Aspergillus
  misc_feature (91)..(240): Homolog of NCBI NO: 28316734 NR Description: RIKEN cDNA D530025J19 gene [Mus musculus]
  misc_feature (91)..(240): Homolog of NCBI NO: 27659170 NR Description: similar to hypothetical protein FLJ20511
  misc_feature (91)..(240): Homolog of NCBI NO: 8923475 NR Description: hypothetical protein FLJ20511 [Homo sapiens]
  misc_feature (91)..(240): Homolog of NCBI NO: 15230169 NR Description: hypothetical protein [Arabidopsis thaliana]
ITCFISRFPFPFFLAPSASIHRRGARRPTPHSPRLAESSPPDVGCPTLQHGSRTTAAPTAAALLRATSIAHRGPFRRGVARGETTGAGMGSVLLPTLRLKSEVDAAIRDTLDKVLVLRFGRATDATCLHLDDILAKSSWDISKFAMVALVDMDSEEIQVYIDYFDITLVPATIFFFNAHHMKMDSGTPDHTKWIGSFSSKQDFIDVVEAIFRGAMKGKLIVSCPLPPERIPRFQLLFKDV

SEQ ID NO: 110446 - protein, 152 aa, Zea mays subsp. mays
  misc_feature (1)..(152): Ceres Seq. ID no. 14305495
  misc_feature (5)..(139): Pfam Name: Mitosis protein DIM1 Pfam Description: Mitosis protein DIM1
  misc_feature (3)..(130): Homolog of NCBI NO: 34810352 NR Description: Chain A, Dominant Negative Human Hdim1 (Hdim1
  misc_feature (3)..(136): Homolog of NCBI NO: 15241574 NR Description: YLS8, Dim1 homolog [Arabidopsis thaliana]
  misc_feature (1)..(133): Homolog of NCBI NO: 32417926 NR Description: hypothetical protein [Neurospora crassa]
  misc_feature (3)..(136): Homolog of NCBI NO: 37535532 NR Description: putative thioredoxin-like U5 small
  misc_feature (1)..(134): Homolog of NCBI NO: 6325339 NR Description: Homolog of S. pombe dim1+; Dib1p [Saccharomyces
  misc_feature (1)..(134): Homolog of NCBI NO: 40744243 NR Description: conserved hypothetical protein [Aspergillus
  misc_feature (3)..(152): Homolog of NCBI NO: 28316734 NR Description: RIKEN cDNA D530025J19 gene [Mus musculus]
  misc_feature (3)..(152): Homolog of NCBI NO: 27659170 NR Description: similar to hypothetical protein FLJ20511
  misc_feature (3)..(152): Homolog of NCBI NO: 8923475 NR Description: hypothetical protein FLJ20511 [Homo sapiens]
  misc_feature (3)..(152): Homolog of NCBI NO: 15230169 NR Description: hypothetical protein [Arabidopsis thaliana]
MGSVLLPTLRLKSEVDAAIRDTLDKVLVLRFGRATDATCLHLDDILAKSSWDISKFAMVALVDMDSEEIQVYIDYFDITLVPATIFFFNAHHMKMDSGTPDHTKWIGSFSSKQDFIDVVEAIFRGAMKGKLIVSCPLPPERIPRFQLLFKDV

SEQ ID NO: 110447 - DNA, 1059 bp, Zea mays subsp. mays
  misc_feature (1)..(1059): Ceres Seq. ID no. 12415963
  misc_feature: MA Experiment ID: 108504 Result: Up-regulated in Transcription
  misc_feature: MA Experiment 108504 PARAMETER Experiment Name: Zm_Drought_P Parameter: Age (day) Value: 8
  misc_feature: MA Experiment 108504 PARAMETER Experiment Name: Zm_Drought_P Parameter: Organism Value: Zea mays
  misc_feature: MA Experiment 108504 PARAMETER Experiment Name: Zm_Drought_P Parameter: Plant Line Value: 35A19
  misc_feature: MA Experiment 108504 PARAMETER Experiment Name: Zm_Drought_P Parameter: Timepoint (hr) Value: 12
  misc_feature: MA Experiment 108504 PARAMETER Experiment Name: Zm_Drought_P Parameter: Tissue Value: Aerial
  misc_feature: MA Experiment 108504 PARAMETER Experiment Name: Zm_Drought_P Parameter: Treatment Value: Drought vs. No Drought
  misc_feature: MA Experiment ID: 108522 Result: Down-regulated in Transcription
  misc_feature: MA Experiment 108522 PARAMETER Experiment Name: Zm_42deg_Heat_P Parameter: Age (day) Value: 8
  misc_feature: MA Experiment 108522 PARAMETER Experiment Name: Zm_42deg_Heat_P Parameter: Organism Value: Zea mays
  misc_feature: MA Experiment 108522 PARAMETER Experiment Name: Zm_42deg_Heat_P Parameter: Plant Line Value: 35A19
  misc_feature: MA Experiment 108522 PARAMETER Experiment Name: Zm_42deg_Heat_P Parameter: Temperature (deg C) Value: 42 vs. 22
  misc_feature: MA Experiment 108522 PARAMETER Experiment Name: Zm_42deg_Heat_P Parameter: Timepoint (hr) Value: 1
  misc_feature: MA Experiment 108522 PARAMETER Experiment Name: Zm_42deg_Heat_P Parameter: Tissue Value: Aerial
  misc_feature: MA Experiment ID: 108527 Result: Up-regulated in Transcription
  misc_feature: MA Experiment 108527 PARAMETER Experiment Name: Zm_5mM_NO_P Parameter: Age (day) Value: 8
  misc_feature: MA Experiment 108527 PARAMETER Experiment Name: Zm_5mM_NO_P Parameter: Organism Value: Zea mays
  misc_feature: MA Experiment 108527 PARAMETER Experiment Name: Zm_5mM_NO_P Parameter: Plant Line Value: 35A19
  misc_feature: MA Experiment 108527 PARAMETER Experiment Name: Zm_5mM_NO_P Parameter: Timepoint (hr) Value: 6
  misc_feature: MA Experiment 108527 PARAMETER Experiment Name: Zm_5mM_NO_P Parameter: Tissue Value: Aerial
  misc_feature: MA Experiment 108527 PARAMETER Experiment Name: Zm_5mM_NO_P Parameter: Treatment Value: 5mM NO vs. No Treatment
  misc_feature: MA Experiment ID: 108543 Result: Up-regulated in Transcription
  misc_feature: MA Experiment ID: 20000492 Result: Down-regulated in Transcription
  misc_feature: MA Experiment 20000492 PARAMETER Experiment Name: Zm_Hybrid_Seed_Dev_P Parameter: DAP Value: 12
  misc_feature: MA Experiment 20000492 PARAMETER Experiment Name: Zm_Hybrid_Seed_Dev_P Parameter: Organism Value: Zea mays
  misc_feature: MA Experiment 20000492 PARAMETER Experiment Name: Zm_Hybrid_Seed_Dev_P Parameter: Plant Line Value: 35A19
  misc_feature: MA Experiment 20000492 PARAMETER Experiment Name: Zm_Hybrid_Seed_Dev_P Parameter: Tissue Value: Fert Kernel vs. Unfert Floret
  misc_feature: MA Experiment ID: 20000534 Result: Down-regulated in Transcription
  misc_feature: MA Experiment 20000534 PARAMETER Experiment Name: Zm_Hybrid_Pollen_P Parameter: Age (day) Value: 8
  misc_feature: MA Experiment 20000534 PARAMETER Experiment Name: Zm_Hybrid_Pollen_P Parameter: Organism Value: Zea mays
  misc_feature: MA Experiment 20000534 PARAMETER Experiment Name: Zm_Hybrid_Pollen_P Parameter: Plant Line Value: 35A19
  misc_feature: MA Experiment 20000534 PARAMETER Experiment Name: Zm_Hybrid_Pollen_P Parameter: Tissue Value: Pollen vs. Aerial
  misc_feature: MA Experiment ID: 20000626 Result: Down-regulated in Transcription
  misc_feature: MA Experiment 20000626 PARAMETER Experiment Name: Zm_Herbicide-Treatments_P Parameter: Timepoint (hr) Value: 12
  misc_feature: MA Experiment 20000626 PARAMETER Experiment Name: Zm_Herbicide-Treatments_P Parameter: Tissue Value: Aerial
  misc_feature: MA Experiment 20000626 PARAMETER Experiment Name: Zm_Herbicide-Treatments_P Parameter: Treatment Value: Roundup vs. No Treatment
cacgagaccattacctagaacatcctaatcgaaaagttttgacgtgtgttcgatcttccggatgcgccggcccactgcaggaatggcggcgaccggaggagcgatggggagctacacgcaggcgggcagcgacgccgcgctgggccccggccacggccacggccacgcgcacgtcagctcgcagtggagcttctccaggcaggacctgccgcagatctcggagatggggatgataccggccgacatcgggggagagcatcgtgggcgccggcgggtgcaacagctccagcgacgccgcgcagtcctcctcctacctctccaggaccttctccgtcggctcctgggacgacaccaactccatcatgttctcgtccgcccccagcaagaagcccaaggtggaccccgccgacgacatggtcgccagcttcagcaccattgacccgcagttcggcctttccaactcgtccctggagctgcccggcatggacgactacctgcagctgcagcaggactccgtcgcctgcagagtgcgtgcgaagcgtggctgcgcgactcaccctcggagcattgccgagagggaaagaaggacgaggatcagcaagaggctgaagaagctgcaagacctcgtgcccaacatggacaagcaaacgaatacgtcggacatgttggaccttgctgtggattacatcaaagagctcaaggaccaagtcgagaagctaaaacacgaccaagcaaactgttgttgcctaggcaacaagagctgctgctgatgctggagaagcagacggaggagggtttttacgccgtaacaatgtaacatgtggagcggcttccatgactcagcttcctcttttcttggttgttccacggactagcgacccggccggtgccaacggcttgaagactaggagataacaagtaggacgatgttgtaatttagctaccacgacgcggtggctctggcttgcgtgtaaagaagtcctccctttcaacgcgactgggattgttgttgctggtaaaattgttgtaggaatatcatctgcgctccatttttcatcc

SEQ ID NO: 110448 - protein, 135 aa, Zea mays subsp. mays
  misc_feature (1)..(135): Ceres Seq. ID no. 12415964
  misc_feature (65)..(113): Pfam Name: Helix-loop-helix DNA-binding domain Pfam Description: Helix-loop-helix DNA-binding domain
  misc_feature (1)..(129): Homolog of NCBI NO: 15233768 NR Description: putative protein; protein id: At4g09180.1
  misc_feature (1)..(128): Homolog of NCBI NO: 15219606 NR Description: bHLH protein
  misc_feature (36)..(128): Homolog of NCBI NO: 18403381 NR Description: expressed protein
  misc_feature (1)..(117): Homolog of NCBI NO: 15224227 NR Description: bHLH protein; protein id: At2g43140.1
  misc_feature (32)..(132): Homolog of NCBI NO: 15227914 NR Description: bHLH protein; protein id: At2g42280.1
  misc_feature (28)..(128): Homolog of NCBI NO: 19401700 NR Description: transcription factor RAU1 [Oryza sativa]
  misc_feature (1)..(128): Homolog of NCBI NO: 21554238 NR Description: Contains similarity to bHLH transcription factor
  misc_feature (1)..(128): Homolog of NCBI NO: 18390573 NR Description: bHLH protein; protein id: At1g05805.1, supported
  misc_feature (1)..(128): Homolog of NCBI NO: 38345229 NR Description: OSJNBa0084K20.3 [Oryza sativa (japonica
  misc_feature (1)..(134): Homolog of NCBI NO: 34907702 NR Description: P0035F12.11 [Oryza sativa (japonica
MFSSAPSKKPKVDPADDMVASFSTIDPQFGLSNSSLELPGMDDYLQLQQDSVACRVRAKRGCATHPRSIAERERRTRISKRLKKLQDLVPNMDKQTNTSDMLDLAVDYIKELKDQVEKLKHDQANCCCLGNKSCC

SEQ ID NO: 110449 - protein, 125 aa, Zea mays subsp. mays
  misc_feature (1)..(125): Ceres Seq. ID no. 12415965
  misc_feature (8)..(63): Homolog of NCBI NO: 34907702 NR Description: P0035F12.11 [Oryza sativa (japonica
MRRPTAGMAATGGAMGSYTQAGSDAALGPGHGHGHAHVSSQWSFSRQDLPQISEMGMIPADIGGEHRGRRRVQQLQRRRAVLLLPLQDLLRRLLGRHQLHHVLVRPQQEAQGGPRRRHGRQLQHH

SEQ ID NO: 110450 - protein, 118 aa, Zea mays subsp. mays
  misc_feature (1)..(118): Ceres Seq. ID no. 12415966
  misc_feature (48)..(96): Pfam Name: Helix-loop-helix DNA-binding domain Pfam Description: Helix-loop-helix DNA-binding domain
  misc_feature (11)..(111): Homolog of NCBI NO: 19401700 NR Description: transcription factor RAU1 [Oryza sativa]
  misc_feature (1)..(111): Homolog of NCBI NO: 21554238 NR Description: Contains similarity to bHLH transcription factor
  misc_feature (1)..(111): Homolog of NCBI NO: 18390573 NR Description: bHLH protein; protein id: At1g05805.1, supported
  misc_feature (1)..(111): Homolog of NCBI NO: 15219606 NR Description: bHLH protein
  misc_feature (1)..(100): Homolog of NCBI NO: 15224227 NR Description: bHLH protein; protein id: At2g43140.1
  misc_feature (15)..(115): Homolog of NCBI NO: 15227914 NR Description: bHLH protein; protein id: At2g42280.1
  misc_feature (19)..(111): Homolog of NCBI NO: 18403381 NR Description: expressed protein
  misc_feature (1)..(112): Homolog of NCBI NO: 15233768 NR Description: putative protein; protein id: At4g09180.1
  misc_feature (1)..(111): Homolog of NCBI NO: 38345229 NR Description: OSJNBa0084K20.3 [Oryza sativa (japonica
  misc_feature (1)..(117): Homolog of NCBI NO: 34907702 NR Description: P0035F12.11 [Oryza sativa (japonica
MVASFSTIDPQFGLSNSSLELPGMDDYLQLQQDSVACRVRAKRGCATHPRSIAERERRTRISKRLKKLQDLVPNMDKQTNTSDMLDLAVDYIKELKDQVEKLKHDQANCCCLGNKSCC

SEQ ID NO: 110451 - DNA, 1264 bp, Zea mays subsp. mays
  misc_feature (1)..(1264): Ceres Seq. ID no. 15180793
aagtcgttcggctcggcgcactgggtatagcagcactgccgcggttgattttcgagctgtggtgctggagaagtgaagagctcatgctgttctcccgttccccggctgccacaaatcagccactcgccccttcccgccggacgctgctcctatcgccatgcccgcgagccggcgcgaccccggcaccggtggccgacgctgcgctcctaccgggcgggctgcgtgcggagtcgctgccgcggcacgtggctgtggtcatggacgggaactcgcggtgggcgcgcgcgcgcgggctgccgtcagcggccgggcacgaggccgggcgccgcgcgctggaggaggtggtgcggctctcccgcgcctggggcgtccgcacgctcaccgccttcgccttctcccacgagaactggagccggcccaaggtggaggtggaattcttgatggggcagtttgagcgagcgatccgcgaaagcgtagctgaatttttgagagaaggaattcggctacgcgtaatcggcgactcctcaaggctgccggtttctcttcagaggaccgcgagagaagccgaggaggccacgcggaacaactcgcagcttgacctgacactggcaatcagctacagcgggcggagggacatagtgcaggcgtgccggaccctagcccagaaggtgcgcgacaagctgctcgagccggaggacatcgacgagtcgctgttcgccggtgagctcgagacgagccacgccaacggcaacgagctcccttatcccgacctggtcatcagaaccagcggcgaactgcggctgagcaacttcctgctgtggcagtcggcgtacgcggagctcttcttcacggacacgctgtggcccgacttcggagaggccgattacctccaagcgctggtctcgttccagagcagagacaggcggttcggcgtaaggaaattgtagcggcgcagaggcagcgccatgtggaaggcgtgcttcaatagcaactgtcaatagcaggaaagcgtcggtcaataaatcgtaacgcgagaccaagatgggtagatggagtattaaagtggtggtttgcatgcagcggtgagagtgagagtaatgtagcatatcaactcaagatggtaggtactacagctagagttcaagctcacagacagcagtcgtcgttgatgatggtggctagcagctatctgccgatggccacagatttattgttaaaaaccctttgctattgcaagagtacgtcaaatgccctttattaagtc

SEQ ID NO: 110452 - protein, 314 aa, Zea mays subsp. mays
  misc_feature (1)..(314): Ceres Seq. ID no. 15180794
  misc_feature (85)..(311): Pfam Name: Putative undecaprenyl diphosphate synthase Pfam Description: Putative undecaprenyl diphosphate synthase
  misc_feature (78)..(312): Homolog of NCBI NO: 8843800 NR Description: cis-prenyltransferase homolog-like
  misc_feature (73)..(312): Homolog of NCBI NO: 18424144 NR Description: dehydrodolichyl diphosphate synthase
  misc_feature (69)..(310): Homolog of NCBI NO: 23128548 NR Description: hypothetical protein [Nostoc punctiforme]
  misc_feature (69)..(310): Homolog of NCBI NO: 37519677 NR Description: undecaprenyl pyrophosphate synthetase
  misc_feature (69)..(310): Homolog of NCBI NO: 23040431 NR Description: hypothetical protein [Trichodesmium erythraeum
  misc_feature (69)..(310): Homolog of NCBI NO: 22299306 NR Description: undecaprenyl pyrophosphate synthetase
  misc_feature (69)..(310): Homolog of NCBI NO: 23125792 NR Description: hypothetical protein [Nostoc punctiforme]
  misc_feature (69)..(310): Homolog of NCBI NO: 17230487 NR Description: undecaprenyl pyrophosphate synthetase [Nostoc sp.
  misc_feature (69)..(313): Homolog of NCBI NO: 15237748 NR Description: dehydrodolichyl diphosphate synthase
  misc_feature (28)..(314): Homolog of NCBI NO: 34908428 NR Description: putative undecaprenyl pyrophosphate synthetase
VVRLGALGIAALPRLIFELWCWRSEELMLFSRSPAATNQPLAPSRRTLLLSPCPRAGATPAPVADAALLPGGLRAESLPRHVAVVMDGNSRWARARGLPSAAGHEAGRRALEEVVRLSRAWGVRTLTAFAFSHENWSRPKVEVEFLMGQFERAIRESVAEFLREGIRLRVIGDSSRLPVSLQRTAREAEEATRNNSQLDLTLAISYSGRRDIVQACRTLAQKVRDKLLEPEDIDESLFAGELETSHANGNELPYPDLVIRTSGELRLSNFLLWQSAYAELFFTDTLWPDFGEADYLQALVSFQSRDRRFGVRKL

SEQ ID NO: 110453 - protein, 287 aa, Zea mays subsp. mays
  misc_feature (1)..(287): Ceres Seq. ID no. 15180795
  misc_feature (58)..(284): Pfam Name: Putative undecaprenyl diphosphate synthase Pfam Description: Putative undecaprenyl diphosphate synthase
  misc_feature (51)..(285): Homolog of NCBI NO: 8843800 NR Description: cis-prenyltransferase homolog-like
  misc_feature (46)..(285): Homolog of NCBI NO: 18424144 NR Description: dehydrodolichyl diphosphate synthase
  misc_feature (42)..(283): Homolog of NCBI NO: 23128548 NR Description: hypothetical protein [Nostoc punctiforme]
  misc_feature (42)..(283): Homolog of NCBI NO: 37519677 NR Description: undecaprenyl pyrophosphate synthetase
  misc_feature (42)..(283): Homolog of NCBI NO: 23040431 NR Description: hypothetical protein [Trichodesmium erythraeum
  misc_feature (42)..(283): Homolog of NCBI NO: 22299306 NR Description: undecaprenyl pyrophosphate synthetase
  misc_feature (42)..(283): Homolog of NCBI NO: 23125792 NR Description: hypothetical protein [Nostoc punctiforme]
  misc_feature (42)..(283): Homolog of NCBI NO: 17230487 NR Description: undecaprenyl pyrophosphate synthetase [Nostoc sp.
  misc_feature (42)..(286): Homolog of NCBI NO: 15237748 NR Description: dehydrodolichyl diphosphate synthase
  misc_feature (1)..(287): Homolog of NCBI NO: 34908428 NR Description: putative undecaprenyl pyrophosphate synthetase
MLFSRSPAATNQPLAPSRRTLLLSPCPRAGATPAPVADAALLPGGLRAESLPRHVAVVMDGNSRWARARGLPSAAGHEAGRRALEEVVRLSRAWGVRTLTAFAFSHENWSRPKVEVEFLMGQFERAIRESVAEFLREGIRLRVIGDSSRLPVSLQRTAREAEEATRNNSQLDLTLAISYSGRRDIVQACRTLAQKVRDKLLEPEDIDESLFAGELETSHANGNELPYPDLVIRTSGELRLSNFLLWQSAYAELFFTDTLWPDFGEADYLQALVSFQSRDRRFGVRKL

SEQ ID NO: 110454 - protein, 229 aa, Zea mays subsp. mays
  misc_feature (1)..(229): Ceres Seq. ID no. 15180796
  misc_feature (1)..(226): Pfam Name: Putative undecaprenyl diphosphate synthase Pfam Description: Putative undecaprenyl diphosphate synthase
  misc_feature (1)..(227): Homolog of NCBI NO: 8843800 NR Description: cis-prenyltransferase homolog-like
  misc_feature (1)..(227): Homolog of NCBI NO: 18424144 NR Description: dehydrodolichyl diphosphate synthase
  misc_feature (1)..(225): Homolog of NCBI NO: 23128548 NR Description: hypothetical protein [Nostoc punctiforme]
  misc_feature (1)..(225): Homolog of NCBI NO: 37519677 NR Description: undecaprenyl pyrophosphate synthetase
  misc_feature (1)..(225): Homolog of NCBI NO: 23040431 NR Description: hypothetical protein [Trichodesmium erythraeum
  misc_feature (1)..(225): Homolog of NCBI NO: 22299306 NR Description: undecaprenyl pyrophosphate synthetase
  misc_feature (1)..(225): Homolog of NCBI NO: 23125792 NR Description: hypothetical protein [Nostoc punctiforme]
  misc_feature (1)..(225): Homolog of NCBI NO: 17230487 NR Description: undecaprenyl pyrophosphate synthetase [Nostoc sp.
  misc_feature (1)..(228): Homolog of NCBI NO: 15237748 NR Description: dehydrodolichyl diphosphate synthase
  misc_feature (1)..(229): Homolog of NCBI NO: 34908428 NR Description: putative undecaprenyl pyrophosphate synthetase
MDGNSRWARARGLPSAAGHEAGRRALEEVVRLSRAWGVRTLTAFAFSHENWSRPKVEVEFLMGQFERAIRESVAEFLREGIRLRVIGDSSRLPVSLQRTAREAEEATRNNSQLDLTLAISYSGRRDIVQACRTLAQKVRDKLLEPEDIDESLFAGELETSHANGNELPYPDLVIRTSGELRLSNFLLWQSAYAELFFTDTLWPDFGEADYLQALVSFQSRDRRFGVRKL

SEQ ID NO: 110455 - DNA, 898 bp, Zea mays subsp. mays
  misc_feature (1)..(898): Ceres Seq. ID no. 14312621
  misc_feature: MA Experiment ID: 108504 Result: Down-regulated in Transcription
  misc_feature: MA Experiment 108504 PARAMETER Experiment Name: Zm_Drought_P Parameter: Age (day) Value: 8
  misc_feature: MA Experiment 108504 PARAMETER Experiment Name: Zm_Drought_P Parameter: Organism Value: Zea mays
  misc_feature: MA Experiment 108504 PARAMETER Experiment Name: Zm_Drought_P Parameter: Plant Line Value: 35A19
  misc_feature: MA Experiment 108504 PARAMETER Experiment Name: Zm_Drought_P Parameter: Timepoint (hr) Value: 12
  misc_feature: MA Experiment 108504 PARAMETER Experiment Name: Zm_Drought_P Parameter: Tissue Value: Aerial
  misc_feature: MA Experiment 108504 PARAMETER Experiment Name: Zm_Drought_P Parameter: Treatment Value: Drought vs. No Drought
  misc_feature: MA Experiment ID: 108528 Result: Up-regulated in Transcription
  misc_feature: MA Experiment 108528 PARAMETER Experiment Name: Zm_Imbibed_Seeds_P Parameter: Age (day) Value: 5 vs. 2
  misc_feature: MA Experiment 108528 PARAMETER Experiment Name: Zm_Imbibed_Seeds_P Parameter: Organism Value: Zea mays
  misc_feature: MA Experiment 108528 PARAMETER Experiment Name: Zm_Imbibed_Seeds_P Parameter: Plant Line Value: 35A19
  misc_feature: MA Experiment 108528 PARAMETER Experiment Name: Zm_Imbibed_Seeds_P Parameter: Tissue Value: Aerial vs. Embryo
  misc_feature: MA Experiment ID: 108530 Result: Up-regulated in Transcription
  misc_feature: MA Experiment 108530 PARAMETER Experiment Name: Zm_Imbibed_Seeds_P Parameter: Age (day) Value: 6 vs. 2
  misc_feature: MA Experiment 108530 PARAMETER Experiment Name: Zm_Imbibed_Seeds_P Parameter: Organism Value: Zea mays
  misc_feature: MA Experiment 108530 PARAMETER Experiment Name: Zm_Imbibed_Seeds_P Parameter: Plant Line Value: 35A19
  misc_feature: MA Experiment 108530 PARAMETER Experiment Name: Zm_Imbibed_Seeds_P Parameter: Tissue Value: Aerial vs. Embryo
  misc_feature: MA Experiment ID: 108534 Result: Up-regulated in Transcription
  misc_feature: MA Experiment 108534 PARAMETER Experiment Name: Zm_4deg_Cold_P Parameter: Age (hr) Value: 8
  misc_feature: MA Experiment 108534 PARAMETER Experiment Name: Zm_4deg_Cold_P Parameter: Organism Value: Zea mays
  misc_feature: MA Experiment 108534 PARAMETER Experiment Name: Zm_4deg_Cold_P Parameter: Plant Line Value: 35A19
  misc_feature: MA Experiment 108534 PARAMETER Experiment Name: Zm_4deg_Cold_P Parameter: Temperature (deg C) Value: 4 vs. 22
  misc_feature: MA Experiment 108534 PARAMETER Experiment Name: Zm_4deg_Cold_P Parameter: Timepoint (hr) Value: 6
  misc_feature: MA Experiment 108534 PARAMETER Experiment Name: Zm_4deg_Cold_P Parameter: Tissue Value: Aerial
  misc_feature: MA Experiment ID: 108545 Result: Up-regulated in Transcription
  misc_feature: MA Experiment 108545 PARAMETER Experiment Name: Zm_Imbibed_Seeds_P Parameter: Age (day) Value: 3 vs. 2
  misc_feature: MA Experiment 108545 PARAMETER Experiment Name: Zm_Imbibed_Seeds_P Parameter: Organism Value: Zea mays
  misc_feature: MA Experiment 108545 PARAMETER Experiment Name: Zm_Imbibed_Seeds_P Parameter: Plant Line Value: 35A19
  misc_feature: MA Experiment 108545 PARAMETER Experiment Name: Zm_Imbibed_Seeds_P Parameter: Tissue Value: Aerial vs. Embryo
  misc_feature: MA Experiment ID: 108547 Result: Up-regulated in Transcription
  misc_feature: MA Experiment 108547 PARAMETER Experiment Name: Zm_Imbibed_Seeds_P Parameter: Age (day) Value: 4 vs. 2
  misc_feature: MA Experiment 108547 PARAMETER Experiment Name: Zm_Imbibed_Seeds_P Parameter: Organism Value: Zea mays
  misc_feature: MA Experiment 108547 PARAMETER Experiment Name: Zm_Imbibed_Seeds_P Parameter: Plant Line Value: 35A19
  misc_feature: MA Experiment 108547 PARAMETER Experiment Name: Zm_Imbibed_Seeds_P Parameter: Tissue Value: Aerial vs. Embryo
  misc_feature: MA Experiment ID: 108556 Result: Down-regulated in Transcription
  misc_feature: MA Experiment 108556 PARAMETER Experiment Name: Zm_Drought_P Parameter: Age (day) Value: 9
  misc_feature: MA Experiment 108556 PARAMETER Experiment Name: Zm_Drought_P Parameter: Organism Value: Zea mays
  misc_feature: MA Experiment 108556 PARAMETER Experiment Name: Zm_Drought_P Parameter: Plant Line Value: 35A19
  misc_feature: MA Experiment 108556 PARAMETER Experiment Name: Zm_Drought_P Parameter: Timepoint (hr) Value: 24
  misc_feature: MA Experiment 108556 PARAMETER Experiment Name: Zm_Drought_P Parameter: Tissue Value: Aerial
  misc_feature: MA Experiment 108556 PARAMETER Experiment Name: Zm_Drought_P Parameter: Treatment Value: Drought vs. No Drought
  misc_feature: MA Experiment ID: 108687 Result: Down-regulated in Transcription
  misc_feature: MA Experiment 108687 PARAMETER Experiment Name: Zm_Embryos-Flowers__P Parameter: Tissue Value: Embryo vs. Aerial+
  misc_feature: MA Experiment ID: 20000479 Result: Down-regulated in Transcription
  misc_feature: MA Experiment 20000479 PARAMETER Experiment Name: Zm_Drought_P Parameter: Age (day) Value: 10
  misc_feature: MA Experiment 20000479 PARAMETER Experiment Name: Zm_Drought_P Parameter: Organism Value: Zea mays
  misc_feature: MA Experiment 20000479 PARAMETER Experiment Name: Zm_Drought_P Parameter: Plant Line Value: 35A19
  misc_feature: MA Experiment 20000479 PARAMETER Experiment Name: Zm_Drought_P Parameter: Timepoint (hr) Value: 48
  misc_feature: MA Experiment 20000479 PARAMETER Experiment Name: Zm_Drought_P Parameter: Tissue Value: Aerial
  misc_feature: MA Experiment 20000479 PARAMETER Experiment Name: Zm_Drought_P Parameter: Treatment Value: Drought vs. No Drought
  misc_feature: MA Experiment ID: 20000480 Result: Down-regulated in Transcription
  misc_feature: MA Experiment 20000480 PARAMETER Experiment Name: Zm_Drought_P Parameter: Age (day) Value: 11
  misc_feature: MA Experiment 20000480 PARAMETER Experiment Name: Zm_Drought_P Parameter: Organism Value: Zea mays
  misc_feature: MA Experiment 20000480 PARAMETER Experiment Name: Zm_Drought_P Parameter: Plant Line Value: 35A19
  misc_feature: MA Experiment 20000480 PARAMETER Experiment Name: Zm_Drought_P Parameter: Timepoint (hr) Value: 72
  misc_feature: MA Experiment 20000480 PARAMETER Experiment Name: Zm_Drought_P Parameter: Tissue Value: Aerial
  misc_feature: MA Experiment 20000480 PARAMETER Experiment Name: Zm_Drought_P Parameter: Treatment Value: Drought vs. No Drought
acttggacataacgcaacgcccgccgcgaaaagcactaccggcctgtgctgctgtggtagttagtttcaagcagcaatggaagccgtggtggccacgacgacaacgagggtgtccttccctctgctgcccaccgcggggaggcccctgctcccgccggtcctggcgcggccccgccgcggcttcgcctccgtctccgccacctccacatccggcgcaggcggcggcggggggcgctcatctgcaggcggctgcggcggcgacggtggaggggacgactccggtgccggcgcagccgcggccgccgcggctgtggcggctctgggtgagtccgagcagcaggaggacggcgactctgacgcaatcgtgctccatgtcgggggaatgacgtgcggcggatgtgcggacaaggtgaagcgaattctggagagccagcctgaggttgctgcagctacagttgatgtcgaaaaggccaccgctattgtgtggacgacacctgaagcgaaggctaccaaagactggcaaaaacaattggccgagaaacttgccaaccatctcacctcttgcgggttccagtctcatctgcaagacgaaggcgaggctgaacaaactgatgcttaacctcagcagtgcattacgtatgtatgactatgagtggccaggaagttttagcatggagggtccttgcatgaagcaatgtctcccacttcagaagttgttacatgcgggtctacgatgtacttcttttatttatttgtcgcagtttagttcaaaaatgaactcgcaggaagtttttatgccgttatattgttgttaaggacttgtggttgaacttcgaaacagctgaactgttgagtatcgaaggcgaactagcgataaaataaaatgatgaagtatcgc

SEQ ID NO: 110456 - protein, 180 aa, Zea mays subsp. mays
  misc_feature (1)..(180): Ceres Seq. ID no. 14312622
  misc_feature (17)..(171): Homolog of NCBI NO: 2668492 NR Description: metal-transporting P-type ATPase [Arabidopsis
  misc_feature (27)..(171): Homolog of NCBI NO: 3549654 NR Description: metal-transporting P-type ATPase (fragment)
  misc_feature (17)..(171): Homolog of NCBI NO: 12643855 NR Description: Potential copper-transporting ATPase PAA1
  misc_feature (17)..(167): Homolog of NCBI NO: 18418230 NR Description: metal-transporting P-type ATPase (PAA1), putative
  misc_feature (1)..(171): Homolog of NCBI NO: 33146620 NR Description: metal-transporting P-type ATPase-like protein
MEAVVATTTTRVSFPLLPTAGRPLLPPVLARPRRGFASVSATSTSGAGGGGGRSSAGGCGGDGGGDDSGAGAAAAAAAVAALGESEQQEDGDSDAIVLHVGGMTCGGCADKVKRILESQPEVAAATVDVEKATAIVWTTPEAKATKDWQKQLAEKLANHLTSCGFQSHLQDEGEAEQTDA

SEQ ID NO: 110457 - protein, 127 aa, Zea mays subsp. mays
  misc_feature (1)..(127): Ceres Seq. ID no. 14312623
LDITQRPPRKALPACAAVVVSFKQQWKPWWPRRQRGCPSLCCPPRGGPCSRRSWRGPAAASPPSPPPPHPAQAAAGGAHLQAAAAATVEGTTPVPAQPRPPRLWRLWVSPSSRRTATLTQSCSMSGE

SEQ ID NO: 110458 - protein, 118 aa, Zea mays subsp. mays
  misc_feature (1)..(118): Ceres Seq. ID no. 14312624
MSKRPPLLCGRHLKRRLPKTGKNNWPRNLPTISPLAGSSLICKTKARLNKLMLNLSSALRMYDYEWPGSFSMEGPCMKQCLPLQKLLHAGLRCTSFIYLSQFSSKMNSQEVFMPLYCC

SEQ ID NO: 110459 - DNA, 1017 bp, Zea mays subsp. mays
  misc_feature (1)..(1017): Ceres Seq. ID no. 14312605
  misc_feature: MA Experiment ID: 108535 Result: Up-regulated in Transcription
  misc_feature: MA Experiment 108535 PARAMETER Experiment Name: Zm_Meristem_P Parameter: Age (day) Value: 8
  misc_feature: MA Experiment 108535 PARAMETER Experiment Name: Zm_Meristem_P Parameter: Organism Value: Zea mays
  misc_feature: MA Experiment 108535 PARAMETER Experiment Name: Zm_Meristem_P Parameter: Plant Line Value: 35A19
  misc_feature: MA Experiment 108535 PARAMETER Experiment Name: Zm_Meristem_P Parameter: Tissue Value: Root Meristem vs. Above Root Meristem
  misc_feature: MA Experiment ID: 108544 Result: Down-regulated in Transcription
  misc_feature: MA Experiment ID: 20000492 Result: Up-regulated in Transcription
  misc_feature: MA Experiment 20000492 PARAMETER Experiment Name: Zm_Hybrid_Seed_Dev_P Parameter: DAP Value: 12
  misc_feature: MA Experiment 20000492 PARAMETER Experiment Name: Zm_Hybrid_Seed_Dev_P Parameter: Organism Value: Zea mays
  misc_feature: MA Experiment 20000492 PARAMETER Experiment Name: Zm_Hybrid_Seed_Dev_P Parameter: Plant Line Value: 35A19
  misc_feature: MA Experiment 20000492 PARAMETER Experiment Name: Zm_Hybrid_Seed_Dev_P Parameter: Tissue Value: Fert Kernel vs. Unfert Floret
taaattaaaggagcacttctcatcgtacgggaaggtggttgagcatcagattatgcttgatcatagcactggacgttcacggggctttggatttgtcacatttgaaagcgaggatgctgttgaaagggttatgtcagaggggagaatgcatgatcttggagggaagcaggttgaaattaagaaagctgaaccaaagaaacctggcgctggtgattcaagctcaaacggaagacacagccgtggtggtggtcatcgtgattcataccgtggtagtggtgtttctgtgaacagcggtggcggctatggatatggtggtggttaccgatcagctgctgcagcatattatggcagcacagcatatggtgcctatggcagagggtatggatatggtgctacttctggctatggctcaggttatggctctgcatatggtggctccatgtatggaggtccatatggtgcctacgggtcatatggtggtgcctatggaggtggtgcgtatggtgctccaggagggtatggtgggggaggatatggcagctacggtggtgctggaggcatgggtgggggtggcagcgctggtggtcggggctccagcagataccacccttatgggaaatgatcatccattctgtgtttctctaggatctgataataaagccatacctttcctcgtttctgctactgagaaaatggaacatcccattcgtcttgttgaatcagcggcatctggacatttttttccttggaacttgcattgcacatcaaagattctatagtctatagtcgctgaaccctgaaccgcccccaccccgagctttctgtagaagctgcagctgaaattctcgtagtctggcatgagccttagaatgcccttgaaactattatctttgtggttaacattatggtgtcatggaacagatgtacgttgttgtaacattcactcactgatcagagacttgctatctctgcatatgtggagagaagctttgcaaatgattgactgatactattaat

SEQ ID NO: 110460 - protein, 206 aa, Zea mays subsp. mays
  misc_feature (1)..(206): Ceres Seq. ID no. 14312606
  misc_feature (1)..(59): Pfam Name: RNA recognition motif. (a.k.a. RRM, RBD, or RNP domain) Pfam Description: RNA recognition motif. (a.k.a. RRM, RBD, or RNP
  misc_feature (1)..(205): Homolog of NCBI NO: 15226106 NR Description: heterogeneous nuclear ribonucleoprotein (hnRNP),
  misc_feature (2)..(205): Homolog of NCBI NO: 33416839 NR Description: Unknown (protein for MGC:66127) [Danio rerio]
  misc_feature (67)..(198): Homolog of NCBI NO: 15242719 NR Description: RNA recognition motif (RRM)-containing protein
  misc_feature (1)..(206): Homolog of NCBI NO: 30682553 NR Description: RNA recognition motif (RRM)-containing protein
  misc_feature (4)..(75): Homolog of NCBI NO: 15242719 NR Description: RNA recognition motif (RRM)-containing protein
  misc_feature (75)..(206): Homolog of NCBI NO: 15242719 NR Description: RNA recognition motif (RRM)-containing protein
  misc_feature (1)..(197): Homolog of NCBI NO: 35215091 NR Description: putative heterogeneous nuclear ribonucleoprotein
  misc_feature (1)..(205): Homolog of NCBI NO: 15242719 NR Description: RNA recognition motif (RRM)-containing protein
  misc_feature (1)..(206): Homolog of NCBI NO: 15220810 NR Description: RNA recognition motif (RRM)-containing protein
  misc_feature (1)..(206): Homolog of NCBI NO: 8778468 NR Description: F1L3.34 [Arabidopsis thaliana]
KLKEHFSSYGKVVEHQIMLDHSTGRSRGFGFVTFESEDAVERVMSEGRMHDLGGKQVEIKKAEPKKPGAGDSSSNGRHSRGGGHRDSYRGSGVSVNSGGGYGYGGGYRSAAAAYYGSTAYGAYGRGYGYGATSGYGSGYGSAYGGSMYGGPYGAYGSYGGAYGGGAYGAPGGYGGGGYGSYGGAGGMGGGGSAGGRGSSRYHPYGK

SEQ ID NO: 110461 - protein, 189 aa, Zea mays subsp. mays
  misc_feature (1)..(189): Ceres Seq. ID no. 14312607
  misc_feature (66)..(184): Pfam Name: Dehydrin Pfam Description: Dehydrin
  misc_feature (1)..(188): Homolog of NCBI NO: 15226106 NR Description: heterogeneous nuclear ribonucleoprotein (hnRNP),
  misc_feature (1)..(188): Homolog of NCBI NO: 33416839 NR Description: Unknown (protein for MGC:66127) [Danio rerio]
  misc_feature (50)..(181): Homolog of NCBI NO: 15242719 NR Description: RNA recognition motif (RRM)-containing protein
  misc_feature (1)..(189): Homolog of NCBI NO: 30682553 NR Description: RNA recognition motif (RRM)-containing protein
  misc_feature (1)..(58): Homolog of NCBI NO: 15242719 NR Description: RNA recognition motif (RRM)-containing protein
  misc_feature (58)..(189): Homolog of NCBI NO: 15242719 NR Description: RNA recognition motif (RRM)-containing protein
  misc_feature (1)..(180): Homolog of NCBI NO: 35215091 NR Description: putative heterogeneous nuclear ribonucleoprotein
  misc_feature (1)..(188): Homolog of NCBI NO: 15242719 NR Description: RNA recognition motif (RRM)-containing protein
  misc_feature (1)..(189): Homolog of NCBI NO: 15220810 NR Description: RNA recognition motif (RRM)-containing protein
  misc_feature (1)..(189): Homolog of NCBI NO: 8778468 NR Description: F1L3.34 [Arabidopsis thaliana]
MLDHSTGRSRGFGFVTFESEDAVERVMSEGRMHDLGGKQVEIKKAEPKKPGAGDSSSNGRHSRGGGHRDSYRGSGVSVNSGGGYGYGGGYRSAAAAYYGSTAYGAYGRGYGYGATSGYGSGYGSAYGGSMYGGPYGAYGSYGGAYGGGAYGAPGGYGGGGYGSYGGAGGMGGGGSAGGRGSSRYHPYGK

SEQ ID NO: 110462 - protein, 163 aa, Zea mays subsp. mays
  misc_feature (1)..(163): Ceres Seq. ID no. 14312608
  misc_feature (40)..(158): Pfam Name: Dehydrin Pfam Description: Dehydrin
  misc_feature (1)..(162): Homolog of NCBI NO: 15226106 NR Description: heterogeneous nuclear ribonucleoprotein (hnRNP),
  misc_feature (1)..(162): Homolog of NCBI NO: 33416839 NR Description: Unknown (protein for MGC:66127) [Danio rerio]
  misc_feature (24)..(155): Homolog of NCBI NO: 15242719 NR Description: RNA recognition motif (RRM)-containing protein
  misc_feature (1)..(163): Homolog of NCBI NO: 30682553 NR Description: RNA recognition motif (RRM)-containing protein
  misc_feature (1)..(32): Homolog of NCBI NO: 15242719 NR Description: RNA recognition motif (RRM)-containing protein
  misc_feature (32)..(163): Homolog of NCBI NO: 15242719 NR Description: RNA recognition motif (RRM)-containing protein
  misc_feature (1)..(154): Homolog of NCBI NO: 35215091 NR Description: putative heterogeneous nuclear ribonucleoprotein
  misc_feature (1)..(162): Homolog of NCBI NO: 15242719 NR Description: RNA recognition motif (RRM)-containing protein
  misc_feature (1)..(163): Homolog of NCBI NO: 15220810 NR Description: RNA recognition motif (RRM)-containing protein
  misc_feature (1)..(163): Homolog of NCBI NO: 8778468 NR Description: F1L3.34 [Arabidopsis thaliana]
MSEGRMHDLGGKQVEIKKAEPKKPGAGDSSSNGRHSRGGGHRDSYRGSGVSVNSGGGYGYGGGYRSAAAAYYGSTAYGAYGRGYGYGATSGYGSGYGSAYGGSMYGGPYGAYGSYGGAYGGGAYGAPGGYGGGGYGSYGGAGGMGGGGSAGGRGSSRYHPYGK

SEQ ID NO: 110463 - protein, 158 aa, Zea mays subsp. mays
  misc_feature (1)..(158): Ceres Seq. ID no. 14312609
MDMVVVTDQLLQHIMAAQHMVPMAEGMDMVLLLAMAQVMALHMVAPCMEVHMVPTGHMVVPMEVVRMVLQEGMVGEDMAATVVLEAWVGVAALVVGAPADTTLMGNDHPFCVSLGSDNKAIPFLVSATEKMEHPIRLVESAASGHFFPWNLHCTSKIL

SEQ ID NO: 110464 - DNA, 1378 bp, Zea mays subsp. mays
  misc_feature (1)..(1378): Ceres Seq. ID no. 15180805
cggcctcccaaggcataagatggctccgtcccgtgcgctccaccgcccatctctcctcgctacggcggcggcgctgctgctgctcattctccctccatcagcagcagcagcagtgccggcgcctgctctcttcatcttcggagactccctcgtggatgcgggcaacaacgactacctcgtgaccctttccaaggccaacggaccaccgtacggcatcgacttcgaatcctccggcggcaagccgacgggaaggttcacgaacgggatgaccatcgcagatatcatgggtgagtccctggggcagaaatctctcgctccacccttcctggctccgaactcgagtgctgcgatcaccagcagcgggatcaactatggctctggttcttctggcatatttgacgataccggttccttctatatcggaaggattccgctagggcagcaagtcagctacttcgcaaacaccaggtcacagatgctggagaccatggacgaggaagccgtagccgatttcttcagcaaggctctctttgttatagtagcagggtccaacgacatcttggagtttctttcgccgtcagtaccgttcctcggacgagagaagcctgatgacccatcgcacttccaggacgcactggtttccaacctgacattctatctcaaggagctgagtgagctgggggctaggaagttcgtcgtgtccgacgtcgggccgctcggctgtataccctacgtccgtgctctggagttcatgcccgcggggcagtgctcggcgccggcgaatcgagtcaccgaaggctacaacaggaagctgaggaggatggtggagaagatgaaccgggagataggtccggagagcaaattcgtgtacacggacacgtacaggatcgttatggcgatcattcagaaccaccgccagtatggtttcgacgacgcgatggacccgtgctgcggcggcagcttccctttgcctccgttcctctgcattggagctgtcgccaaccgctccagctcgacgctgtgcagcgaccgctccaagtacgtgttctgggatgcgttccacccgaccgaagccgccaacctcatcgtcgccggcaaactcctcgacggcgacgcggctgccgcctggcctatcaatgtccgcgaactgtcccagtacgagtacaaatgatcgatatcgacgacgcgcgcgatgtgcaggccggctcaacgattcattggttttgtgtcattgatgtagtttcgtcttccttgttggggttttctaggctaggcttttatttgcttcaatttcgtatggttgactaggactgcgtgcaaattggtcaatttattccatgttgacgggaagaacgcgagtgcaatttcttctttctct

SEQ ID NO: 110465 - protein, 389 aa, Zea mays subsp. mays
  misc_feature (1)..(389): Ceres Seq. ID no. 15180806
  misc_feature (44)..(367): Pfam Name: GDSL-like Lipase/Acylhydrolase Pfam Description: GDSL-like Lipase/Acylhydrolase
  misc_feature (13)..(389): Homolog of NCBI NO: 38345537 NR Description: OSJNBa0020J04.12 [Oryza sativa (japonica
  misc_feature (32)..(383): Homolog of NCBI NO: 7486138 NR Description: hypothetical protein F25I24.160 - Arabidopsis
  misc_feature (41)..(384): Homolog of NCBI NO: 18409881 NR Description: GDSL-motif lipase/hydrolase protein [Arabidopsis
  misc_feature (41)..(385): Homolog of NCBI NO: 15241626 NR Description: GDSL-motif lipase/hydrolase protein [Arabidopsis
  misc_feature (19)..(139): Homolog of NCBI NO: 15234857 NR Description: GDSL-motif lipase/hydrolase protein [Arabidopsis
  misc_feature (194)..(384): Homolog of NCBI NO: 15234857 NR Description: GDSL-motif lipase/hydrolase protein [Arabidopsis
  misc_feature (19)..(383): Homolog of NCBI NO: 34899288 NR Description: similar to GDSL-motif lipase/hydrolase
  misc_feature (42)..(383): Homolog of NCBI NO: 15227849 NR Description: GDSL-motif lipase/hydrolase protein [Arabidopsis
  misc_feature (42)..(383): Homolog of NCBI NO: 15229742 NR Description: GDSL-motif lipase/hydrolase protein [Arabidopsis
  misc_feature (44)..(384): Homolog of NCBI NO: 15238210 NR Description: GDSL-motif lipase/hydrolase protein [Arabidopsis
GLPRHKMAPSRALHRPSLLATAAALLLLILPPSAAAAVPAPALFIFGDSLVDAGNNDYLVTLSKANGPPYGIDFESSGGKPTGRFTNGMTIADIMGESLGQKSLAPPFLAPNSSAAITSSGINYGSGSSGIFDDTGSFYIGRIPLGQQVSYFANTRSQMLETMDEEAVADFFSKALFVIVAGSNDILEFLSPSVPFLGREKPDDPSHFQDALVSNLTFYLKELSELGARKFVVSDVGPLGCIPYVRALEFMPAGQCSAPANRVTEGYNRKLRRMVEKMNREIGPESKFVYTDTYRIVMAIIQNHRQYGFDDAMDPCCGGSFPLPPFLCIGAVANRSSSTLCSDRSKYVFWDAFHPTEAANLIVAGKLLDGDAAAAWPINVRELSQYEYK

SEQ ID NO: 110466 - protein, 383 aa, Zea mays subsp. mays
  misc_feature (1)..(383): Ceres Seq. ID no. 15180807
  misc_feature (38)..(361): Pfam Name: GDSL-like Lipase/Acylhydrolase Pfam Description: GDSL-like Lipase/Acylhydrolase
  misc_feature (26)..(377): Homolog of NCBI NO: 7486138 NR Description: hypothetical protein F25I24.160 - Arabidopsis
  misc_feature (35)..(378): Homolog of NCBI NO: 18409881 NR Description: GDSL-motif lipase/hydrolase protein [Arabidopsis
  misc_feature (35)..(379): Homolog of NCBI NO: 15241626 NR Description: GDSL-motif lipase/hydrolase protein [Arabidopsis
  misc_feature (13)..(133): Homolog of NCBI NO: 15234857 NR Description: GDSL-motif lipase/hydrolase protein [Arabidopsis
  misc_feature (188)..(378): Homolog of NCBI NO: 15234857 NR Description: GDSL-motif lipase/hydrolase protein [Arabidopsis
  misc_feature (13)..(377): Homolog of NCBI NO: 34899288 NR Description: similar to GDSL-motif lipase/hydrolase
  misc_feature (36)..(377): Homolog of NCBI NO: 15227849 NR Description: GDSL-motif lipase/hydrolase protein [Arabidopsis
  misc_feature (36)..(377): Homolog of NCBI NO: 15229742 NR Description: GDSL-motif lipase/hydrolase protein [Arabidopsis
  misc_feature (38)..(378): Homolog of NCBI NO: 15238210 NR Description: GDSL-motif lipase/hydrolase protein [Arabidopsis
  misc_feature (7)..(383): Homolog of NCBI NO: 38345537 NR Description: OSJNBa0020J04.12 [Oryza sativa (japonica
MAPSRALHRPSLLATAAALLLLILPPSAAAAVPAPALFIFGDSLVDAGNNDYLVTLSKANGPPYGIDFESSGGKPTGRFTNGMTIADIMGESLGQKSLAPPFLAPNSSAAITSSGINYGSGSSGIFDDTGSFYIGRIPLGQQVSYFANTRSQMLETMDEEAVADFFSKALFVIVAGSNDILEFLSPSVPFLGREKPDDPSHFQDALVSNLTFYLKELSELGARKFVVSDVGPLGCIPYVRALEFMPAGQCSAPANRVTEGYNRKLRRMVEKMNREIGPESKFVYTDTYRIVMAIIQNHRQYGFDDAMDPCCGGSFPLPPFLCIGAVANRSSSTLCSDRSKYVFWDAFHPTEAANLIVAGKLLDGDAAAAWPINVRELSQYEYK

SEQ ID NO: 110467 - protein, 301 aa, Zea mays subsp. mays
  misc_feature (1)..(301): Ceres Seq. ID no. 15180808
  misc_feature (1)..(279): Pfam Name: GDSL-like Lipase/Acylhydrolase Pfam Description: GDSL-like Lipase/Acylhydrolase
  misc_feature (1)..(295): Homolog of NCBI NO: 7486138 NR Description: hypothetical protein F25I24.160 - Arabidopsis
  misc_feature (1)..(296): Homolog of NCBI NO: 18409881 NR Description: GDSL-motif lipase/hydrolase protein [Arabidopsis
  misc_feature (1)..(297): Homolog of NCBI NO: 15241626 NR Description: GDSL-motif lipase/hydrolase protein [Arabidopsis
  misc_feature (1)..(51): Homolog of NCBI NO: 15234857 NR Description: GDSL-motif lipase/hydrolase protein [Arabidopsis
  misc_feature (106)..(296): Homolog of NCBI NO: 15234857 NR Description: GDSL-motif lipase/hydrolase protein [Arabidopsis
  misc_feature (1)..(295): Homolog of NCBI NO: 34899288 NR Description: similar to GDSL-motif lipase/hydrolase
  misc_feature (1)..(295): Homolog of NCBI NO: 15227849 NR Description: GDSL-motif lipase/hydrolase protein [Arabidopsis
  misc_feature (1)..(295): Homolog of NCBI NO: 15229742 NR Description: GDSL-motif lipase/hydrolase protein [Arabidopsis
  misc_feature (1)..(296): Homolog of NCBI NO: 15238210 NR Description: GDSL-motif lipase/hydrolase protein [Arabidopsis
  misc_feature (1)..(301): Homolog of NCBI NO: 38345537 NR Description: OSJNBa0020J04.12 [Oryza sativa (japonica
MTIADIMGESLGQKSLAPPFLAPNSSAAITSSGINYGSGSSGIFDDTGSFYIGRIPLGQQVSYFANTRSQMLETMDEEAVADFFSKALFVIVAGSNDILEFLSPSVPFLGREKPDDPSHFQDALVSNLTFYLKELSELGARKFVVSDVGPLGCIPYVRALEFMPAGQCSAPANRVTEGYNRKLRRMVEKMNREIGPESKFVYTDTYRIVMAIIQNHRQYGFDDAMDPCCGGSFPLPPFLCIGAVANRSSSTLCSDRSKYVFWDAFHPTEAANLIVAGKLLDGDAAAAWPINVRELSQYEYK

SEQ ID NO: 110468 - DNA, 1587 bp, Zea mays subsp. mays
  misc_feature (1)..(1587): Ceres Seq. ID no. 14309629
attaaatctttggctattaggacgcttctctcctcccaaaccccacatctcagcaagggccccgtcggctagcgccgcatccgcagaccgcagccgtcgacgcagaccctcttcggcagccgcttgcagcgcgtcccttccccgctcccggcgccatggactgcgcaaaggggagggcggtggcggacctctacgacgaggtgatggtggagatcctctcgcgcgtgcccgtcaaagacctccgccgttgcacgtgcgtgtgcaaatcttggcgcaacctcatcaccgaccccctcaaccgcaagaagctgccccagaccctggaaggcttcttccacggcgtcgtcggagggcctcacagctacggccaattcaccagcctgtcggggagcggagaacgcgtggctccggtcgacccttccttctccttcatcacggcaatgctgcctggcgtggagcgcatggtcctcttggattcttgcaacgggctcctgctcttcgggtgcacccgggaggacaagttcgggtacatcgtgacaaaccctgcgaccgaggaattgatgactgtgcccgccagctccggctcttgtccccttccacctccatttgaaagggacatggttggtggggaaagatatgcgcacacctttctgatgtttaaccctgctgtctcctcgcacttccacttggtccagatctgggagaataaggcggcgaaggaggtggaaacggtgcactcttactcgtctgaaaccaaggcatggagtgacaggtcaagcaagtgggggcgaggtgaagagggcggtgaatgggagctgtggggtgaatccgtgattggattcatgtgtggctggacattggtcgatggtctgctgcattttcttgccttcgatcttcagaaagaagagactgtgataattgcagtggatggggatggggaaactcgtaggatcatcggctggcatggtaaggatgtgagagcaattgtttttattggtgaatcccaagaccatctacactgcatcggtgtgaatgtgcaattagatcaaggctctgaagtgcgcttcacgcggatgtcgatctgggttcttgaggactatgatacacaagcatggatcttaaagcacaatgtgagctctttgcagttctttgaattactgagtcacccaatcaaagacttccatattgtggccattcatccatatcacaattcgttcatccttattcagcactggaaccagaaacttgtatcatataacatggatactcaggaactgcatggtctcggcactcttggaaagggctatgcggttattaccccttacataccctgtttcttggagtcatcggttcttgccaccaaacactgaggttgttgtttctcggggacttctctgcatgttcaacaagagcctgatcatccaagtgtggggcaaggtgatctagtatgatggtgctttaatgtccttttgtaatgctttgagaaagctgtttacagggcaacatggttagttccatgatatatcagtgagaaagctgtttacaggacagcatggttagttctatgatatatcaaattagatcacg

SEQ ID NO: 110469 - protein, 404 aa, Zea mays subsp. mays
  misc_feature (1)..(404): Ceres Seq. ID no. 14309630
  misc_feature (10)..(54): Pfam Name: F-box domain Pfam Description: F-box domain
  misc_feature (39)..(262): Homolog of NCBI NO: 34898802 NR Description: OJ1131_E05.28 [Oryza sativa (japonica
  misc_feature (166)..(397): Homolog of NCBI NO: 34898810 NR Description: OJ1131_E05.32 [Oryza sativa (japonica
  misc_feature (166)..(397): Homolog of NCBI NO: 33146481 NR Description: unknown protein [Oryza sativa (japonica
  misc_feature (10)..(210): Homolog of NCBI NO: 34898810 NR Description: OJ1131_E05.32 [Oryza sativa (japonica
  misc_feature (254)..(398): Homolog of NCBI NO: 34898796 NR Description: OJ1131_E05.24 [Oryza sativa (japonica
  misc_feature (15)..(210): Homolog of NCBI NO: 34898796 NR Description: OJ1131_E05.24 [Oryza sativa (japonica
  misc_feature (215)..(397): Homolog of NCBI NO: 34898790 NR Description: OJ1131_E05.21 [Oryza sativa (japonica
  misc_feature (2)..(211): Homolog of NCBI NO: 34898790 NR Description: OJ1131_E05.21 [Oryza sativa (japonica
  misc_feature (215)..(397): Homolog of NCBI NO: 34898788 NR Description: OJ1131_E05.20 [Oryza sativa (japonica
  misc_feature (2)..(211): Homolog of NCBI NO: 34898788 NR Description: OJ1131_E05.20 [Oryza sativa (japonica
MDCAKGRAVADLYDEVMVEILSRVPVKDLRRCTCVCKSWRNLITDPLNRKKLPQTLEGFFHGVVGGPHSYGQFTSLSGSGERVAPVDPSFSFITAMLPGVERMVLLDSCNGLLLFGCTREDKFGYIVTNPATEELMTVPASSGSCPLPPPFERDMVGGERYAHTFLMFNPAVSSHFHLVQIWENKAAKEVETVHSYSSETKAWSDRSSKWGRGEEGGEWELWGESVIGFMCGWTLVDGLLHFLAFDLQKEETVIIAVDGDGETRRIIGWHGKDVRAIVFIGESQDHLHCIGVNVQLDQGSEVRFTRMSIWVLEDYDTQAWILKHNVSSLQFFELLSHPIKDFHIVAIHPYHNSFILIQHWNQKLVSYNMDTQELHGLGTLGKGYAVITPYIPCFLESSVLATKH

SEQ ID NO: 110470 - protein, 388 aa, Zea mays subsp. mays
  misc_feature (1)..(388): Ceres Seq. ID no. 14309631
  misc_feature (1)..(38): Pfam Name: F-box domain Pfam Description: F-box domain
  misc_feature (23)..(246): Homolog of NCBI NO: 34898802 NR Description: OJ1131_E05.28 [Oryza sativa (japonica
  misc_feature (150)..(381): Homolog of NCBI NO: 34898810 NR Description: OJ1131_E05.32 [Oryza sativa (japonica
  misc_feature (150)..(381): Homolog of NCBI NO: 33146481 NR Description: unknown protein [Oryza sativa (japonica
  misc_feature (1)..(194): Homolog of NCBI NO: 34898810 NR Description: OJ1131_E05.32 [Oryza sativa (japonica
  misc_feature (238)..(382): Homolog of NCBI NO: 34898796 NR Description: OJ1131_E05.24 [Oryza sativa (japonica
  misc_feature (1)..(194): Homolog of NCBI NO: 34898796 NR Description: OJ1131_E05.24 [Oryza sativa (japonica
  misc_feature (199)..(381): Homolog of NCBI NO: 34898790 NR Description: OJ1131_E05.21 [Oryza sativa (japonica
  misc_feature (1)..(195): Homolog of NCBI NO: 34898790 NR Description: OJ1131_E05.21 [Oryza sativa (japonica
  misc_feature (199)..(381): Homolog of NCBI NO: 34898788 NR Description: OJ1131_E05.20 [Oryza sativa (japonica
  misc_feature (1)..(195): Homolog of NCBI NO: 34898788 NR Description: OJ1131_E05.20 [Oryza sativa (japonica
MVEILSRVPVKDLRRCTCVCKSWRNLITDPLNRKKLPQTLEGFFHGVVGGPHSYGQFTSLSGSGERVAPVDPSFSFITAMLPGVERMVLLDSCNGLLLFGCTREDKFGYIVTNPATEELMTVPASSGSCPLPPPFERDMVGGERYAHTFLMFNPAVSSHFHLVQIWENKAAKEVETVHSYSSETKAWSDRSSKWGRGEEGGEWELWGESVIGFMCGWTLVDGLLHFLAFDLQKEETVIIAVDGDGETRRIIGWHGKDVRAIVFIGESQDHLHCIGVNVQLDQGSEVRFTRMSIWVLEDYDTQAWILKHNVSSLQFFELLSHPIKDFHIVAIHPYHNSFILIQHWNQKLVSYNMDTQELHGLGTLGKGYAVITPYIPCFLESSVLATKH

SEQ ID NO: 110471 - protein, 309 aa, Zea mays subsp. mays
  misc_feature (1)..(309): Ceres Seq. ID no. 14309632
  misc_feature (1)..(167): Homolog of NCBI NO: 34898802 NR Description: OJ1131_E05.28 [Oryza sativa (japonica
  misc_feature (71)..(302): Homolog of NCBI NO: 34898810 NR Description: OJ1131_E05.32 [Oryza sativa (japonica
  misc_feature (71)..(302): Homolog of NCBI NO: 33146481 NR Description: unknown protein [Oryza sativa (japonica
  misc_feature (1)..(115): Homolog of NCBI NO: 34898810 NR Description: OJ1131_E05.32 [Oryza sativa (japonica
  misc_feature (159)..(303): Homolog of NCBI NO: 34898796 NR Description: OJ1131_E05.24 [Oryza sativa (japonica
  misc_feature (1)..(115): Homolog of NCBI NO: 34898796 NR Description: OJ1131_E05.24 [Oryza sativa (japonica
  misc_feature (120)..(302): Homolog of NCBI NO: 34898790 NR Description: OJ1131_E05.21 [Oryza sativa (japonica
  misc_feature (1)..(116): Homolog of NCBI NO: 34898790 NR Description: OJ1131_E05.21 [Oryza sativa (japonica
  misc_feature (120)..(302): Homolog of NCBI NO: 34898788 NR Description: OJ1131_E05.20 [Oryza sativa (japonica
  misc_feature (1)..(116): Homolog of NCBI NO: 34898788 NR Description: OJ1131_E05.20 [Oryza sativa (japonica
MLPGVERMVLLDSCNGLLLFGCTREDKFGYIVTNPATEELMTVPASSGSCPLPPPFERDMVGGERYAHTFLMFNPAVSSHFHLVQIWENKAAKEVETVHSYSSETKAWSDRSSKWGRGEEGGEWELWGESVIGFMCGWTLVDGLLHFLAFDLQKEETVIIAVDGDGETRRIIGWHGKDVRAIVFIGESQDHLHCIGVNVQLDQGSEVRFTRMSIWVLEDYDTQAWILKHNVSSLQFFELLSHPIKDFHIVAIHPYHNSFILIQHWNQKLVSYNMDTQELHGLGTLGKGYAVITPYIPCFLESSVLATKH

SEQ ID NO: 110472 - DNA, 1432 bp, Zea mays subsp. mays
  misc_feature (1)..(1432): Ceres Seq. ID no. 15180059
  misc_feature: MA Experiment ID: 108528 Result: Up-regulated in Transcription
  misc_feature: MA Experiment 108528 PARAMETER Experiment Name: Zm_Imbibed_Seeds_P Parameter: Age (day) Value: 5 vs. 2
  misc_feature: MA Experiment 108528 PARAMETER Experiment Name: Zm_Imbibed_Seeds_P Parameter: Organism Value: Zea mays
  misc_feature: MA Experiment 108528 PARAMETER Experiment Name: Zm_Imbibed_Seeds_P Parameter: Plant Line Value: 35A19
  misc_feature: MA Experiment 108528 PARAMETER Experiment Name: Zm_Imbibed_Seeds_P Parameter: Tissue Value: Aerial vs. Embryo
  misc_feature: MA Experiment ID: 108529 Result: Up-regulated in Transcription
  misc_feature: MA Experiment 108529 PARAMETER Experiment Name: Zm_Imbibed_Seeds_P Parameter: Age (day) Value: 5 vs. 2
  misc_feature: MA Experiment 108529 PARAMETER Experiment Name: Zm_Imbibed_Seeds_P Parameter: Organism Value: Zea mays
  misc_feature: MA Experiment 108529 PARAMETER Experiment Name: Zm_Imbibed_Seeds_P Parameter: Plant Line Value: 35A19
  misc_feature: MA Experiment 108529 PARAMETER Experiment Name: Zm_Imbibed_Seeds_P Parameter: Tissue Value: Roots vs. Embryo
  misc_feature: MA Experiment ID: 108530 Result: Up-regulated in Transcription
  misc_feature: MA Experiment 108530 PARAMETER Experiment Name: Zm_Imbibed_Seeds_P Parameter: Age (day) Value: 6 vs. 2
  misc_feature: MA Experiment 108530 PARAMETER Experiment Name: Zm_Imbibed_Seeds_P Parameter: Organism Value: Zea mays
  misc_feature: MA Experiment 108530 PARAMETER Experiment Name: Zm_Imbibed_Seeds_P Parameter: Plant Line Value: 35A19
  misc_feature: MA Experiment 108530 PARAMETER Experiment Name: Zm_Imbibed_Seeds_P Parameter: Tissue Value: Aerial vs. Embryo
  misc_feature: MA Experiment ID: 108546 Result: Up-regulated in Transcription
  misc_feature: MA Experiment 108546 PARAMETER Experiment Name: Zm_Imbibed_Seeds_P Parameter: Age (day) Value: 3 vs. 2
  misc_feature: MA Experiment 108546 PARAMETER Experiment Name: Zm_Imbibed_Seeds_P Parameter: Organism Value: Zea mays
  misc_feature: MA Experiment 108546 PARAMETER Experiment Name: Zm_Imbibed_Seeds_P Parameter: Plant Line Value: 35A19
  misc_feature: MA Experiment 108546 PARAMETER Experiment Name: Zm_Imbibed_Seeds_P Parameter: Tissue Value: Roots vs. Embryo
  misc_feature: MA Experiment ID: 108547 Result: Up-regulated in Transcription
  misc_feature: MA Experiment 108547 PARAMETER Experiment Name: Zm_Imbibed_Seeds_P Parameter: Age (day) Value: 4 vs. 2
  misc_feature: MA Experiment 108547 PARAMETER Experiment Name: Zm_Imbibed_Seeds_P Parameter: Organism Value: Zea mays
  misc_feature: MA Experiment 108547 PARAMETER Experiment Name: Zm_Imbibed_Seeds_P Parameter: Plant Line Value: 35A19
  misc_feature: MA Experiment 108547 PARAMETER Experiment Name: Zm_Imbibed_Seeds_P Parameter: Tissue Value: Aerial vs. Embryo
  misc_feature: MA Experiment ID: 108559 Result: Down-regulated in Transcription
  misc_feature: MA Experiment 108559 PARAMETER Experiment Name: Zm_5mM_NO_P Parameter: Age (day) Value: 8
  misc_feature: MA Experiment 108559 PARAMETER Experiment Name: Zm_5mM_NO_P Parameter: Organism Value: Zea mays
  misc_feature: MA Experiment 108559 PARAMETER Experiment Name: Zm_5mM_NO_P Parameter: Plant Line Value: 35A19
  misc_feature: MA Experiment 108559 PARAMETER Experiment Name: Zm_5mM_NO_P Parameter: Timepoint (hr) Value: 12
  misc_feature: MA Experiment 108559 PARAMETER Experiment Name: Zm_5mM_NO_P Parameter: Tissue Value: Aerial
  misc_feature: MA Experiment 108559 PARAMETER Experiment Name: Zm_5mM_NO_P Parameter: Treatment Value: 5mM NO vs. No Treatment
  misc_feature: MA Experiment ID: 20000478 Result: Down-regulated in Transcription
  misc_feature: MA Experiment 20000478 PARAMETER Experiment Name: Zm_5mM_SA_P Parameter: Age (day) Value: 11
  misc_feature: MA Experiment 20000478 PARAMETER Experiment Name: Zm_5mM_SA_P Parameter: Organism Value: Zea mays
  misc_feature: MA Experiment 20000478 PARAMETER Experiment Name: Zm_5mM_SA_P Parameter: Plant Line Value: 35A19
  misc_feature: MA Experiment 20000478 PARAMETER Experiment Name: Zm_5mM_SA_P Parameter: Timepoint (hr) Value: 72
  misc_feature: MA Experiment 20000478 PARAMETER Experiment Name: Zm_5mM_SA_P Parameter: Tissue Value: Aerial
  misc_feature: MA Experiment 20000478 PARAMETER Experiment Name: Zm_5mM_SA_P Parameter: Treatment Value: 5mM SA vs. No Treatment
  misc_feature: MA Experiment ID: 20000479 Result: Down-regulated in Transcription
  misc_feature: MA Experiment 20000479 PARAMETER Experiment Name: Zm_Drought_P Parameter: Age (day) Value: 10
  misc_feature: MA Experiment 20000479 PARAMETER Experiment Name: Zm_Drought_P Parameter: Organism Value: Zea mays
  misc_feature: MA Experiment 20000479 PARAMETER Experiment Name: Zm_Drought_P Parameter: Plant Line Value: 35A19
  misc_feature: MA Experiment 20000479 PARAMETER Experiment Name: Zm_Drought_P Parameter: Timepoint (hr) Value: 48
  misc_feature: MA Experiment 20000479 PARAMETER Experiment Name: Zm_Drought_P Parameter: Tissue Value: Aerial
  misc_feature: MA Experiment 20000479 PARAMETER Experiment Name: Zm_Drought_P Parameter: Treatment Value: Drought vs. No Drought
  misc_feature: MA Experiment ID: 20000480 Result: Down-regulated in Transcription
  misc_feature: MA Experiment 20000480 PARAMETER Experiment Name: Zm_Drought_P Parameter: Age (day) Value: 11
  misc_feature: MA Experiment 20000480 PARAMETER Experiment Name: Zm_Drought_P Parameter: Organism Value: Zea mays
  misc_feature: MA Experiment 20000480 PARAMETER Experiment Name: Zm_Drought_P Parameter: Plant Line Value: 35A19
  misc_feature: MA Experiment 20000480 PARAMETER Experiment Name: Zm_Drought_P Parameter: Timepoint (hr) Value: 72
  misc_feature: MA Experiment 20000480 PARAMETER Experiment Name: Zm_Drought_P Parameter: Tissue Value: Aerial
  misc_feature: MA Experiment 20000480 PARAMETER Experiment Name: Zm_Drought_P Parameter: Treatment Value: Drought vs. No Drought
  misc_feature: MA Experiment ID: 20000488 Result: Down-regulated in Transcription
  misc_feature: MA Experiment 20000488 PARAMETER Experiment Name: Zm_50mM_NH4NO3_L_to_H_P Parameter: Organism Value: Zea mays
  misc_feature: MA Experiment 20000488 PARAMETER Experiment Name: Zm_50mM_NH4NO3_L_to_H_P Parameter: Timepoint (hr) Value: 8
  misc_feature: MA Experiment 20000488 PARAMETER Experiment Name: Zm_50mM_NH4NO3_L_to_H_P Parameter: Tissue Value: Leaves
  misc_feature: MA Experiment 20000488 PARAMETER Experiment Name: Zm_50mM_NH4NO3_L_to_H_P Parameter: Treatment Value: 50mM NH4NO3 vs. 100mM Mannitol
  misc_feature: MA Experiment ID: 20000535 Result: Down-regulated in Transcription
  misc_feature: MA Experiment 20000535 PARAMETER Experiment Name: Zm_Hybrid_Seed_Dev_P Parameter: DAP Value: 30 vs. 12
  misc_feature: MA Experiment 20000535 PARAMETER Experiment Name: Zm_Hybrid_Seed_Dev_P Parameter: Organism Value: Zea mays
  misc_feature: MA Experiment 20000535 PARAMETER Experiment Name: Zm_Hybrid_Seed_Dev_P Parameter: Plant Line Value: 35A19
  misc_feature: MA Experiment 20000535 PARAMETER Experiment Name: Zm_Hybrid_Seed_Dev_P Parameter: Tissue Value: Embryo vs. Unfert Floret
  misc_feature: MA Experiment ID: 20000626 Result: Up-regulated in Transcription
  misc_feature: MA Experiment 20000626 PARAMETER Experiment Name: Zm_Herbicide-Treatments_P Parameter: Timepoint (hr) Value: 12
  misc_feature: MA Experiment 20000626 PARAMETER Experiment Name: Zm_Herbicide-Treatments_P Parameter: Tissue Value: Aerial
  misc_feature: MA Experiment 20000626 PARAMETER Experiment Name: Zm_Herbicide-Treatments_P Parameter: Treatment Value: Roundup vs. No Treatment
  misc_feature: MA Experiment ID: 20001614 Result: Down-regulated in Transcription
  misc_feature: MA Experiment 20001614 PARAMETER Experiment Name: Zm_50ppm_KNO3_L-to-H_P Parameter: Age (day) Value: 21
  misc_feature: MA Experiment 20001614 PARAMETER Experiment Name: Zm_50ppm_KNO3_L-to-H_P Parameter: Organism Value: Zea mays
  misc_feature: MA Experiment 20001614 PARAMETER Experiment Name: Zm_50ppm_KNO3_L-to-H_P Parameter: Plant Line Value: 35A19
  misc_feature: MA Experiment 20001614 PARAMETER Experiment Name: Zm_50ppm_KNO3_L-to-H_P Parameter: Timepoint (hr) Value: 48
  misc_feature: MA Experiment 20001614 PARAMETER Experiment Name: Zm_50ppm_KNO3_L-to-H_P Parameter: Tissue Value: Roots
  misc_feature: MA Experiment 20001614 PARAMETER Experiment Name: Zm_50ppm_KNO3_L-to-H_P Parameter: Treatment Value: 50ppm KNO3 vs. 50ppm KCl
aagtggcaaggaaatagaaaacgcagcgtccgtgcgctgtaggtgtgtgtgcgccaagttcctgtgtccattgtcttgtgtacagctactgttcatctctgtctatctctgttcttggcgttccatcgagtgtgtagcgctagtagattccaacatttggtatcagaggcagtttatgcccaagatcctgcgctactacctcgagtccgaagctatggcgatggttccgcacggcgccggggggagttcggtctccatgtcgtacccggtgctgtcgccggcgagctacacggcgtgggcgatcaaggtggagtcgatcctcgacgcgcaaggtctctgggaggccgtgtctccaccagatggtggcgaggtgaacgcggtgaagaacaagacggcgcgggcacaacttctccaagctctgcccgatgacatcttgatgcaggtctccaccaagaaaacggcggcggaggtgtgggcgagtctcaagactcgtttcgtcggggcggatcgggtcaagacggcgcgcctagccacgctcaagggggagttcgacaagctgtacatggaggacggggaggcattggacgactacgccggcaaaatcagcggtatggcggcgcgttacgccgggcttggcgcgacactcgacgacgctgccatggtaaaaaagctcctcgacaccgtcccggatcggctcttccccgtcgtcgcgggcatcgagcagttctgcgacgttgagacgatgccatttgaggaggcgctcggacgtctcaaggcgttcgatgagcgttctcggcggcgtactcatgccggcggcgaacgacgcgacgaccaactcctcctcacggaggccgagtggaaagctcgaaaaaagaagaagtcgacgatcggcaagtgcttcaactgcggtaaccgcggccacttcgcgcgggattgccgtaagaagaaggaggaggaggcgctgctagccagggccgatgaagaagcgacgctcctgtgagtgcgggacgcggcgctaggattagggagagtttgttagaataatcccagcgcatgtgtgtacgagtcatggcagttgtgcatgtgtgtgcatgcagtgcaactgctagctccgtgggtgtgtgcgcatggtgctggtcactagctagttgagtggtgtagtgcgtgcgttagttgcgtgcgtgcttgcatgctggaaggagtggccgagaagctagcgcctagtgacttgttcgtgtgtgtgaggaggttgcttgcatgcaaagcaacatgagttatgtggctcatggcgtgaaggctgggtagtggactagtggagttcgtagctctctgtatattcagtctataaaggcacatgtactgctcagttaaaaagtgtggcaaggaaatagaaaacgcagcgtccatgcgctgtaggtgtgtgtgcgcgaac

SEQ ID NO: 110473 - protein, 332 aa, Zea mays subsp. mays
  misc_feature (1)..(332): Ceres Seq. ID no. 15180060
  misc_feature (174)..(226): Pfam Name: Retrotransposon gag protein Pfam Description: Retrotransposon gag protein
  misc_feature (85)..(309): Homolog of NCBI NO: 37535062 NR Description: putative lectin receptor kinase
  misc_feature (69)..(285): Homolog of NCBI NO: 15230839 NR Description: hypothetical protein [Arabidopsis thaliana]
  misc_feature (297)..(332): Homolog of NCBI NO: 38345433 NR Description: OSJNBb0046P18.1 [Oryza sativa (japonica
  misc_feature (85)..(310): Homolog of NCBI NO: 38345433 NR Description: OSJNBb0046P18.1 [Oryza sativa (japonica
  misc_feature (85)..(332): Homolog of NCBI NO: 37535062 NR Description: putative lectin receptor kinase
  misc_feature (148)..(292): Homolog of NCBI NO: 29150404 NR Description: gag-pol polyprotein [Oryza sativa (japonica
  misc_feature (72)..(292): Homolog of NCBI NO: 37534104 NR Description: putative retroelement [Oryza sativa (japonica
  misc_feature (74)..(292): Homolog of NCBI NO: 30017513 NR Description: putative gag-pol polyprotein
  misc_feature (72)..(292): Homolog of NCBI NO: 34910624 NR Description: putative copia-type polyprotein
  misc_feature (59)..(332): Homolog of NCBI NO: 34907386 NR Description: P0471B04.27 [Oryza sativa (japonica
SGKEIENAASVRCRCVCAKFLCPLSCVQLLFISVYLCSWRSIECVALVDSNIWYQRQFMPKILRYYLESEAMAMVPHGAGGSSVSMSYPVLSPASYTAWAIKVESILDAQGLWEAVSPPDGGEVNAVKNKTARAQLLQALPDDILMQVSTKKTAAEVWASLKTRFVGADRVKTARLATLKGEFDKLYMEDGEALDDYAGKISGMAARYAGLGATLDDAAMVKKLLDTVPDRLFPVVAGIEQFCDVETMPFEEALGRLKAFDERSRRRTHAGGERRDDQLLLTEAEWKARKKKKSTIGKCFNCGNRGHFARDCRKKKEEEALLARADEEATLL

SEQ ID NO: 110474 - protein, 274 aa, Zea mays subsp. mays
  misc_feature (1)..(274): Ceres Seq. ID no. 15180061
  misc_feature (116)..(168): Pfam Name: Retrotransposon gag protein Pfam Description: Retrotransposon gag protein
  misc_feature (11)..(227): Homolog of NCBI NO: 15230839 NR Description: hypothetical protein [Arabidopsis thaliana]
  misc_feature (239)..(274): Homolog of NCBI NO: 38345433 NR Description: OSJNBb0046P18.1 [Oryza sativa (japonica
  misc_feature (27)..(252): Homolog of NCBI NO: 38345433 NR Description: OSJNBb0046P18.1 [Oryza sativa (japonica
  misc_feature (27)..(274): Homolog of NCBI NO: 37535062 NR Description: putative lectin receptor kinase
  misc_feature (90)..(234): Homolog of NCBI NO: 29150404 NR Description: gag-pol polyprotein [Oryza sativa (japonica
  misc_feature (27)..(251): Homolog of NCBI NO: 37535062 NR Description: putative lectin receptor kinase
  misc_feature (14)..(234): Homolog of NCBI NO: 37534104 NR Description: putative retroelement [Oryza sativa (japonica
  misc_feature (16)..(234): Homolog of NCBI NO: 30017513 NR Description: putative gag-pol polyprotein
  misc_feature (14)..(234): Homolog of NCBI NO: 34910624 NR Description: putative copia-type polyprotein
  misc_feature (1)..(274): Homolog of NCBI NO: 34907386 NR Description: P0471B04.27 [Oryza sativa (japonica
MPKILRYYLESEAMAMVPHGAGGSSVSMSYPVLSPASYTAWAIKVESILDAQGLWEAVSPPDGGEVNAVKNKTARAQLLQALPDDILMQVSTKKTAAEVWASLKTRFVGADRVKTARLATLKGEFDKLYMEDGEALDDYAGKISGMAARYAGLGATLDDAAMVKKLLDTVPDRLFPVVAGIEQFCDVETMPFEEALGRLKAFDERSRRRTHAGGERRDDQLLLTEAEWKARKKKKSTIGKCFNCGNRGHFARDCRKKKEEEALLARADEEATLL

SEQ ID NO: 110475 - protein, 261 aa, Zea mays subsp. mays
  misc_feature (1)..(261): Ceres Seq. ID no. 15180062
  misc_feature (103)..(155): Pfam Name: Retrotransposon gag protein Pfam Description: Retrotransposon gag protein
  misc_feature (14)..(238): Homolog of NCBI NO: 37535062 NR Description: putative lectin receptor kinase
  misc_feature (1)..(214): Homolog of NCBI NO: 15230839 NR Description: hypothetical protein [Arabidopsis thaliana]
  misc_feature (226)..(261): Homolog of NCBI NO: 38345433 NR Description: OSJNBb0046P18.1 [Oryza sativa (japonica
  misc_feature (14)..(239): Homolog of NCBI NO: 38345433 NR Description: OSJNBb0046P18.1 [Oryza sativa (japonica
  misc_feature (14)..(261): Homolog of NCBI NO: 37535062 NR Description: putative lectin receptor kinase
  misc_feature (77)..(221): Homolog of NCBI NO: 29150404 NR Description: gag-pol polyprotein [Oryza sativa (japonica
  misc_feature (1)..(221): Homolog of NCBI NO: 37534104 NR Description: putative retroelement [Oryza sativa (japonica
  misc_feature (3)..(221): Homolog of NCBI NO: 30017513 NR Description: putative gag-pol polyprotein
  misc_feature (1)..(221): Homolog of NCBI NO: 34910624 NR Description: putative copia-type polyprotein
  misc_feature (1)..(261): Homolog of NCBI NO: 34907386 NR Description: P0471B04.27 [Oryza sativa (japonica
MAMVPHGAGGSSVSMSYPVLSPASYTAWAIKVESILDAQGLWEAVSPPDGGEVNAVKNKTARAQLLQALPDDILMQVSTKKTAAEVWASLKTRFVGADRVKTARLATLKGEFDKLYMEDGEALDDYAGKISGMAARYAGLGATLDDAAMVKKLLDTVPDRLFPVVAGIEQFCDVETMPFEEALGRLKAFDERSRRRTHAGGERRDDQLLLTEAEWKARKKKKSTIGKCFNCGNRGHFARDCRKKKEEEALLARADEEATLL

SEQ ID NO: 110476 - DNA, 1168 bp, Zea mays subsp. mays
  misc_feature (1)..(1168): Ceres Seq. ID no. 15180738
acaccatctctaggccgcgtctcgcctcgtctcgtcgtccgatcattatctccctgactcgcctcgtcctccagatatcggccgccaccttcacctccaccgccccggcgcacctgtgcgtctccatcgtcgccgcctctcctccttcggacacgactgaccttccactggcgccaacgaagaaaacacataggaagaagctcaccgccaaacctcatccagatccagtcgctgccctccgaaggccgcatacggaacgtctcgtctcttcctttggatccggcggtcaactccatcacccccagcttcacctcccttagtccccctccgtccgctctcacccaccgcttctatatcgccacctctctcgttgtagaagaagacactgaggatctggctttctggaatcacatttcttgagaactatctgttggagaactaaactaggctcttgttcatattatggatcagcaagctaagattgatgctgattttcttgaaccaactgtactcttagatgagacacattaccaggaggggtacaaaaatggctataatgatggtttggcatctggaaaggaagaggggaggcaggttggtttaaagatgggtttccaggtcggtgaagaactgggtttctttcagggctgtctggatgtgtggacgtctgcaattctcattgatcagaatgccttcacagctcgggtcaggaagaatatcgagcaactggctgcactggtgggcagctatccgctgtctgatccggagaatgaacaaattcaagacgtgatggagaagataaggctgaaatttagggtcatcactgcaagcttaggggtgaagttagagtatgaagggcaccccaaatcatctaaacaggatgctgaggatctatgagcagtgattgaaattacattttagtttctccgcccttgctgtttaaagctcttcaactcattggcatcacgaggaactgccgtgagacatcaatggccagagtccgaccaaaaccacatatatagttttaacaatgtctcaagttttgtgttattacctgctatctgccatatgtaatagtttcctttcagaaggcaaaagcacttccttcccattttcttgaagtacttgttgacttgtattctacatgttgggagcatatagatcttcc

SEQ ID NO: 110477 - protein, 144 aa, Zea mays subsp. mays
  misc_feature (1)..(144): Ceres Seq. ID no. 15180739
  misc_feature (23)..(127): Homolog of NCBI NO: 28829147 NR Description: hypothetical protein [Dictyostelium discoideum]
  misc_feature (10)..(131): Homolog of NCBI NO: 23943892 NR Description: oral cancer overexpressed 1 [Homo sapiens]
  misc_feature (2)..(131): Homolog of NCBI NO: 27661646 NR Description: similar to RIKEN cDNA 2210010N10 gene
  misc_feature (7)..(137): Homolog of NCBI NO: 27448229 NR Description: hypothetical protein [Mus musculus]
  misc_feature (7)..(137): Homolog of NCBI NO: 13905220 NR Description: 2210010N10Rik protein [Mus musculus]
  misc_feature (2)..(137): Homolog of NCBI NO: 31980738 NR Description: oral cancer overexpressed 1 [Mus musculus]
  misc_feature (2)..(137): Homolog of NCBI NO: 12843058 NR Description: unnamed protein product [Mus musculus]
  misc_feature (7)..(142): Homolog of NCBI NO: 25411995 NR Description: hypothetical protein At2g20830 [imported] -
  misc_feature (1)..(144): Homolog of NCBI NO: 27261030 NR Description: unknown protein [Oryza sativa (japonica
MDQQAKIDADFLEPTVLLDETHYQEGYKNGYNDGLASGKEEGRQVGLKMGFQVGEELGFFQGCLDVWTSAILIDQNAFTARVRKNIEQLAALVGSYPLSDPENEQIQDVMEKIRLKFRVITASLGVKLEYEGHPKSSKQDAEDL

SEQ ID NO: 110478 - protein, 105 aa, Zea mays subsp. mays
  misc_feature (1)..(105): Ceres Seq. ID no. 15180740
TISRPRLASSRRPIIISLTRLVLQISAATFTSTAPAHLCVSIVAASPPSDTTDLPLAPTKKTHRKKLTAKPHPDPVAALRRPHTERLVSSFGSGGQLHHPQLHLP

SEQ ID NO: 110479 - protein, 96 aa, Zea mays subsp. mays
  misc_feature (1)..(96): Ceres Seq. ID no. 15180741
  misc_feature (1)..(79): Homolog of NCBI NO: 28829147 NR Description: hypothetical protein [Dictyostelium discoideum]
  misc_feature (1)..(83): Homolog of NCBI NO: 23943892 NR Description: oral cancer overexpressed 1 [Homo sapiens]
  misc_feature (1)..(83): Homolog of NCBI NO: 27661646 NR Description: similar to RIKEN cDNA 2210010N10 gene
  misc_feature (1)..(89): Homolog of NCBI NO: 27448229 NR Description: hypothetical protein [Mus musculus]
  misc_feature (1)..(89): Homolog of NCBI NO: 13905220 NR Description: 2210010N10Rik protein [Mus musculus]
  misc_feature (1)..(89): Homolog of NCBI NO: 31980738 NR Description: oral cancer overexpressed 1 [Mus musculus]
  misc_feature (1)..(89): Homolog of NCBI NO: 12843058 NR Description: unnamed protein product [Mus musculus]
  misc_feature (1)..(94): Homolog of NCBI NO: 25411995 NR Description: hypothetical protein At2g20830 [imported] -
  misc_feature (1)..(96): Homolog of NCBI NO: 27261030 NR Description: unknown protein [Oryza sativa (japonica
MGFQVGEELGFFQGCLDVWTSAILIDQNAFTARVRKNIEQLAALVGSYPLSDPENEQIQDVMEKIRLKFRVITASLGVKLEYEGHPKSSKQDAEDL

SEQ ID NO: 110480 - DNA, 1406 bp, Zea mays subsp. mays
  misc_feature (1)..(1406): Ceres Seq. ID no. 15180785
  misc_feature: MA Experiment ID: 108528 Result: Up-regulated in Transcription
  misc_feature: MA Experiment 108528 PARAMETER Experiment Name: Zm_Imbibed_Seeds_P Parameter: Age (day) Value: 5 vs. 2
  misc_feature: MA Experiment 108528 PARAMETER Experiment Name: Zm_Imbibed_Seeds_P Parameter: Organism Value: Zea mays
  misc_feature: MA Experiment 108528 PARAMETER Experiment Name: Zm_Imbibed_Seeds_P Parameter: Plant Line Value: 35A19
  misc_feature: MA Experiment 108528 PARAMETER Experiment Name: Zm_Imbibed_Seeds_P Parameter: Tissue Value: Aerial vs. Embryo
  misc_feature: MA Experiment ID: 108544 Result: Down-regulated in Transcription
  misc_feature: MA Experiment ID: 108547 Result: Up-regulated in Transcription
  misc_feature: MA Experiment 108547 PARAMETER Experiment Name: Zm_Imbibed_Seeds_P Parameter: Age (day) Value: 4 vs. 2
  misc_feature: MA Experiment 108547 PARAMETER Experiment Name: Zm_Imbibed_Seeds_P Parameter: Organism Value: Zea mays
  misc_feature: MA Experiment 108547 PARAMETER Experiment Name: Zm_Imbibed_Seeds_P Parameter: Plant Line Value: 35A19
  misc_feature: MA Experiment 108547 PARAMETER Experiment Name: Zm_Imbibed_Seeds_P Parameter: Tissue Value: Aerial vs. Embryo
  misc_feature: MA Experiment ID: 108556 Result: Up-regulated in Transcription
  misc_feature: MA Experiment 108556 PARAMETER Experiment Name: Zm_Drought_P Parameter: Age (day) Value: 9
  misc_feature: MA Experiment 108556 PARAMETER Experiment Name: Zm_Drought_P Parameter: Organism Value: Zea mays
  misc_feature: MA Experiment 108556 PARAMETER Experiment Name: Zm_Drought_P Parameter: Plant Line Value: 35A19
  misc_feature: MA Experiment 108556 PARAMETER Experiment Name: Zm_Drought_P Parameter: Timepoint (hr) Value: 24
  misc_feature: MA Experiment 108556 PARAMETER Experiment Name: Zm_Drought_P Parameter: Tissue Value: Aerial
  misc_feature: MA Experiment 108556 PARAMETER Experiment Name: Zm_Drought_P Parameter: Treatment Value: Drought vs. No Drought
  misc_feature: MA Experiment ID: 108689 Result: Up-regulated in Transcription
  misc_feature: MA Experiment 108689 PARAMETER Experiment Name: Zm_Drought_Roots_P Parameter: Age (day) Value: 9
  misc_feature: MA Experiment 108689 PARAMETER Experiment Name: Zm_Drought_Roots_P Parameter: Organism Value: Zea mays
  misc_feature: MA Experiment 108689 PARAMETER Experiment Name: Zm_Drought_Roots_P Parameter: Plant Line Value: 35A19
  misc_feature: MA Experiment 108689 PARAMETER Experiment Name: Zm_Drought_Roots_P Parameter: Timepoint (hr) Value: 24
  misc_feature: MA Experiment 108689 PARAMETER Experiment Name: Zm_Drought_Roots_P Parameter: Tissue Value: Roots
  misc_feature: MA Experiment 108689 PARAMETER Experiment Name: Zm_Drought_Roots_P Parameter: Treatment Value: Drought vs. No Drought
  misc_feature: MA Experiment ID: 20000479 Result: Up-regulated in Transcription
  misc_feature: MA Experiment 20000479 PARAMETER Experiment Name: Zm_Drought_P Parameter: Age (day) Value: 10
  misc_feature: MA Experiment 20000479 PARAMETER Experiment Name: Zm_Drought_P Parameter: Organism Value: Zea mays
  misc_feature: MA Experiment 20000479 PARAMETER Experiment Name: Zm_Drought_P Parameter: Plant Line Value: 35A19
  misc_feature: MA Experiment 20000479 PARAMETER Experiment Name: Zm_Drought_P Parameter: Timepoint (hr) Value: 48
  misc_feature: MA Experiment 20000479 PARAMETER Experiment Name: Zm_Drought_P Parameter: Tissue Value: Aerial
  misc_feature: MA Experiment 20000479 PARAMETER Experiment Name: Zm_Drought_P Parameter: Treatment Value: Drought vs. No Drought
  misc_feature: MA Experiment ID: 20000480 Result: Up-regulated in Transcription
  misc_feature: MA Experiment 20000480 PARAMETER Experiment Name: Zm_Drought_P Parameter: Age (day) Value: 11
  misc_feature: MA Experiment 20000480 PARAMETER Experiment Name: Zm_Drought_P Parameter: Organism Value: Zea mays
  misc_feature: MA Experiment 20000480 PARAMETER Experiment Name: Zm_Drought_P Parameter: Plant Line Value: 35A19
  misc_feature: MA Experiment 20000480 PARAMETER Experiment Name: Zm_Drought_P Parameter: Timepoint (hr) Value: 72
  misc_feature: MA Experiment 20000480 PARAMETER Experiment Name: Zm_Drought_P Parameter: Tissue Value: Aerial
  misc_feature: MA Experiment 20000480 PARAMETER Experiment Name: Zm_Drought_P Parameter: Treatment Value: Drought vs. No Drought
  misc_feature: MA Experiment ID: 20000534 Result: Down-regulated in Transcription
  misc_feature: MA Experiment 20000534 PARAMETER Experiment Name: Zm_Hybrid_Pollen_P Parameter: Age (day) Value: 8
  misc_feature: MA Experiment 20000534 PARAMETER Experiment Name: Zm_Hybrid_Pollen_P Parameter: Organism Value: Zea mays
  misc_feature: MA Experiment 20000534 PARAMETER Experiment Name: Zm_Hybrid_Pollen_P Parameter: Plant Line Value: 35A19
  misc_feature: MA Experiment 20000534 PARAMETER Experiment Name: Zm_Hybrid_Pollen_P Parameter: Tissue Value: Pollen vs. Aerial
aaaatatctggacgcagacactgggccgcgctgcttctccgtcacgctgaatcgtcgtcggctcgtcgcctagtcgccgccggccagccgcaggagctcgccgtcgcgcgttttttgaagctctcgaggaaagggggcgcgcgcaggcgcagcatgagagcggccgtgaacacgccacctccgcgctgctactcgcggcggcgcgccagcgccacgctgctggaagcgcgttatgtgttcgaccacgtgccgcagcggcgcctgccgagcctggctgcggaactccgcgcgcggcccgcgtccgtggctgcccggaggcccgcgcggcgctcgcccgcgtctgcggctgcccccacctgtggcgccgcttcagttactcgtttgtttagggcattgctgcagattccaacggcctattcttcaatttctcgcgtgcgtgtagctccggctgcattcttgccagcaagatacaactttgaaggctatatcccccgtagctgctccagttcatcgcttcagatctatagccggtcatcgatgttaaatctaccaccatcttcagctctcacggtgtcctcccagctcacctcctctgacgtagcccagcgttcagaggaatggttcactcttcgcaaggacaagctcaccacaagcaccttcagtaccgccttgggtttctgggctggcaacagaagggcagagctgtggaacgagaaagtttttggcgcgacagagaccaagctggcggacaccgcgaggtctgccatggactggggcacgcatcatgagagcgtagccatagagcagtacacgagcatcacagtaaggccggtgggcaccttcggcttcgcggtgcacgccgaggccagctccggatggctgggagcctcgcccgacggagtcctcgggtgcgggccggacggcgggatcctggaagtcaagtgccccttcaacaagggcaagcccgagctcgcgctgccctggcgcgccatgccctactactacatgccgcaggtgcagggcctgatggagatcatgggcagggactgggcggagctctactgctggacgcccagcgggagcagcctgttccgcgtgccgcgggaccgcgcgtactgggagctcctgcacgaggcgctgagcgacttctggtggggcgacgtggtgcccgcgcgggagctggcgctcctggggaagcacgacgaggcgaggtccttcgagcctcggcccaagcaccggctcacgaacctggtgctgtacaggagcaggaagctggcctccgaggccaagctgctgtggatggatgttggcggccgtgtagagttctttcagtgagacgttctgccggtggttgtactgtgcactgtgttgtgactattctttgaattaactcattgccttccgac

SEQ ID NO: 110481 - protein, 444 aa, Zea mays subsp. mays
  misc_feature (1)..(444): Ceres Seq. ID no. 15180786
  misc_feature (205)..(440): Homolog of NCBI NO: 25402766 NR Description: protein F16A14.4 [imported] - Arabidopsis
  misc_feature (205)..(440): Homolog of NCBI NO: 15222951 NR Description: hypothetical protein [Arabidopsis thaliana]
  misc_feature (168)..(443): Homolog of NCBI NO: 30697546 NR Description: F12A21.19 [Arabidopsis thaliana]
  misc_feature (168)..(443): Homolog of NCBI NO: 25404961 NR Description: protein F12A21.19 [imported] - Arabidopsis
  misc_feature (172)..(443): Homolog of NCBI NO: 10241653 NR Description: contains similarity to F12A21.16
  misc_feature (86)..(443): Homolog of NCBI NO: 38345347 NR Description: OSJNBa0081L15.20 [Oryza sativa (japonica
  misc_feature (83)..(443): Homolog of NCBI NO: 40253518 NR Description: unknown protein [Oryza sativa (japonica
KISGRRHWAALLLRHAESSSARRLVAAGQPQELAVARFLKLSRKGGARRRSMRAAVNTPPPRCYSRRRASATLLEARYVFDHVPQRRLPSLAAELRARPASVAARRPARRSPASAAAPTCGAASVTRLFRALLQIPTAYSSISRVRVAPAAFLPARYNFEGYIPRSCSSSSLQIYSRSSMLNLPPSSALTVSSQLTSSDVAQRSEEWFTLRKDKLTTSTFSTALGFWAGNRRAELWNEKVFGATETKLADTARSAMDWGTHHESVAIEQYTSITVRPVGTFGFAVHAEASSGWLGASPDGVLGCGPDGGILEVKCPFNKGKPELALPWRAMPYYYMPQVQGLMEIMGRDWAELYCWTPSGSSLFRVPRDRAYWELLHEALSDFWWGDVVPARELALLGKHDEARSFEPRPKHRLTNLVLYRSRKLASEAKLLWMDVGGRVEFFQ

SEQ ID NO: 110482 - protein, 393 aa, Zea mays subsp. mays
  misc_feature (1)..(393): Ceres Seq. ID no. 15180787
  misc_feature (154)..(389): Homolog of NCBI NO: 25402766 NR Description: protein F16A14.4 [imported] - Arabidopsis
  misc_feature (154)..(389): Homolog of NCBI NO: 15222951 NR Description: hypothetical protein [Arabidopsis thaliana]
  misc_feature (117)..(392): Homolog of NCBI NO: 30697546 NR Description: F12A21.19 [Arabidopsis thaliana]
  misc_feature (117)..(392): Homolog of NCBI NO: 25404961 NR Description: protein F12A21.19 [imported] - Arabidopsis
  misc_feature (121)..(392): Homolog of NCBI NO: 10241653 NR Description: contains similarity to F12A21.16
  misc_feature (35)..(392): Homolog of NCBI NO: 38345347 NR Description: OSJNBa0081L15.20 [Oryza sativa (japonica
  misc_feature (32)..(392): Homolog of NCBI NO: 40253518 NR Description: unknown protein [Oryza sativa (japonica
MRAAVNTPPPRCYSRRRASATLLEARYVFDHVPQRRLPSLAAELRARPASVAARRPARRSPASAAAPTCGAASVTRLFRALLQIPTAYSSISRVRVAPAAFLPARYNFEGYIPRSCSSSSLQIYSRSSMLNLPPSSALTVSSQLTSSDVAQRSEEWFTLRKDKLTTSTFSTALGFWAGNRRAELWNEKVFGATETKLADTARSAMDWGTHHESVAIEQYTSITVRPVGTFGFAVHAEASSGWLGASPDGVLGCGPDGGILEVKCPFNKGKPELALPWRAMPYYYMPQVQGLMEIMGRDWAELYCWTPSGSSLFRVPRDRAYWELLHEALSDFWWGDVVPARELALLGKHDEARSFEPRPKHRLTNLVLYRSRKLASEAKLLWMDVGGRVEFFQ

SEQ ID NO: 110483 - protein, 265 aa, Zea mays subsp. mays
  misc_feature (1)..(265): Ceres Seq. ID no. 15180788
  misc_feature (26)..(261): Homolog of NCBI NO: 25402766 NR Description: protein F16A14.4 [imported] - Arabidopsis
  misc_feature (26)..(261): Homolog of NCBI NO: 15222951 NR Description: hypothetical protein [Arabidopsis thaliana]
  misc_feature (1)..(264): Homolog of NCBI NO: 30697546 NR Description: F12A21.19 [Arabidopsis thaliana]
  misc_feature (1)..(264): Homolog of NCBI NO: 25404961 NR Description: protein F12A21.19 [imported] - Arabidopsis
  misc_feature (1)..(264): Homolog of NCBI NO: 10241653 NR Description: contains similarity to F12A21.16
  misc_feature (1)..(264): Homolog of NCBI NO: 38345347 NR Description: OSJNBa0081L15.20 [Oryza sativa (japonica
  misc_feature (1)..(264): Homolog of NCBI NO: 40253518 NR Description: unknown protein [Oryza sativa (japonica
MLNLPPSSALTVSSQLTSSDVAQRSEEWFTLRKDKLTTSTFSTALGFWAGNRRAELWNEKVFGATETKLADTARSAMDWGTHHESVAIEQYTSITVRPVGTFGFAVHAEASSGWLGASPDGVLGCGPDGGILEVKCPFNKGKPELALPWRAMPYYYMPQVQGLMEIMGRDWAELYCWTPSGSSLFRVPRDRAYWELLHEALSDFWWGDVVPARELALLGKHDEARSFEPRPKHRLTNLVLYRSRKLASEAKLLWMDVGGRVEFFQ

SEQ ID NO: 110484 - DNA, 1097 bp, Zea mays subsp. mays
  misc_feature (1)..(1097): Ceres Seq. ID no. 15180781
aaccgccgccgaggagcagcgctgcgtctcaagagctccccggcgagatcgtccatcaccatcaaaaaggccgcaccacactgatcacaagcatcaaacttcctaaagcgctctggtcgcagcctcgcagtggccgcagctgcagcgtcccctcccctttcgccatcgagcatcacctgtgctgaccgccggcgcgtaactgcaccagggtcactgcttacgaggaagaggaggcgcaacgcaacagtgttgttgggttgtctcgtcgtgcggtgccggtgcccatgggcgtgcacgccagggcgatgagctggtacacgagccccgccggggtcgccggcgccggggagcgccgccgaggcgcagcacgcgctgagcagcagcccccggggcggcgacaccagcttcgacaccaacatggtcgtcgtccttgccgcgctgctgttcgcgctcctcttcgcgctgggcatcaactcgctcgcgcgctgcctcatccgctgggcgcgccgcgcgccggcagcggagggcggcggcggcgggttcgagaagcgcgtgctccggagcatgcccgtcgaggtgtacggcgccgcggccgtcaccgtcgccgacgtctgcgccatctgcctcggcgagttcgcggacggcgagaaggtgcgcgtgctgccgcgctgcacccacggcttccatgtccgctgcgtcgacacctggctcctgtcgcacgactcctgccccacgtgccgggcctccgtgctcgacggcgcaaaggccgccactcccgccggtgggggcagccggtggcagggcagcgaggctgctgccatcgccgttgtcattcgatgacgtggacaggaagggcccgcgtgcccattggtggtggagccacacggcaggtatgcaggagcttcgttccgtagtcgggagatatttttctgtgagagaccgaccagtgggcccagaccctttgtagcttcctcggtcgcaggcaagtcaaggttgcagctggccatgttggttgccaccatggaccgtccactgtcctgtggcaggcatgtcgaaaccgatatgattccatcaatcatgtggtctgatcttgacac

SEQ ID NO: 110485 - protein, 209 aa, Zea mays subsp. mays
  misc_feature (1)..(209): Ceres Seq. ID no. 15180782
MGVHARAMSWYTSPAGVAGAGERRRGAARAEQQPPGRRHQLRHQHGRRPCRAAVRAPLRAGHQLARALPHPLGAPRAGSGGRRRRVREARAPEHARRGVRRRGRHRRRRLRHLPRRVRGRREGARAAALHPRLPCPLRRHLAPVARLLPHVPGLRARRRKGRHSRRWGQPVAGQRGCCHRRCHSMTWTGRARVPIGGGATRQVCRSFVP

SEQ ID NO: 110486 - protein, 202 aa, Zea mays subsp. mays
  misc_feature (1)..(202): Ceres Seq. ID no. 15180783
MSWYTSPAGVAGAGERRRGAARAEQQPPGRRHQLRHQHGRRPCRAAVRAPLRAGHQLARALPHPLGAPRAGSGGRRRRVREARAPEHARRGVRRRGRHRRRRLRHLPRRVRGRREGARAAALHPRLPCPLRRHLAPVARLLPHVPGLRARRRKGRHSRRWGQPVAGQRGCCHRRCHSMTWTGRARVPIGGGATRQVCRSFVP

SEQ ID NO: 110487 - protein, 140 aa, Zea mays subsp. mays
  misc_feature (1)..(140): Ceres Seq. ID no. 15180784
  misc_feature (66)..(107): Pfam Name: Zinc finger, C3HC4 type (RING finger) Pfam Description: Zinc finger, C3HC4 type (RING finger)
  misc_feature (1)..(122): Homolog of NCBI NO: 18092342 NR Description: ring-H2 zinc finger protein [Zea mays]
  misc_feature (1)..(122): Homolog of NCBI NO: 21645888 NR Description: ring-H2 zinc finger protein [Zea mays]
  misc_feature (27)..(123): Homolog of NCBI NO: 34912528 NR Description: P0410E03.2 [Oryza sativa (japonica
  misc_feature (1)..(108): Homolog of NCBI NO: 15222073 NR Description: RING-H2 finger protein RHA3a -related
  misc_feature (1)..(116): Homolog of NCBI NO: 9293902 NR Description: contains similarity to RING zinc finger
  misc_feature (1)..(140): Homolog of NCBI NO: 32488364 NR Description: OSJNBb0108J11.15 [Oryza sativa (japonica
  misc_feature (1)..(112): Homolog of NCBI NO: 15228395 NR Description: RING zinc finger protein -related [Arabidopsis
  misc_feature (1)..(113): Homolog of NCBI NO: 15241087 NR Description: expressed protein [Arabidopsis thaliana]
  misc_feature (1)..(133): Homolog of NCBI NO: 15239062 NR Description: RING zinc finger protein-related [Arabidopsis
  misc_feature (1)..(139): Homolog of NCBI NO: 34907826 NR Description: P0485B12.26 [Oryza sativa (japonica
MVVVLAALLFALLFALGINSLARCLIRWARRAPAAEGGGGGFEKRVLRSMPVEVYGAAAVTVADVCAICLGEFADGEKVRVLPRCTHGFHVRCVDTWLLSHDSCPTCRASVLDGAKAATPAGGGSRWQGSEAAAIAVVIR

SEQ ID NO: 110488 - DNA, 785 bp, Zea mays subsp. mays
  misc_feature (1)..(785): Ceres Seq. ID no. 13622409
aaaccctaatgaacctagcgccgcttcctccctcccaaacccatggcttcccaccttgacttccgctgcctggatgagggcctcggcggcgaacgcggcaagcgcaagcgccgcgaggatgcctcggcggcggccgcggactccatggacctcgatgctgacgccccccggctgtctaagctccgcgccatgccttccctctccgacccctcgaagccggcctccttcggccagcccacctacgacggcgtcatcgcagggcggttgtcggggcgccggtggaaggagccccgcacccggcggtcgtcggccgtggcggtgtcgcggaagccgatcccgctggaacagcgcgtccgggagaagtctctgaagcgcgcgtaccaggcccgcaaggcggagctcaaggaggagatccggcagaacaaggttgcgaagcggaaggcccgcgaggagcgggagaagcggaagcaggagaacgtgctccgcacgggcaccaagctgcagcgggtcaccaacccgaagacgatccagaagatcgccaagtccaagaagcgcaagcagctcaaggtcgtccccgacgagttcttcggcggcaagaagtcggaggccagccggcgcatgcaggtgcctggacttgagaattgaatctcaattctcaatctctgtttctggggtcgcgttgagttcatagtggttaattcgacgacgattttctacttgcttatggtagtttgaagtatgatcagattaagtgattacaatggtacgcaagttatcaagttctg

SEQ ID NO: 110489 - protein, 200 aa, Zea mays subsp. mays
  misc_feature (1)..(200): Ceres Seq. ID no. 13622410
  misc_feature (1)..(187): Homolog of NCBI NO: 18402657 NR Description: expressed protein [Arabidopsis thaliana]
MASHLDFRCLDEGLGGERGKRKRREDASAAAADSMDLDADAPRLSKLRAMPSLSDPSKPASFGQPTYDGVIAGRLSGRRWKEPRTRRSSAVAVSRKPIPLEQRVREKSLKRAYQARKAELKEEIRQNKVAKRKAREEREKRKQENVLRTGTKLQRVTNPKTIQKIAKSKKRKQLKVVPDEFFGGKKSEASRRMQVPGLEN

SEQ ID NO: 110490 - protein, 166 aa, Zea mays subsp. mays
  misc_feature (1)..(166): Ceres Seq. ID no. 13622411
  misc_feature (1)..(153): Homolog of NCBI NO: 18402657 NR Description: expressed protein [Arabidopsis thaliana]
MDLDADAPRLSKLRAMPSLSDPSKPASFGQPTYDGVIAGRLSGRRWKEPRTRRSSAVAVSRKPIPLEQRVREKSLKRAYQARKAELKEEIRQNKVAKRKAREEREKRKQENVLRTGTKLQRVTNPKTIQKIAKSKKRKQLKVVPDEFFGGKKSEASRRMQVPGLEN

SEQ ID NO: 110491 - protein, 151 aa, Zea mays subsp. mays
  misc_feature (1)..(151): Ceres Seq. ID no. 13622412
  misc_feature (1)..(138): Homolog of NCBI NO: 18402657 NR Description: expressed protein [Arabidopsis thaliana]
MPSLSDPSKPASFGQPTYDGVIAGRLSGRRWKEPRTRRSSAVAVSRKPIPLEQRVREKSLKRAYQARKAELKEEIRQNKVAKRKAREEREKRKQENVLRTGTKLQRVTNPKTIQKIAKSKKRKQLKVVPDEFFGGKKSEASRRMQVPGLEN

SEQ ID NO: 110492 - DNA, 1116 bp, Zea mays subsp. mays
  misc_feature (1)..(1116): Ceres Seq. ID no. 15180098
  misc_feature: MA Experiment ID: 108527 Result: Up-regulated in Transcription
  misc_feature: MA Experiment 108527 PARAMETER Experiment Name: Zm_5mM_NO_P Parameter: Age (day) Value: 8
  misc_feature: MA Experiment 108527 PARAMETER Experiment Name: Zm_5mM_NO_P Parameter: Organism Value: Zea mays
  misc_feature: MA Experiment 108527 PARAMETER Experiment Name: Zm_5mM_NO_P Parameter: Plant Line Value: 35A19
  misc_feature: MA Experiment 108527 PARAMETER Experiment Name: Zm_5mM_NO_P Parameter: Timepoint (hr) Value: 6
  misc_feature: MA Experiment 108527 PARAMETER Experiment Name: Zm_5mM_NO_P Parameter: Tissue Value: Aerial
  misc_feature: MA Experiment 108527 PARAMETER Experiment Name: Zm_5mM_NO_P Parameter: Treatment Value: 5mM NO vs. No Treatment
  misc_feature: MA Experiment ID: 108529 Result: Up-regulated in Transcription
  misc_feature: MA Experiment 108529 PARAMETER Experiment Name: Zm_Imbibed_Seeds_P Parameter: Age (day) Value: 5 vs. 2
  misc_feature: MA Experiment 108529 PARAMETER Experiment Name: Zm_Imbibed_Seeds_P Parameter: Organism Value: Zea mays
  misc_feature: MA Experiment 108529 PARAMETER Experiment Name: Zm_Imbibed_Seeds_P Parameter: Plant Line Value: 35A19
  misc_feature: MA Experiment 108529 PARAMETER Experiment Name: Zm_Imbibed_Seeds_P Parameter: Tissue Value: Roots vs. Embryo
  misc_feature: MA Experiment ID: 108534 Result: Up-regulated in Transcription
  misc_feature: MA Experiment 108534 PARAMETER Experiment Name: Zm_4deg_Cold_P Parameter: Age (hr) Value: 8
  misc_feature: MA Experiment 108534 PARAMETER Experiment Name: Zm_4deg_Cold_P Parameter: Organism Value: Zea mays
  misc_feature: MA Experiment 108534 PARAMETER Experiment Name: Zm_4deg_Cold_P Parameter: Plant Line Value: 35A19
  misc_feature: MA Experiment 108534 PARAMETER Experiment Name: Zm_4deg_Cold_P Parameter: Temperature (deg C) Value: 4 vs. 22
  misc_feature: MA Experiment 108534 PARAMETER Experiment Name: Zm_4deg_Cold_P Parameter: Timepoint (hr) Value: 6
  misc_feature: MA Experiment 108534 PARAMETER Experiment Name: Zm_4deg_Cold_P Parameter: Tissue Value: Aerial
  misc_feature: MA Experiment ID: 108535 Result: Down-regulated in Transcription
  misc_feature: MA Experiment 108535 PARAMETER Experiment Name: Zm_Meristem_P Parameter: Age (day) Value: 8
  misc_feature: MA Experiment 108535 PARAMETER Experiment Name: Zm_Meristem_P Parameter: Organism Value: Zea mays
  misc_feature: MA Experiment 108535 PARAMETER Experiment Name: Zm_Meristem_P Parameter: Plant Line Value: 35A19
  misc_feature: MA Experiment 108535 PARAMETER Experiment Name: Zm_Meristem_P Parameter: Tissue Value: Root Meristem vs. Above Root Meristem
  misc_feature: MA Experiment ID: 108545 Result: Down-regulated in Transcription
  misc_feature: MA Experiment 108545 PARAMETER Experiment Name: Zm_Imbibed_Seeds_P Parameter: Age (day) Value: 3 vs. 2
  misc_feature: MA Experiment 108545 PARAMETER Experiment Name: Zm_Imbibed_Seeds_P Parameter: Organism Value: Zea mays
  misc_feature: MA Experiment 108545 PARAMETER Experiment Name: Zm_Imbibed_Seeds_P Parameter: Plant Line Value: 35A19
  misc_feature: MA Experiment 108545 PARAMETER Experiment Name: Zm_Imbibed_Seeds_P Parameter: Tissue Value: Aerial vs. Embryo
  misc_feature: MA Experiment ID: 20000108 Result: Down-regulated in Transcription
  misc_feature: MA Experiment 20000108 PARAMETER Experiment Name: Zm_Root-Tips_P Parameter: Age (day) Value: 12
  misc_feature: MA Experiment 20000108 PARAMETER Experiment Name: Zm_Root-Tips_P Parameter: Organism Value: Zea mays
  misc_feature: MA Experiment 20000108 PARAMETER Experiment Name: Zm_Root-Tips_P Parameter: Tissue Value: Root tips vs. Root mid region    35
  misc_feature: MA Experiment 20000108 PARAMETER Experiment Name: Zm_Root-Tips_P Parameter: Tissue Value: Root tips vs. Root mid region   Sequence Listing-Misc Features (4)
  misc_feature: MA Experiment ID: 20000478 Result: Up-regulated in Transcription
  misc_feature: MA Experiment 20000478 PARAMETER Experiment Name: Zm_5mM_SA_P Parameter: Age (day) Value: 11
  misc_feature: MA Experiment 20000478 PARAMETER Experiment Name: Zm_5mM_SA_P Parameter: Organism Value: Zea mays
  misc_feature: MA Experiment 20000478 PARAMETER Experiment Name: Zm_5mM_SA_P Parameter: Plant Line Value: 35A19
  misc_feature: MA Experiment 20000478 PARAMETER Experiment Name: Zm_5mM_SA_P Parameter: Timepoint (hr) Value: 72
  misc_feature: MA Experiment 20000478 PARAMETER Experiment Name: Zm_5mM_SA_P Parameter: Tissue Value: Aerial
  misc_feature: MA Experiment 20000478 PARAMETER Experiment Name: Zm_5mM_SA_P Parameter: Treatment Value: 5mM SA vs. No Treatment
  misc_feature: MA Experiment ID: 20000532 Result: Up-regulated in Transcription
  misc_feature: MA Experiment 20000532 PARAMETER Experiment Name: Zm_0.001percent_MeJA_P Parameter: Age (day) Value: 10
  misc_feature: MA Experiment 20000532 PARAMETER Experiment Name: Zm_0.001percent_MeJA_P Parameter: Organism Value: Zea mays
  misc_feature: MA Experiment 20000532 PARAMETER Experiment Name: Zm_0.001percent_MeJA_P Parameter: Plant Line Value: 35A19
  misc_feature: MA Experiment 20000532 PARAMETER Experiment Name: Zm_0.001percent_MeJA_P Parameter: Timepoint (hr) Value: 48
  misc_feature: MA Experiment 20000532 PARAMETER Experiment Name: Zm_0.001percent_MeJA_P Parameter: Tissue Value: Aerial
  misc_feature: MA Experiment 20000532 PARAMETER Experiment Name: Zm_0.001percent_MeJA_P Parameter: Treatment Value: 0.001percent MeJA vs. No Treatment
  misc_feature: MA Experiment ID: 20000535 Result: Down-regulated in Transcription
  misc_feature: MA Experiment 20000535 PARAMETER Experiment Name: Zm_Hybrid_Seed_Dev_P Parameter: DAP Value: 30 vs. 12
  misc_feature: MA Experiment 20000535 PARAMETER Experiment Name: Zm_Hybrid_Seed_Dev_P Parameter: Organism Value: Zea mays
  misc_feature: MA Experiment 20000535 PARAMETER Experiment Name: Zm_Hybrid_Seed_Dev_P Parameter: Plant Line Value: 35A19
  misc_feature: MA Experiment 20000535 PARAMETER Experiment Name: Zm_Hybrid_Seed_Dev_P Parameter: Tissue Value: Embryo vs. Unfert Floret
  misc_feature: MA Experiment ID: 20000630 Result: Up-regulated in Transcription
  misc_feature: MA Experiment 20000630 PARAMETER Experiment Name: Zm_Herbicide-Treatments_P Parameter: Timepoint (hr) Value: 4
  misc_feature: MA Experiment 20000630 PARAMETER Experiment Name: Zm_Herbicide-Treatments_P Parameter: Tissue Value: Aerial
  misc_feature: MA Experiment 20000630 PARAMETER Experiment Name: Zm_Herbicide-Treatments_P Parameter: Treatment Value: Roundup vs. No Treatment
acagcagccaggattccagaaacagagaggccaggtgccaagcaaaggcggtgcagtgcaggcagggcgtgtggagaagcagagcagcgggcggcgcacctgcacttggcagctctggccatggcggatcaccagaggattcaccctgtagacctggaggccggcaaccggccgacgacgccgctggtgccgggagcctcgttccggtcggacaagggcgacccagcgcagcgcgcgaacaaccaccaccaccaacagcaacaacgaggctacgtctacgtccccgggccgctgcctccgccgccgcgtcgcgccgcgccaccggcgccgcctctgccgccgccgaagcggcgcgggcggggctgctgctgccggttcctctgctgcgccgtgataaccgcggtcgtgctggcggtgctcgccgcggcggcggcgggcgcgctgtacctgttgctggaccccaaggcgccgcggtactcggtggaccggctctccgtgtcggcgttccaggtggacccgtcgacgtttacggcgcgggccgggttcgacgtggcggtgacggcggcgaaccccaactcgcgcatcggcatccagtacgagcccgggtccagcctgggcgtgtggtaccagtcgtaccgcctggcgcggggcgcgctgccgcccttctaccagggccaccgcaacaccacggtgctggcgctggccatggccggggaggtgcagctgggcggcgccgccgtggccgggatgcgggacgcgcggcgttcgggcgccgtgccgctcgtgttccgcgccgacgtgcccgtgcgcgtcgagctcggcaccttcaagctctggaaggtcacgtccagggtgcgctgcgacctcgtcgtcgacaggctcatggacgtcagcagccccatcaagatcaaggccagcaactgcaagttcggcctcaagctgtgatccgttcgtcgccgcgttggattcttttggctggctgagtgctggacctgcttgctggtagtatttgcgcaggtgcagacgtgcagtgcactcccgccaacctcgtcggtgttcatcccggctgtgtacagatggcagtgtatcattgctgttatagaggaataattttgc

SEQ ID NO: 110493 - protein, 326 aa, Zea mays subsp. mays
  misc_feature (1)..(326): Ceres Seq. ID no. 15180099
  misc_feature (29)..(273): Homolog of NCBI NO: 9625624 NR Description: nuclear antigen EBNA1 [Human herpesvirus 4]
  misc_feature (8)..(304): Homolog of NCBI NO: 23106243 NR Description: hypothetical protein [Azotobacter vinelandii]
SSQDSRNREARCQAKAVQCRQGVWRSRAAGGAPALGSSGHGGSPEDSPCRPGGRQPADDAAGAGSLVPVGQGRPSAAREQPPPPTATTRLRLRPRAAASAAASRRATGAASAAAEAARAGLLLPVPLLRRDNRGRAGGARRGGGGRAVPVAGPQGAAVLGGPALRVGVPGGPVDVYGAGRVRRGGDGGEPQLAHRHPVRARVQPGRVVPVVPPGAGRAAALLPGPPQHHGAGAGHGRGGAAGRRRRGRDAGRAAFGRRAARVPRRRARARRARHLQALEGHVQGALRPRRRQAHGRQQPHQDQGQQLQVRPQAVIRSSPRWILLAG

SEQ ID NO: 110494 - protein, 314 aa, Zea mays subsp. mays
  misc_feature (1)..(314): Ceres Seq. ID no. 15180100
  misc_feature (116)..(314): Homolog of NCBI NO: 15242167 NR Description: hypothetical protein [Arabidopsis thaliana]
  misc_feature (100)..(309): Homolog of NCBI NO: 34909192 NR Description: P0425G02.19 [Oryza sativa (japonica
  misc_feature (100)..(314): Homolog of NCBI NO: 18401317 NR Description: expressed protein [Arabidopsis thaliana]
  misc_feature (95)..(313): Homolog of NCBI NO: 38636986 NR Description: unknown protein [Oryza sativa (japonica
  misc_feature (99)..(314): Homolog of NCBI NO: 15221846 NR Description: hypothetical protein [Arabidopsis thaliana]
  misc_feature (102)..(314): Homolog of NCBI NO: 10178216 NR Description: gb|AAF23842.1~gene_id:MLF18.15~similar to unknown
  misc_feature (102)..(314): Homolog of NCBI NO: 15239459 NR Description: hypothetical protein [Arabidopsis thaliana]
  misc_feature (97)..(314): Homolog of NCBI NO: 6686408 NR Description: F1E22.7 [Arabidopsis thaliana]
  misc_feature (97)..(314): Homolog of NCBI NO: 18408342 NR Description: expressed protein [Arabidopsis thaliana]
  misc_feature (43)..(314): Homolog of NCBI NO: 38344198 NR Description: OSJNBa0064G10.14 [Oryza sativa (japonica
TAARIPETERPGAKQRRCSAGRACGEAEQRAAHLHLAALAMADHQRIHPVDLEAGNRPTTPLVPGASFRSDKGDPAQRANNHHHQQQQRGYVYVPGPLPPPPRRAAPPAPPLPPPKRRGRGCCCRFLCCAVITAVVLAVLAAAAAGALYLLLDPKAPRYSVDRLSVSAFQVDPSTFTARAGFDVAVTAANPNSRIGIQYEPGSSLGVWYQSYRLARGALPPFYQGHRNTTVLALAMAGEVQLGGAAVAGMRDARRSGAVPLVFRADVPVRVELGTFKLWKVTSRVRCDLVVDRLMDVSSPIKIKASNCKFGLKL

SEQ ID NO: 110495 - protein, 274 aa, Zea mays subsp. mays
  misc_feature (1)..(274): Ceres Seq. ID no. 15180101
  misc_feature (76)..(274): Homolog of NCBI NO: 15242167 NR Description: hypothetical protein [Arabidopsis thaliana]
  misc_feature (60)..(269): Homolog of NCBI NO: 34909192 NR Description: P0425G02.19 [Oryza sativa (japonica
  misc_feature (60)..(274): Homolog of NCBI NO: 18401317 NR Description: expressed protein [Arabidopsis thaliana]
  misc_feature (55)..(273): Homolog of NCBI NO: 38636986 NR Description: unknown protein [Oryza sativa (japonica
  misc_feature (59)..(274): Homolog of NCBI NO: 15221846 NR Description: hypothetical protein [Arabidopsis thaliana]
  misc_feature (62)..(274): Homolog of NCBI NO: 10178216 NR Description: gb|AAF23842.1~gene_id:MLF18.15~similar to unknown
  misc_feature (62)..(274): Homolog of NCBI NO: 15239459 NR Description: hypothetical protein [Arabidopsis thaliana]
  misc_feature (57)..(274): Homolog of NCBI NO: 6686408 NR Description: F1E22.7 [Arabidopsis thaliana]
  misc_feature (57)..(274): Homolog of NCBI NO: 18408342 NR Description: expressed protein [Arabidopsis thaliana]
  misc_feature (3)..(274): Homolog of NCBI NO: 38344198 NR Description: OSJNBa0064G10.14 [Oryza sativa (japonica
MADHQRIHPVDLEAGNRPTTPLVPGASFRSDKGDPAQRANNHHHQQQQRGYVYVPGPLPPPPRRAAPPAPPLPPPKRRGRGCCCRFLCCAVITAVVLAVLAAAAAGALYLLLDPKAPRYSVDRLSVSAFQVDPSTFTARAGFDVAVTAANPNSRIGIQYEPGSSLGVWYQSYRLARGALPPFYQGHRNTTVLALAMAGEVQLGGAAVAGMRDARRSGAVPLVFRADVPVRVELGTFKLWKVTSRVRCDLVVDRLMDVSSPIKIKASNCKFGLKL

SEQ ID NO: 110496 - DNA, 1433 bp, Zea mays subsp. mays
  misc_feature (1)..(1433): Ceres Seq. ID no. 13598882
agaacatcctaatcgaaaacagaacagagtctacggcgccgccgtcgcacgacaggagagggagagggagagagacgcgggctttgacttgccgccggtgcgtccgtgcgtgcctggtgggaggagtgggagacgccggtacagtacaggagccatggcgccgagctgctacgacgcggcagcgtccatgctcctctgcgccgaggagcacagcagcatcctgtggtacgacgaggaggaggaggagctggaggcggtcgggagaaggagaggccagtcgccgggctacggggacgacttcggcgcggacttgttcccgccgcagtcggaggaatgcgtggccggtctggtggagcgggaacgggaccacatgccggggccgtgctacggcgacaggctgcgcggcggcggcggctgtctctgcgtccgccgggaggccgtcgactggatttggaaggcttacacgcaccacaggttccgccctctcactgcctacttggcagtgaactacctcgatcgcttcctctcgctgtctgaggtgccggactgcaaggactggatgacgcagctcctcgcggtggcgtgcgtttctctggccgccaagatggaggaaaccgccgtcccgcagtgcctggaccttcaggaggtcggagacgcgcggtacgtgttcgaggcgaagacggtccagaggatggagctcctggttctaacaaccctcaactggaggatgcatgccgtgacgccgttctcctacgtggattacttcctgaacaagctcaacaacggcggcagcacggcgccgaggagctgctggctcttgcagtccgcggagcttatcttgcgtgcggccagaggaaccggctgcgtcgggttcaggccgtccgagatcgccgccgcggttgcagccgccgtggccggagacgtggacgacgcggacggcgtcgagaacgcctgctgcgctcacgtagataaggagcgggtgttgcggtgccaggaagcgatcgggtccatggcgtcctcggcggccattgacgacgctaccgtgccaccgaaatctgcgagacgcaggagctcccccgtgcccgtgccgcagagccctgtgggggggaacaccaccttgcacggagagccgaaacctcctccatgcagggatctggatgcctgctaggtttgcttcggagcattacgagcacgcgcataacttggctcgtactgtaaggtgtgcaaactgcacacagcggaggctgtgttatttgtattctgaagctttcttgtgtttcgtcaagaaagcttctctaacttttatcctgcactatcagataaacggtaaattgatagagaataagatgttttcgagctcatgtttagtggcaaacgctttatatttttggcaagctgtgaaggagctgaaccagtgacaactcgaagaatcc

SEQ ID NO: 110497 - protein, 388 aa, Zea mays subsp. mays
  misc_feature (1)..(388): Ceres Seq. ID no. 13598883
  misc_feature (111)..(244): Pfam Name: Cyclin, N-terminal domain Pfam Description: Cyclin, N-terminal domain
  misc_feature (108)..(339): Homolog of NCBI NO: 15238462 NR Description: cyclin, putative [Arabidopsis thaliana]
  misc_feature (105)..(354): Homolog of NCBI NO: 30683167 NR Description: cyclin family [Arabidopsis thaliana]
  misc_feature (64)..(368): Homolog of NCBI NO: 22091622 NR Description: cyclin D2 [Daucus carota]
  misc_feature (52)..(226): Homolog of NCBI NO: 19070617 NR Description: D-type cyclin [Zea mays]
  misc_feature (52)..(367): Homolog of NCBI NO: 34906810 NR Description: D-type cyclin-like protein
  misc_feature (109)..(368): Homolog of NCBI NO: 7484663 NR Description: cyclin D-like protein - red goosefoot
  misc_feature (53)..(368): Homolog of NCBI NO: 4160298 NR Description: cyclin D2.1 protein [Nicotiana tabacum]
  misc_feature (52)..(368): Homolog of NCBI NO: 19070611 NR Description: D-type cyclin [Zea mays]
  misc_feature (53)..(368): Homolog of NCBI NO: 18916916 NR Description: cyclin [Oryza sativa (japonica cultivar-group)]
  misc_feature (52)..(368): Homolog of NCBI NO: 19070615 NR Description: D-type cyclin [Zea mays]
EHPNRKQNRVYGAAVARQERERERDAGFDLPPVRPCVPGGRSGRRRYSTGAMAPSCYDAAASMLLCAEEHSSILWYDEEEEELEAVGRRRGQSPGYGDDFGADLFPPQSEECVAGLVERERDHMPGPCYGDRLRGGGGCLCVRREAVDWIWKAYTHHRFRPLTAYLAVNYLDRFLSLSEVPDCKDWMTQLLAVACVSLAAKMEETAVPQCLDLQEVGDARYVFEAKTVQRMELLVLTTLNWRMHAVTPFSYVDYFLNKLNNGGSTAPRSCWLLQSAELILRAARGTGCVGFRPSEIAAAVAAAVAGDVDDADGVENACCAHVDKERVLRCQEAIGSMASSAAIDDATVPPKSARRRSSPVPVPQSPVGGNTTLHGEPKPPPCRDLDAC

SEQ ID NO: 110498 - protein, 337 aa, Zea mays subsp. mays
  misc_feature (1)..(337): Ceres Seq. ID no. 13598884
  misc_feature (60)..(193): Pfam Name: Cyclin, N-terminal domain Pfam Description: Cyclin, N-terminal domain
  misc_feature (2)..(317): Homolog of NCBI NO: 4160298 NR Description: cyclin D2.1 protein [Nicotiana tabacum]
  misc_feature (1)..(317): Homolog of NCBI NO: 19070611 NR Description: D-type cyclin [Zea mays]
  misc_feature (57)..(288): Homolog of NCBI NO: 15238462 NR Description: cyclin, putative [Arabidopsis thaliana]
  misc_feature (13)..(317): Homolog of NCBI NO: 22091622 NR Description: cyclin D2 [Daucus carota]
  misc_feature (1)..(316): Homolog of NCBI NO: 34906810 NR Description: D-type cyclin-like protein
  misc_feature (58)..(317): Homolog of NCBI NO: 7484663 NR Description: cyclin D-like protein - red goosefoot
  misc_feature (1)..(175): Homolog of NCBI NO: 19070617 NR Description: D-type cyclin [Zea mays]
  misc_feature (54)..(303): Homolog of NCBI NO: 30683167 NR Description: cyclin family [Arabidopsis thaliana]
  misc_feature (2)..(317): Homolog of NCBI NO: 18916916 NR Description: cyclin [Oryza sativa (japonica cultivar-group)]
  misc_feature (1)..(317): Homolog of NCBI NO: 19070615 NR Description: D-type cyclin [Zea mays]
MAPSCYDAAASMLLCAEEHSSILWYDEEEEELEAVGRRRGQSPGYGDDFGADLFPPQSEECVAGLVERERDHMPGPCYGDRLRGGGGCLCVRREAVDWIWKAYTHHRFRPLTAYLAVNYLDRFLSLSEVPDCKDWMTQLLAVACVSLAAKMEETAVPQCLDLQEVGDARYVFEAKTVQRMELLVLTTLNWRMHAVTPFSYVDYFLNKLNNGGSTAPRSCWLLQSAELILRAARGTGCVGFRPSEIAAAVAAAVAGDVDDADGVENACCAHVDKERVLRCQEAIGSMASSAAIDDATVPPKSARRRSSPVPVPQSPVGGNTTLHGEPKPPPCRDLDAC

SEQ ID NO: 110499 - protein, 326 aa, Zea mays subsp. mays
  misc_feature (1)..(326): Ceres Seq. ID no. 13598885
  misc_feature (49)..(182): Pfam Name: Cyclin, N-terminal domain Pfam Description: Cyclin, N-terminal domain
  misc_feature (46)..(277): Homolog of NCBI NO: 15238462 NR Description: cyclin, putative [Arabidopsis thaliana]
  misc_feature (43)..(292): Homolog of NCBI NO: 30683167 NR Description: cyclin family [Arabidopsis thaliana]
  misc_feature (2)..(306): Homolog of NCBI NO: 22091622 NR Description: cyclin D2 [Daucus carota]
  misc_feature (1)..(164): Homolog of NCBI NO: 19070617 NR Description: D-type cyclin [Zea mays]
  misc_feature (1)..(305): Homolog of NCBI NO: 34906810 NR Description: D-type cyclin-like protein
  misc_feature (47)..(306): Homolog of NCBI NO: 7484663 NR Description: cyclin D-like protein - red goosefoot
  misc_feature (1)..(306): Homolog of NCBI NO: 4160298 NR Description: cyclin D2.1 protein [Nicotiana tabacum]
  misc_feature (1)..(306): Homolog of NCBI NO: 19070611 NR Description: D-type cyclin [Zea mays]
  misc_feature (1)..(306): Homolog of NCBI NO: 18916916 NR Description: cyclin [Oryza sativa (japonica cultivar-group)]
  misc_feature (1)..(306): Homolog of NCBI NO: 19070615 NR Description: D-type cyclin [Zea mays]
MLLCAEEHSSILWYDEEEEELEAVGRRRGQSPGYGDDFGADLFPPQSEECVAGLVERERDHMPGPCYGDRLRGGGGCLCVRREAVDWIWKAYTHHRFRPLTAYLAVNYLDRFLSLSEVPDCKDWMTQLLAVACVSLAAKMEETAVPQCLDLQEVGDARYVFEAKTVQRMELLVLTTLNWRMHAVTPFSYVDYFLNKLNNGGSTAPRSCWLLQSAELILRAARGTGCVGFRPSEIAAAVAAAVAGDVDDADGVENACCAHVDKERVLRCQEAIGSMASSAAIDDATVPPKSARRRSSPVPVPQSPVGGNTTLHGEPKPPPCRDLDAC

SEQ ID NO: 110500 - DNA, 1671 bp, Zea mays subsp. mays
  misc_feature (1)..(1671): Ceres Seq. ID no. 13598865
aactacggtaactcgtctgctcgcatttcctcccaatccatcccgcctccaaacccgaactccaagtcgccccgcatcgatggcgcccaaggccgagaagaagcccgcggcgaagaagccggcggaggaggagtacgacgcggatgacggctttggcgacgagccaatcccaatcgcgaggccggtctcggacttcgacatcgttatagatgctcttccgccgggctcggtctctgatgttcaccagattgcccggcggatggtggacgctggctttggccgcgagtgcgccgaggcatacgcggccgcacgccgcggtttcatcgacgagagcgtcgctcgccttggcatccgttcccgtacggtcgacgaggtccactccttaccatgggaggagctcgagtttgacattgctcgctggatcccagccttcaagatggtgtttcgcatcctaatccccagcgagcgccgcctctgtgatcgtgtcttcgaaggccttgctccgtacggcgaccttgcctttgttgctgccgtgcgcacccaggcgcttcagcttatttcattcggagatgcagttgctgctgccagccgcgcgccagaacggctcttccgtgttattgacatgtatgaagcagtacgagacctcctttctgacctcgatcctgtcttctctgatccctactctgcagctctacgtgctgaggtatcagctgtatgcaacactcttggctcctcaatcaagggtatattcatggagctggaaaatctcatccgccgtgacccagcccgtgttgctgtgcctggtggtggtatacatcctatcactcggtatgtcatgaactatctccgtgctgcttgtggttcacggcaaacattggaagaggtgatggaaggtgacttgggtgctgttggcacagcggctattgctgtcgaccctgatcgccctacttcgtcgctagctgtgcacatagcttggatcatggatgtgcttcacaaaaatttggagaccaaatcaaagatatacagggatccaccacttgcttccatattcttgatgaataatgggaaatacattattcacaaggtcaatgacagtgagcttggggttttgcttggtgatgaatggatgaagcagataatgagcagggtgcgcaggtggagtgtggagtaccagcgtggggcctgggcaaaagtcatatcagtgctgcagaccggaggtcctggcgttggcagtatcactgcaaaatccatgcttcagaagatgcagatgttcaacagctacctggaggagatttgcgcggtgcagtcagattgggtgattgcagatgagcagctacgagcagatgttaagtcagcgatagtggattctgttatgcctgcatatagaggcttaattgggagattgagatcatctcctgaagctgcccgagacttgttcatcaaatacaccccagaggatgttcaggaacgcatccaacatctatttgaaggggtggccaagtgattagtctagctattttagtggatatcacaaccttagttatggtgacattttggactcaatgatgtgttgcaaaaaggctggactttgtctcagatgaggaaatgctattgtctccagctgtgtaaaatctgtaggtgtttctgtatcaagtatcaactggtaatttt

SEQ ID NO: 110501 - protein, 500 aa, Zea mays subsp. mays
  misc_feature (1)..(500): Ceres Seq. ID no. 13598866
  misc_feature (23)..(496): Pfam Name: Exo70 exocyst complex subunit Pfam Description: Exo70 exocyst complex subunit
  misc_feature (66)..(497): Homolog of NCBI NO: 9758920 NR Description: gb|AAD25781.1~gene_id:MXI22.10~strong similarity
  misc_feature (69)..(497): Homolog of NCBI NO: 15218495 NR Description: exocyst subunit EXO70 family [Arabidopsis
  misc_feature (69)..(497): Homolog of NCBI NO: 15221040 NR Description: exocyst subunit EXO70 family [Arabidopsis
  misc_feature (40)..(497): Homolog of NCBI NO: 23270388 NR Description: unknown protein [Arabidopsis thaliana]
  misc_feature (13)..(497): Homolog of NCBI NO: 30682979 NR Description: exocyst subunit EXO70 family [Arabidopsis
  misc_feature (40)..(496): Homolog of NCBI NO: 15222266 NR Description: exocyst subunit EXO70 family [Arabidopsis
  misc_feature (43)..(500): Homolog of NCBI NO: 34907920 NR Description: putative leucine zipper protein
  misc_feature (41)..(497): Homolog of NCBI NO: 15237198 NR Description: leucine zipper-containing protein [Arabidopsis
  misc_feature (42)..(497): Homolog of NCBI NO: 100226 NR Description: tomato leucine zipper-containing protein - tomato
  misc_feature (23)..(500): Homolog of NCBI NO: 34907918 NR Description: putative leucine zipper protein
TTVTRLLAFPPNPSRLQTRTPSRPASMAPKAEKKPAAKKPAEEEYDADDGFGDEPIPIARPVSDFDIVIDALPPGSVSDVHQIARRMVDAGFGRECAEAYAAARRGFIDESVARLGIRSRTVDEVHSLPWEELEFDIARWIPAFKMVFRILIPSERRLCDRVFEGLAPYGDLAFVAAVRTQALQLISFGDAVAAASRAPERLFRVIDMYEAVRDLLSDLDPVFSDPYSAALRAEVSAVCNTLGSSIKGIFMELENLIRRDPARVAVPGGGIHPITRYVMNYLRAACGSRQTLEEVMEGDLGAVGTAAIAVDPDRPTSSLAVHIAWIMDVLHKNLETKSKIYRDPPLASIFLMNNGKYIIHKVNDSELGVLLGDEWMKQIMSRVRRWSVEYQRGAWAKVISVLQTGGPGVGSITAKSMLQKMQMFNSYLEEICAVQSDWVIADEQLRADVKSAIVDSVMPAYRGLIGRLRSSPEAARDLFIKYTPEDVQERIQHLFEGVAK

SEQ ID NO: 110502 - protein, 474 aa, Zea mays subsp. mays
  misc_feature (1)..(474): Ceres Seq. ID no. 13598867
  misc_feature (1)..(470): Pfam Name: Exo70 exocyst complex subunit Pfam Description: Exo70 exocyst complex subunit
  misc_feature (40)..(471): Homolog of NCBI NO: 9758920 NR Description: gb|AAD25781.1~gene_id:MXI22.10~strong similarity
  misc_feature (43)..(471): Homolog of NCBI NO: 15218495 NR Description: exocyst subunit EXO70 family [Arabidopsis
  misc_feature (43)..(471): Homolog of NCBI NO: 15221040 NR Description: exocyst subunit EXO70 family [Arabidopsis
  misc_feature (14)..(471): Homolog of NCBI NO: 23270388 NR Description: unknown protein [Arabidopsis thaliana]
  misc_feature (1)..(471): Homolog of NCBI NO: 30682979 NR Description: exocyst subunit EXO70 family [Arabidopsis
  misc_feature (14)..(470): Homolog of NCBI NO: 15222266 NR Description: exocyst subunit EXO70 family [Arabidopsis
  misc_feature (17)..(474): Homolog of NCBI NO: 34907920 NR Description: putative leucine zipper protein
  misc_feature (15)..(471): Homolog of NCBI NO: 15237198 NR Description: leucine zipper-containing protein [Arabidopsis
  misc_feature (16)..(471): Homolog of NCBI NO: 100226 NR Description: tomato leucine zipper-containing protein - tomato
  misc_feature (1)..(474): Homolog of NCBI NO: 34907918 NR Description: putative leucine zipper protein
MAPKAEKKPAAKKPAEEEYDADDGFGDEPIPIARPVSDFDIVIDALPPGSVSDVHQIARRMVDAGFGRECAEAYAAARRGFIDESVARLGIRSRTVDEVHSLPWEELEFDIARWIPAFKMVFRILIPSERRLCDRVFEGLAPYGDLAFVAAVRTQALQLISFGDAVAAASRAPERLFRVIDMYEAVRDLLSDLDPVFSDPYSAALRAEVSAVCNTLGSSIKGIFMELENLIRRDPARVAVPGGGIHPITRYVMNYLRAACGSRQTLEEVMEGDLGAVGTAAIAVDPDRPTSSLAVHIAWIMDVLHKNLETKSKIYRDPPLASIFLMNNGKYIIHKVNDSELGVLLGDEWMKQIMSRVRRWSVEYQRGAWAKVISVLQTGGPGVGSITAKSMLQKMQMFNSYLEEICAVQSDWVIADEQLRADVKSAIVDSVMPAYRGLIGRLRSSPEAARDLFIKYTPEDVQERIQHLFEGVAK

SEQ ID NO: 110503 - protein, 414 aa, Zea mays subsp. mays
  misc_feature (1)..(414): Ceres Seq. ID no. 13598868
  misc_feature (1)..(410): Pfam Name: Exo70 exocyst complex subunit Pfam Description: Exo70 exocyst complex subunit
  misc_feature (1)..(411): Homolog of NCBI NO: 9758920 NR Description: gb|AAD25781.1~gene_id:MXI22.10~strong similarity
  misc_feature (1)..(411): Homolog of NCBI NO: 15218495 NR Description: exocyst subunit EXO70 family [Arabidopsis
  misc_feature (1)..(411): Homolog of NCBI NO: 15221040 NR Description: exocyst subunit EXO70 family [Arabidopsis
  misc_feature (1)..(411): Homolog of NCBI NO: 23270388 NR Description: unknown protein [Arabidopsis thaliana]
  misc_feature (1)..(411): Homolog of NCBI NO: 30682979 NR Description: exocyst subunit EXO70 family [Arabidopsis
  misc_feature (1)..(410): Homolog of NCBI NO: 15222266 NR Description: exocyst subunit EXO70 family [Arabidopsis
  misc_feature (1)..(414): Homolog of NCBI NO: 34907920 NR Description: putative leucine zipper protein
  misc_feature (1)..(411): Homolog of NCBI NO: 15237198 NR Description: leucine zipper-containing protein [Arabidopsis
  misc_feature (1)..(411): Homolog of NCBI NO: 100226 NR Description: tomato leucine zipper-containing protein - tomato
  misc_feature (1)..(414): Homolog of NCBI NO: 34907918 NR Description: putative leucine zipper protein
MVDAGFGRECAEAYAAARRGFIDESVARLGIRSRTVDEVHSLPWEELEFDIARWIPAFKMVFRILIPSERRLCDRVFEGLAPYGDLAFVAAVRTQALQLISFGDAVAAASRAPERLFRVIDMYEAVRDLLSDLDPVFSDPYSAALRAEVSAVCNTLGSSIKGIFMELENLIRRDPARVAVPGGGIHPITRYVMNYLRAACGSRQTLEEVMEGDLGAVGTAAIAVDPDRPTSSLAVHIAWIMDVLHKNLETKSKIYRDPPLASIFLMNNGKYIIHKVNDSELGVLLGDEWMKQIMSRVRRWSVEYQRGAWAKVISVLQTGGPGVGSITAKSMLQKMQMFNSYLEEICAVQSDWVIADEQLRADVKSAIVDSVMPAYRGLIGRLRSSPEAARDLFIKYTPEDVQERIQHLFEGVAK

SEQ ID NO: 110504 - DNA, 2750 bp, Zea mays subsp. mays
  misc_feature (1)..(2750): Ceres Seq. ID no. 15180362
ccgaaatcccagcgagcgagtcttttttgctcctcagcgttgaggaactcgtcgacgtttcggcgcgctggttcgagcatcttgtttgggatcccaggaagttcgttacttggaacttctgtcccgaggaagggcgcgcggttcgatgctggggcggagcagcggcttgcgacactcagatctggtgtgaggaggagatgccggtggtgacacggtcgcggctctccgccgcccgcggcgacggcgcgggcgcgctgccgtggggctcggcgtcggcggcgccggctctgaggcacgacgccggggcgccgcgggaaggcgtcgcgagcaagaaccaccaccaccaccacgggctcaaggagaagctgcgcgcactcacccaggactacgagcagcaaaagcagaagctcgccgcgtcgcagctccgccgcagcatccggtgcctcaacgcgtgggaggcgatcaacgactagaacgccgaggaggaggaggacggcggcagggtggccaagttccgctacgacgccttcgctcaggtccccgagtccgcggtgctgagggagaacgtggcgccaccgcaggcgcgagcaccgtccaacgacggcgccgtgctcgcgcggacgactgaaccgcaggcgaaggagaacgcggtgggccgcggcgccaacgccatgtcctgccccatcaagaaggcggtaccggcgctcccggtgcttccggtgccaccggcgaggaaactctctttgggaggggctgtgggcggcaagctgaaggccgccggggaggtcggggccggcactgccgaggcggcggagagccggatcctcgtgttcgtgaggctgcgccccatgtcgaggaaggagaaggaggccgggtcgaggagttgcgtcaagatcgtcaacaggaaggaggtgttcctcacggagtccgcctcagagaacgactacctccggctgaagcgtggccgcgattcccatttctgcttcgactcggttttccctgattctacgacacaggcagaagtctacagcacctcaacagcagaccttgtggagggtgttctgcaaggtaggaatgggacagtgttctgctatggagctacaggggctggcaagacctacaccatgcttgggacaatggaaaaccccggggtaatggtgcttgcaataaatgatttgttctccaaggtgacgcagaagtaccactcaattaagctgtcatacctcgagatatacaatgagacggtgagggatttgctgtctcctggtagcccccttaacctgagagaagataagcagggaattgttgctgctggtcttacccaaagaagtgtatactccacggatgaggtcatggagttacttcagaaaggcaacaagaatcgaacaactgaaccgactcgagtaaacgagacctcatcgcgttctcatgcggtactgcaggttgtcgtagaatacagatccttggatggagttaacgtaaaacgagccgggaaactatctctcatcgatcttgctggatccgaaagagctctggcaacagatcaacgcacacagaggtcgatcgaaggagcaaacattaaccgctctcttcttgcactcagcagctgcattaacgcccttgtggagggcaagaagcacataccgtatcgcaattccaagctgacccaactcctcaaggactcgcttggaggagcctgcaacaccgtcatgatcgccaacattagcccctctaacctttccttcggcgagacacagaacacgcttcactgggctgatcgtgccaaggagataaaaacaaagacgcaacaaaccactgtgaatgaggaggttctggaccaaccagactctgaaactatgcttgtactggagcttcagaaggaaaaccgcgtgctgagggagcagttggcgaagcaacaacagaaattactgactgccgaggctcagctactcgcttcaaaaacctcgccacaacgatctcctgctccctcgtctcacgtctcaactccaggatcaactcaaaggaagaccagacgatctatcttggctgctggtggggggaactacttcagcacactggactcaaagaggcatgcagccgacaacgcacaggtcagggagctgcagaggaaagtgagcacgttggagtccgagatcgagaagatgaaaaaggagcacctattgcagctgaagcggaaggacgagttcatccgtgacttgatcaacaggaaggatcctaataacaacagtgaagaaacagcaacagttgatagaagagttgtcacgagggcgagcgtgcgaaaggcacagagagacgcatcagccgcagtcgagctgaaaagccccagccgggtgttcacatcaccggcgccaactgcaaagaagcgtactttctgggacatcggaggcaacagcccttcagttcttgctgccaacggaagaaagactcgaagccatgtggcaacagagacaccgaagaaagcatcctccaagctgcttcagccaggatttgcacggcaaacatcgacccatcaaagattcacatgaaagactgcctacaactcattcattactaattggagtttaatcgaagtacattgtaatgttttttagtttttttatccatattgagttattggaactgtttttttaaaattaacttgaggcagagttttccttttcttcggaacatataagcttttttccccatcttactggtattaatcagaaaggcagcaataattttgtgct

SEQ ID NO: 110505 - protein, 624 aa, Zea mays subsp. mays
  misc_feature (1)..(624): Ceres Seq. ID no. 15180363
  misc_feature (96)..(495): Homolog of NCBI NO: 29421238 NR Description: kinesin [Botryotinia fuckeliana]
  misc_feature (44)..(419): Homolog of NCBI NO: 15229185 NR Description: kinesin-related protein [Arabidopsis thaliana]
  misc_feature (53)..(417): Homolog of NCBI NO: 23613466 NR Description: kinesin, putative [Plasmodium falciparum 3D7]
  misc_feature (49)..(427): Homolog of NCBI NO: 28838703 NR Description: Similar to hypothetical protein DKFZp434G2226
  misc_feature (53)..(417): Homolog of NCBI NO: 23489919 NR Description: kinesin-like protein-related [Plasmodium yoelii
  misc_feature (43)..(415): Homolog of NCBI NO: 23397458 NR Description: hypothetical protein FLJ37300 [Homo sapiens]
  misc_feature (45)..(548): Homolog of NCBI NO: 28277259 NR Description: Similar to hypothetical protein FLJ37300 [Xenopus
  misc_feature (9)..(610): Homolog of NCBI NO: 25511722 NR Description: F25I16.11 protein - Arabidopsis thaliana
  misc_feature (9)..(610): Homolog of NCBI NO: 15221800 NR Description: kinesin-related protein [Arabidopsis thaliana]
  misc_feature (1)..(610): Homolog of NCBI NO: 34912450 NR Description: P0681B11.29 [Oryza sativa (japonica
MSCPIKKAVPALPVLPVPPARKLSLGGAVGGKLKAAGEVGAGTAEAAESRILVFVRLRPMSRKEKEAGSRSCVKIVNRKEVFLTESASENDYLRLKRGRDSHFCFDSVFPDSTTQAEVYSTSTADLVEGVLQGRNGTVFCYGATGAGKTYTMLGTMENPGVMVLAINDLFSKVTQKYHSIKLSYLEIYNETVRDLLSPGSPLNLREDKQGIVAAGLTQRSVYSTDEVMELLQKGNKNRTTEPTRVNETSSRSHAVLQVVVEYRSLDGVNVKRAGKLSLIDLAGSERALATDQRTQRSIEGANINRSLLALSSCINALVEGKKHIPYRNSKLTQLLKDSLGGACNTVMIANISPSNLSFGETQNTLHWADRAKEIKTKTQQTTVNEEVLDQPDSETMLVLELQKENRVLREQLAKQQQKLLTAEAQLLASKTSPQRSPAPSSHVSTPGSTQRKTRRSILAAGGGNYFSTLDSKRHAADNAQVRELQRKVSTLESEIEKMKKEHLLQLKRKDEFIRDLINRKDPNNNSEETATVDRRVVTRASVRKAQRDASAAVELKSPSRVFTSPAPTAKKRTFWDIGGNSPSVLAANGRKTRSHVATETPKKASSKLLQPGFARQTSTHQRFT

SEQ ID NO: 110506 - protein, 565 aa, Zea mays subsp. mays
  misc_feature (1)..(565): Ceres Seq. ID no. 15180364
  misc_feature (37)..(436): Homolog of NCBI NO: 29421238 NR Description: kinesin [Botryotinia fuckeliana]
  misc_feature (1)..(360): Homolog of NCBI NO: 15229185 NR Description: kinesin-related protein [Arabidopsis thaliana]
  misc_feature (1)..(358): Homolog of NCBI NO: 23613466 NR Description: kinesin, putative [Plasmodium falciparum 3D7]
  misc_feature (1)..(368): Homolog of NCBI NO: 28838703 NR Description: Similar to hypothetical protein DKFZp434G2226
  misc_feature (1)..(358): Homolog of NCBI NO: 23489919 NR Description: kinesin-like protein-related [Plasmodium yoelii
  misc_feature (1)..(356): Homolog of NCBI NO: 23397458 NR Description: hypothetical protein FLJ37300 [Homo sapiens]
  misc_feature (1)..(489): Homolog of NCBI NO: 28277259 NR Description: Similar to hypothetical protein FLJ37300 [Xenopus
  misc_feature (1)..(551): Homolog of NCBI NO: 25511722 NR Description: F25I16.11 protein - Arabidopsis thaliana
  misc_feature (1)..(551): Homolog of NCBI NO: 15221800 NR Description: kinesin-related protein [Arabidopsis thaliana]
  misc_feature (1)..(551): Homolog of NCBI NO: 34912450 NR Description: P0681B11.29 [Oryza sativa (japonica
MSRKEKEAGSRSCVKIVNRKEVFLTESASENDYLRLKRGRDSHFCFDSVFPDSTTQAEVYSTSTADLVEGVLQGRNGTVFCYGATGAGKTYTMLGTMENPGVMVLAINDLFSKVTQKYHSIKLSYLEIYNETVRDLLSPGSPLNLREDKQGIVAAGLTQRSVYSTDEVMELLQKGNKNRTTEPTRVNETSSRSHAVLQVVVEYRSLDGVNVKRAGKLSLIDLAGSERALATDQRTQRSIEGANINRSLLALSSCINALVEGKKHIPYRNSKLTQLLKDSLGGACNTVMIANISPSNLSFGETQNTLHWADRAKEIKTKTQQTTVNEEVLDQPDSETMLVLELQKENRVLREQLAKQQQKLLTAEAQLLASKTSPQRSPAPSSHVSTPGSTQRKTRRSILAAGGGNYFSTLDSKRHAADNAQVRELQRKVSTLESEIEKMKKEHLLQLKRKDEFIRDLINRKDPNNNSEETATVDRRVVTRASVRKAQRDASAAVELKSPSRVFTSPAPTAKKRTFWDIGGNSPSVLAANGRKTRSHVATETPKKASSKLLQPGFARQTSTHQRFT

SEQ ID NO: 110507 - protein, 473 aa, Zea mays subsp. mays
  misc_feature (1)..(473): Ceres Seq. ID no. 15180365
  misc_feature (1)..(344): Homolog of NCBI NO: 29421238 NR Description: kinesin [Botryotinia fuckeliana]
  misc_feature (1)..(268): Homolog of NCBI NO: 15229185 NR Description: kinesin-related protein [Arabidopsis thaliana]
  misc_feature (1)..(266): Homolog of NCBI NO: 23613466 NR Description: kinesin, putative [Plasmodium falciparum 3D7]
  misc_feature (1)..(276): Homolog of NCBI NO: 28838703 NR Description: Similar to hypothetical protein DKFZp434G2226
  misc_feature (1)..(266): Homolog of NCBI NO: 23489919 NR Description: kinesin-like protein-related [Plasmodium yoelii
  misc_feature (1)..(264): Homolog of NCBI NO: 23397458 NR Description: hypothetical protein FLJ37300 [Homo sapiens]
  misc_feature (1)..(397): Homolog of NCBI NO: 28277259 NR Description: Similar to hypothetical protein FLJ37300 [Xenopus
  misc_feature (1)..(459): Homolog of NCBI NO: 25511722 NR Description: F25I16.11 protein - Arabidopsis thaliana
  misc_feature (1)..(459): Homolog of NCBI NO: 15221800 NR Description: kinesin-related protein [Arabidopsis thaliana]
  misc_feature (1)..(459): Homolog of NCBI NO: 34912450 NR Description: P0681B11.29 [Oryza sativa (japonica
MLGTMENPGVMVLAINDLFSKVTQKYHSIKLSYLEIYNETVRDLLSPGSPLNLREDKQGIVAAGLTQRSVYSTDEVMELLQKGNKNRTTEPTRVNETSSRSHAVLQVVVEYRSLDGVNVKRAGKLSLIDLAGSERALATDQRTQRSIEGANINRSLLALSSCINALVEGKKHIPYRNSKLTQLLKDSLGGACNTVMIANISPSNLSFGETQNTLHWADRAKEIKTKTQQTTVNEEVLDQPDSETMLVLELQKENRVLREQLAKQQQKLLTAEAQLLASKTSPQRSPAPSSHVSTPGSTQRKTRRSILAAGGGNYFSTLDSKRHAADNAQVRELQRKVSTLESEIEKMKKEHLLQLKRKDEFIRDLINRKDPNNNSEETATVDRRVVTRASVRKAQRDASAAVELKSPSRVFTSPAPTAKKRTFWDIGGNSPSVLAANGRKTRSHVATETPKKASSKLLQPGFARQTSTHQRFT

SEQ ID NO: 110508 - DNA, 1937 bp, Zea mays subsp. mays
  misc_feature (1)..(1937): Ceres Seq. ID no. 15180366
tacaccgcgcatagatcgtgggcatcgcgacacctcacctgcccccctgcggccgccgtctctcctcgccggttaccccttgctgcccgctcccctgcgcctcgcctttctcgccctctttccacctttctcacacgtgcccgccttctccgcccctctcctcgccagcggttgcgtcgaccggcagcggcgttcaactgcgccccacgagcaggtttcttggccccgtcgacttccagtgagttcagtttagctcagtaagcatctgatcaacttcgaggtgccagacagatcctatgctgccttactgggatgaaaggtggctgtctgcataggctccttgtccacaagctatgctttggcctgagtattctcactgtgccgattattgttctgttactggaaggagccccagtactcactatcttcagcccaacaccagggcaattaaaagttctctctcaaggttttctacatcagcaggagcaggaacatcttggagatgatggagcaaccctagttggatctccaggtccagcttccaggagccgcttgcaaaaaaattgcaactacgcaaaggggaagtggatagaagatgataagcggccgctgtactctggtaatgagtgcaaacaatggctgtcaaaaatgtgggcttgtcgaatgatgcggcgcacacatttctcttatgagaattaccggtggcaaccacatgactgtgagatgcctgagtttacagggcctaagttcttaaaaaggatgagaaaccgaactcttgcttttgttggtgattcacttggcagacaacaatttcagtcaatgatgtgtatagcaactggtggcaaatacagtccagaggttgaagatgttggttggaaatatggccttgtcaaagccccaggtgctctaagacctgacgggtgggcttatagatttccgtccaccaacacaactatccttttctactggtctgctactctgtctgaattggaacctctgaatacagaacacgcggttaccagatatgcgttgcatcttgatcgaccagttacatttttgaaggagtatcttaatgactttgatgtcctagtacttaacacaggccatcactggaacagagggaaattcaatggaaatcactgggaattgcatgctgatgggaagcctgtaggcaatggtagtagacttgcagacctaaaccgtgcaaaaaatcttacattgcatagcattgctagatggatggattcagaactcgcacggcatcctaagatgaaagttttcctcaggacaatttcaccaaggcactttgtaaatggtgactggaacacaggtggaacatgtggaaataccgtcccctttactaatggaagtgaagtcttgcaggatcattcaattgatatacccgcagaaaatgctgtgaagggaactcgggttaagcttttggatatcactgctatctcaaaactacgggatgaggggcatatctcaaactctagtttcaaaaaggcttccaccggaattaatgattgcttgcactggtgcttacctggtataccagacatgtggaatgagcttctctttgtacagatttagtatcaccctcttgttaggcagatctttttcagagccccaaggatctccgctgttcatagcatagaagtaaagtttaaggaattttgggtcacccatatggaggtgttcacatgatgatactattgatttctatgaagtacgtaatttacagtgtggaacagattattccaacttcctttcggagcagagtaggagatggaggtgttgcacagcccaatctgactatcgagtattcttcaggcacgttgaactttgtttctacgtttaccttactgtaaaatcctaccacggtttaccatgtgcagcatatatccttcagaaaaatgttcatacctgttggtcgt

SEQ ID NO: 110509 - protein, 426 aa, Zea mays subsp. mays
  misc_feature (1)..(426): Ceres Seq. ID no. 15180367
  misc_feature (267)..(426): Pfam Name: Arabidopsis proteins of unknown function Pfam Description: Arabidopsis proteins of unknown function
  misc_feature (56)..(426): Homolog of NCBI NO: 21592371 NR Description: unknown [Arabidopsis thaliana]
  misc_feature (56)..(426): Homolog of NCBI NO: 15242021 NR Description: expressed protein [Arabidopsis thaliana]
  misc_feature (70)..(426): Homolog of NCBI NO: 18415139 NR Description: expressed protein [Arabidopsis thaliana]
  misc_feature (70)..(426): Homolog of NCBI NO: 9759321 NR Description: gb|AAF00670.1~gene_id:MBL20.11~strong similarity
  misc_feature (85)..(423): Homolog of NCBI NO: 6862912 NR Description: unknown protein [Arabidopsis thaliana]
  misc_feature (83)..(426): Homolog of NCBI NO: 15224349 NR Description: expressed protein [Arabidopsis thaliana]
  misc_feature (77)..(426): Homolog of NCBI NO: 18420285 NR Description: expressed protein [Arabidopsis thaliana]
  misc_feature (77)..(426): Homolog of NCBI NO: 15810385 NR Description: unknown protein [Arabidopsis thaliana]
  misc_feature (76)..(426): Homolog of NCBI NO: 30697938 NR Description: expressed protein [Arabidopsis thaliana]
  misc_feature (69)..(426): Homolog of NCBI NO: 8777315 NR Description: gene_id:MBM17.12~pir||T02538~strong similarity to
MKGGCLHRLLVHKLCFGLSILTVPIIVLLLEGAPVLTIFSPTPGQLKVLSQGFLHQQEQEHLGDDGATLVGSPGPASRSRLQKNCNYAKGKWIEDDKRPLYSGNECKQWLSKMWACRMMRRTHFSYENYRWQPHDCEMPEFTGPKFLKRMRNRTLAFVGDSLGRQQFQSMMCIATGGKYSPEVEDVGWKYGLVKAPGALRPDGWAYRFPSTNTTILFYWSATLSELEPLNTEHAVTRYALHLDRPVTFLKEYLNDFDVLVLNTGHHWNRGKFNGNHWELHADGKPVGNGSRLADLNRAKNLTLHSIARWMDSELARHPKMKVFLRTISPRHFVNGDWNTGGTCGNTVPFTNGSEVLQDHSIDIPAENAVKGTRVKLLDITAISKLRDEGHISNSSFKKASTGINDCLHWCLPGIPDMWNELLFVQI

SEQ ID NO: 110510 - protein, 314 aa, Zea mays subsp. mays
  misc_feature (1)..(314): Ceres Seq. ID no. 15180368
  misc_feature (155)..(314): Pfam Name: Arabidopsis proteins of unknown function Pfam Description: Arabidopsis proteins of unknown function
  misc_feature (1)..(311): Homolog of NCBI NO: 6862912 NR Description: unknown protein [Arabidopsis thaliana]
  misc_feature (1)..(314): Homolog of NCBI NO: 15224349 NR Description: expressed protein [Arabidopsis thaliana]
  misc_feature (1)..(314): Homolog of NCBI NO: 18420285 NR Description: expressed protein [Arabidopsis thaliana]
  misc_feature (1)..(314): Homolog of NCBI NO: 21592371 NR Description: unknown [Arabidopsis thaliana]
  misc_feature (1)..(314): Homolog of NCBI NO: 18415139 NR Description: expressed protein [Arabidopsis thaliana]
  misc_feature (1)..(314): Homolog of NCBI NO: 9759321 NR Description: gb|AAF00670.1~gene_id:MBL20.11~strong similarity
  misc_feature (1)..(314): Homolog of NCBI NO: 15242021 NR Description: expressed protein [Arabidopsis thaliana]
  misc_feature (1)..(314): Homolog of NCBI NO: 15810385 NR Description: unknown protein [Arabidopsis thaliana]
  misc_feature (1)..(314): Homolog of NCBI NO: 30697938 NR Description: expressed protein [Arabidopsis thaliana]
  misc_feature (1)..(314): Homolog of NCBI NO: 8777315 NR Description: gene_id:MBM17.12~pir||T02538~strong similarity to
MWACRMMRRTHFSYENYRWQPHDCEMPEFTGPKFLKRMRNRTLAFVGDSLGRQQFQSMMCIATGGKYSPEVEDVGWKYGLVKAPGALRPDGWAYRFPSTNTTILFYWSATLSELEPLNTEHAVTRYALHLDRPVTFLKEYLNDFDVLVLNTGHHWNRGKFNGNHWELHADGKPVGNGSRLADLNRAKNLTLHSIARWMDSELARHPKMKVFLRTISPRHFVNGDWNTGGTCGNTVPFTNGSEVLQDHSIDIPAENAVKGTRVKLLDITAISKLRDEGHISNSSFKKASTGINDCLHWCLPGIPDMWNELLFVQI

SEQ ID NO: 110511 - protein, 309 aa, Zea mays subsp. mays
  misc_feature (1)..(309): Ceres Seq. ID no. 15180369
  misc_feature (150)..(309): Pfam Name: Arabidopsis proteins of unknown function Pfam Description: Arabidopsis proteins of unknown function
  misc_feature (1)..(309): Homolog of NCBI NO: 21592371 NR Description: unknown [Arabidopsis thaliana]
  misc_feature (1)..(309): Homolog of NCBI NO: 15242021 NR Description: expressed protein [Arabidopsis thaliana]
  misc_feature (1)..(309): Homolog of NCBI NO: 18415139 NR Description: expressed protein [Arabidopsis thaliana]
  misc_feature (1)..(309): Homolog of NCBI NO: 9759321 NR Description: gb|AAF00670.1~gene_id:MBL20.11~strong similarity
  misc_feature (1)..(306): Homolog of NCBI NO: 6862912 NR Description: unknown protein [Arabidopsis thaliana]
  misc_feature (1)..(309): Homolog of NCBI NO: 15224349 NR Description: expressed protein [Arabidopsis thaliana]
  misc_feature (1)..(309): Homolog of NCBI NO: 18420285 NR Description: expressed protein [Arabidopsis thaliana]
  misc_feature (1)..(309): Homolog of NCBI NO: 15810385 NR Description: unknown protein [Arabidopsis thaliana]
  misc_feature (1)..(309): Homolog of NCBI NO: 30697938 NR Description: expressed protein [Arabidopsis thaliana]
  misc_feature (1)..(309): Homolog of NCBI NO: 8777315 NR Description: gene_id:MBM17.12~pir||T02538~strong similarity to
MMRRTHFSYENYRWQPHDCEMPEFTGPKFLKRMRNRTLAFVGDSLGRQQFQSMMCIATGGKYSPEVEDVGWKYGLVKAPGALRPDGWAYRFPSTNTTILFYWSATLSELEPLNTEHAVTRYALHLDRPVTFLKEYLNDFDVLVLNTGHHWNRGKFNGNHWELHADGKPVGNGSRLADLNRAKNLTLHSIARWMDSELARHPKMKVFLRTISPRHFVNGDWNTGGTCGNTVPFTNGSEVLQDHSIDIPAENAVKGTRVKLLDITAISKLRDEGHISNSSFKKASTGINDCLHWCLPGIPDMWNELLFVQI

SEQ ID NO: 110512 - DNA, 659 bp, Zea mays subsp. mays
  misc_feature (1)..(659): Ceres Seq. ID no. 14305425
  misc_feature: MA Experiment ID: 20000477 Result: Down-regulated in Transcription
  misc_feature: MA Experiment 20000477 PARAMETER Experiment Name: Zm_5mM_SA_P Parameter: Age (day) Value: 10
  misc_feature: MA Experiment 20000477 PARAMETER Experiment Name: Zm_5mM_SA_P Parameter: Organism Value: Zea mays
  misc_feature: MA Experiment 20000477 PARAMETER Experiment Name: Zm_5mM_SA_P Parameter: Plant Line Value: 35A19
  misc_feature: MA Experiment 20000477 PARAMETER Experiment Name: Zm_5mM_SA_P Parameter: Timepoint (hr) Value: 48
  misc_feature: MA Experiment 20000477 PARAMETER Experiment Name: Zm_5mM_SA_P Parameter: Tissue Value: Aerial
  misc_feature: MA Experiment 20000477 PARAMETER Experiment Name: Zm_5mM_SA_P Parameter: Treatment Value: 5mM SA vs. No Treatment
  misc_feature: MA Experiment ID: 20000478 Result: Down-regulated in Transcription
  misc_feature: MA Experiment 20000478 PARAMETER Experiment Name: Zm_5mM_SA_P Parameter: Age (day) Value: 11
  misc_feature: MA Experiment 20000478 PARAMETER Experiment Name: Zm_5mM_SA_P Parameter: Organism Value: Zea mays
  misc_feature: MA Experiment 20000478 PARAMETER Experiment Name: Zm_5mM_SA_P Parameter: Plant Line Value: 35A19
  misc_feature: MA Experiment 20000478 PARAMETER Experiment Name: Zm_5mM_SA_P Parameter: Timepoint (hr) Value: 72
  misc_feature: MA Experiment 20000478 PARAMETER Experiment Name: Zm_5mM_SA_P Parameter: Tissue Value: Aerial
  misc_feature: MA Experiment 20000478 PARAMETER Experiment Name: Zm_5mM_SA_P Parameter: Treatment Value: 5mM SA vs. No Treatment
  misc_feature: MA Experiment ID: 20000479 Result: Down-regulated in Transcription
  misc_feature: MA Experiment 20000479 PARAMETER Experiment Name: Zm_Drought_P Parameter: Age (day) Value: 10
  misc_feature: MA Experiment 20000479 PARAMETER Experiment Name: Zm_Drought_P Parameter: Organism Value: Zea mays
  misc_feature: MA Experiment 20000479 PARAMETER Experiment Name: Zm_Drought_P Parameter: Plant Line Value: 35A19
  misc_feature: MA Experiment 20000479 PARAMETER Experiment Name: Zm_Drought_P Parameter: Timepoint (hr) Value: 48
  misc_feature: MA Experiment 20000479 PARAMETER Experiment Name: Zm_Drought_P Parameter: Tissue Value: Aerial
  misc_feature: MA Experiment 20000479 PARAMETER Experiment Name: Zm_Drought_P Parameter: Treatment Value: Drought vs. No Drought
  misc_feature: MA Experiment ID: 20000480 Result: Down-regulated in Transcription
  misc_feature: MA Experiment 20000480 PARAMETER Experiment Name: Zm_Drought_P Parameter: Age (day) Value: 11
  misc_feature: MA Experiment 20000480 PARAMETER Experiment Name: Zm_Drought_P Parameter: Organism Value: Zea mays
  misc_feature: MA Experiment 20000480 PARAMETER Experiment Name: Zm_Drought_P Parameter: Plant Line Value: 35A19
  misc_feature: MA Experiment 20000480 PARAMETER Experiment Name: Zm_Drought_P Parameter: Timepoint (hr) Value: 72
  misc_feature: MA Experiment 20000480 PARAMETER Experiment Name: Zm_Drought_P Parameter: Tissue Value: Aerial
  misc_feature: MA Experiment 20000480 PARAMETER Experiment Name: Zm_Drought_P Parameter: Treatment Value: Drought vs. No Drought
aggcctactaccaaccagcctccgcgtccaagatctccctcccacggcccgctcggactccccggcgcaatggcgaccgacgcgatcctggagacgatcaagccgcggcggagcgaggagcagctcccggtgaccacggcggccgccgccgccggcaccaggctgcggcggcgcgtgtcctcgttctcggcgcacgtgaggccgccgccggggctgtcgtcctcggcggcagcggcgttccggcgcgcgaggtcgatgccgtccgccaaggcgctggcggcggcgggagcgctgcggcggtggtgggagtgggtgacggcgccgttcgcgccccgcggcggcggcgacgacgacgacgacgaggcaaggccgctgggcgggtgccgctgcgcctgcgccggcggaccgggcgggtggcgccacgtcctggtcaggctccgcgccggcgcgcgccgcctgctgggccgcgacggccgcccgctcaaggccgccgcgccgccggacttcggctacgactccgtcagctacgcgcgcaacttcgacgacggcgaggcgtgatgcgcgggtgatgccgagccgaggtggtggcgggacggccgtggcggtggcggccgggcgtggatcacaggatcagcagtggtccagctgtcgcaataaag

SEQ ID NO: 110513 - protein, 188 aa, Zea mays subsp. mays
  misc_feature (1)..(188): Ceres Seq. ID no. 14305426
  misc_feature (5)..(153): Homolog of NCBI NO: 34903620 NR Description: B1046G12.17 [Oryza sativa (japonica
AYYQPASASKISLPRPARTPRRNGDRRDPGDDQAAAERGAAPGDHGGRRRRHQAAAARVLVLGAREAAAGAVVLGGSGVPAREVDAVRQGAGGGGSAAAVVGVGDGAVRAPRRRRRRRRRGKAAGRVPLRLRRRTGRVAPRPGQAPRRRAPPAGPRRPPAQGRRAAGLRLRLRQLRAQLRRRRGVMRG

SEQ ID NO: 110514 - protein, 185 aa, Zea mays subsp. mays
  misc_feature (1)..(185): Ceres Seq. ID no. 14305427
  misc_feature (24)..(185): Homolog of NCBI NO: 28411879 NR Description: OSJNBa0016N23.32 [Oryza sativa (japonica
RPTTNQPPRPRSPSHGPLGLPGAMATDAILETIKPRRSEEQLPVTTAAAAAGTRLRRRVSSFSAHVRPPPGLSSSAAAAFRRARSMPSAKALAAAGALRRWWEWVTAPFAPRGGGDDDDDEARPLGGCRCACAGGPGGWRHVLVRLRAGARRLLGRDGRPLKAAAPPDFGYDSVSYARNFDDGEA

SEQ ID NO: 110515 - protein, 162 aa, Zea mays subsp. mays
  misc_feature (1)..(162): Ceres Seq. ID no. 14305428
  misc_feature (1)..(162): Homolog of NCBI NO: 28411879 NR Description: OSJNBa0016N23.32 [Oryza sativa (japonica
MATDAILETIKPRRSEEQLPVTTAAAAAGTRLRRRVSSFSAHVRPPPGLSSSAAAAFRRARSMPSAKALAAAGALRRWWEWVTAPFAPRGGGDDDDDEARPLGGCRCACAGGPGGWRHVLVRLRAGARRLLGRDGRPLKAAAPPDFGYDSVSYARNFDDGEA

SEQ ID NO: 110516 - DNA, 1919 bp, Zea mays subsp. mays
  misc_feature (1)..(1919): Ceres Seq. ID no. 15180350
  misc_feature: MA Experiment ID: 108523 Result: Up-regulated in Transcription
  misc_feature: MA Experiment 108523 PARAMETER Experiment Name: Zm_42deg_Heat_P Parameter: Age (day) Value: 8
  misc_feature: MA Experiment 108523 PARAMETER Experiment Name: Zm_42deg_Heat_P Parameter: Organism Value: Zea mays
  misc_feature: MA Experiment 108523 PARAMETER Experiment Name: Zm_42deg_Heat_P Parameter: Plant Line Value: 35A19
  misc_feature: MA Experiment 108523 PARAMETER Experiment Name: Zm_42deg_Heat_P Parameter: Temperature (deg C) Value: 42 vs. 22
  misc_feature: MA Experiment 108523 PARAMETER Experiment Name: Zm_42deg_Heat_P Parameter: Timepoint (hr) Value: 6
  misc_feature: MA Experiment 108523 PARAMETER Experiment Name: Zm_42deg_Heat_P Parameter: Tissue Value: Aerial
  misc_feature: MA Experiment ID: 108543 Result: Up-regulated in Transcription
  misc_feature: MA Experiment ID: 108687 Result: Down-regulated in Transcription
  misc_feature: MA Experiment 108687 PARAMETER Experiment Name: Zm_Embryos-Flowers__P Parameter: Tissue Value: Embryo vs. Aerial+
  misc_feature: MA Experiment ID: 20000492 Result: Down-regulated in Transcription
  misc_feature: MA Experiment 20000492 PARAMETER Experiment Name: Zm_Hybrid_Seed_Dev_P Parameter: DAP Value: 12
  misc_feature: MA Experiment 20000492 PARAMETER Experiment Name: Zm_Hybrid_Seed_Dev_P Parameter: Organism Value: Zea mays
  misc_feature: MA Experiment 20000492 PARAMETER Experiment Name: Zm_Hybrid_Seed_Dev_P Parameter: Plant Line Value: 35A19
  misc_feature: MA Experiment 20000492 PARAMETER Experiment Name: Zm_Hybrid_Seed_Dev_P Parameter: Tissue Value: Fert Kernel vs. Unfert Floret
  misc_feature: MA Experiment ID: 20000535 Result: Down-regulated in Transcription
  misc_feature: MA Experiment 20000535 PARAMETER Experiment Name: Zm_Hybrid_Seed_Dev_P Parameter: DAP Value: 30 vs. 12
  misc_feature: MA Experiment 20000535 PARAMETER Experiment Name: Zm_Hybrid_Seed_Dev_P Parameter: Organism Value: Zea mays
  misc_feature: MA Experiment 20000535 PARAMETER Experiment Name: Zm_Hybrid_Seed_Dev_P Parameter: Plant Line Value: 35A19
  misc_feature: MA Experiment 20000535 PARAMETER Experiment Name: Zm_Hybrid_Seed_Dev_P Parameter: Tissue Value: Embryo vs. Unfert Floret
  misc_feature: MA Experiment ID: 20000626 Result: Down-regulated in Transcription
  misc_feature: MA Experiment 20000626 PARAMETER Experiment Name: Zm_Herbicide-Treatments_P Parameter: Timepoint (hr) Value: 12
  misc_feature: MA Experiment 20000626 PARAMETER Experiment Name: Zm_Herbicide-Treatments_P Parameter: Tissue Value: Aerial
  misc_feature: MA Experiment 20000626 PARAMETER Experiment Name: Zm_Herbicide-Treatments_P Parameter: Treatment Value: Roundup vs. No Treatment
aaatctatcgtccgcaccagcagcgagtgaaggaggagcctgcccgcgcctgcgcctggttgtaattgtagctcacgctcacccttcagttgaccaccgctgcggcagcaatggcggcgagtcgccggcagcaccgccgcggcttcccgctggtcccgctgctgctgtcgctcctggcggccgccgcgtacggccgcctcatctccgacggcggcccgcccgcgccgctcctcccggtcatccgcctcgcggcgccgccggccgaggccgagtgcgagcagacctacggcttcctcccctgcaccaccaccgtgctcggcaacctcttcctggtgctggcctacggcttcctcatgttcaaggcggccacgttcctgtcggcgggcagcgagctgctgctagagatcatggggcccggcctcgtcggcggcctcctcctccccatcctaggcgccctccccgacgcgctcctcgtcctagtgtccggcctctccgggagcaaagaggaggcgcagagccaggtgctgatcgggatggggctgctcgccggttccaccgtcttcctcctcaccctgctctggggaacctgtgtggtcgttggcaagtgtgacctcgggccaggccgtgaggcagtagatgtgacagacaccaagggcttcagcttgactggcactggtgttacgaccgacgtgcagaccagctacgcggcacggatcatggggctatctgtcatccccttcatcatcgctcagttccccaagatgttgaagacgcaccacgggcagcgcctcgccatgctgctggcccttgtcgtgtcgttcgcgctcgtgcttgcctactgcctgtaccaggttttccagccttggattcagaggaggaagctcgcgtacgcgaagcacaagcacgtgatctccgggatactgaggcacgcccagatgcagtcgctcggccgcctgctgaacgacgacggcacgcccaatgaacaagtcatcagaaagctgttccgcaagatcgacatggacgagagccggtccctgtcccgcgccgagctccacgccctcatcgtcggcatcaacttcgaggaggtcgacttcgacaggacggacgcggtggacaaggtcatggacgacttcgacacgtcccgcaacgacgtcgtcgaggaggaggagttcgtgcaggggatgaggaagtggctggacgaggccaggcgcagcgtgcccgtgggcggcgccttctccagcaagttcatccacgagtaccacgagaggacgaggcaggagcacgacgagctggtcgacaggtccgacgaggcggtggagagcgtggagaaccccgggtggtgcatagccaaggccgtggcgctgctgctgctgggctccgccgccgccgccgcgttcgccgacccgctcgtggacgccgtccacggcttctccaacgccacgcgcatcccgtccttcttcatctccttcatcgccctcccgctcgccaccaactccagcgaggccgtctccgccatcatcttcgccagcaggaagaagcagaggacctgctccctcaccttctccgaggtgtacggcggcgtgacgatgaacaacacgctgtgcctcggcgtgttcctggcgctcatctacttcaggaacctgacgtgggacttctcgtcggaggtgctcatcatcctgctggtctgcgtcgtcatggccctcttcaccagcttccggaccacgttcccgctctggacctgcctcgtcgcctacatgctctacccgctctcgctgatcatcgtctacatcctcgactatgtcttcggctggtcatagacctgattggctcaagtgaacacctggttttcagacagccgccggtgtttctgtttgacctccttgtaattttaactatatgtccagactttttctcaaatc

SEQ ID NO: 110517 - protein, 568 aa, Zea mays subsp. mays
  misc_feature (1)..(568): Ceres Seq. ID no. 15180351
  misc_feature (424)..(558): Pfam Name: Sodium/calcium exchanger protein Pfam Description: Sodium/calcium exchanger protein
  misc_feature (184)..(568): Homolog of NCBI NO: 26449859 NR Description: unknown protein [Arabidopsis thaliana]
  misc_feature (30)..(217): Homolog of NCBI NO: 15218787 NR Description: calcium-binding EF-hand family protein
  misc_feature (229)..(559): Homolog of NCBI NO: 15218787 NR Description: calcium-binding EF-hand family protein
  misc_feature (30)..(533): Homolog of NCBI NO: 15218787 NR Description: calcium-binding EF-hand family protein
  misc_feature (82)..(568): Homolog of NCBI NO: 13605639 NR Description: At1g53210/F12M16_12 [Arabidopsis thaliana]
  misc_feature (30)..(568): Homolog of NCBI NO: 25405975 NR Description: protein F12M16.12 [imported] - Arabidopsis
  misc_feature (30)..(568): Homolog of NCBI NO: 30695448 NR Description: expressed protein [Arabidopsis thaliana]
  misc_feature (9)..(36): Homolog of NCBI NO: 34903912 NR Description: unnamed protein product [Oryza sativa (japonica
  misc_feature (1)..(123): Homolog of NCBI NO: 34903912 NR Description: unnamed protein product [Oryza sativa (japonica
  misc_feature (132)..(568): Homolog of NCBI NO: 34903912 NR Description: unnamed protein product [Oryza sativa (japonica
MAASRRQHRRGFPLVPLLLSLLAAAAYGRLISDGGPPAPLLPVIRLAAPPAEAECEQTYGFLPCTTTVLGNLFLVLAYGFLMFKAATFLSAGSELLLEIMGPGLVGGLLLPILGALPDALLVLVSGLSGSKEEAQSQVLIGMGLLAGSTVFLLTLLWGTCVVVGKCDLGPGREAVDVTDTKGFSLTGTGVTTDVQTSYAARIMGLSVIPFIIAQFPKMLKTHHGQRLAMLLALVVSFALVLAYCLYQVFQPWIQRRKLAYAKHKHVISGILRHAQMQSLGRLLNDDGTPNEQVIRKLFRKIDMDESRSLSRAELHALIVGINFEEVDFDRTDAVDKVMDDFDTSRNDVVEEEEFVQGMRKWLDEARRSVPVGGAFSSKFIHEYHERTRQEHDELVDRSDEAVESVENPGWCIAKAVALLLLGSAAAAAFADPLVDAVHGFSNATRIPSFFISFIALPLATNSSEAVSAIIFASRKKQRTCSLTFSEVYGGVTMNNTLCLGVFLALIYFRNLTWDFSSEVLIILLVCVVMALFTSFRTTFPLWTCLVAYMLYPLSLIIVYILDYVFGWS

SEQ ID NO: 110518 - protein, 487 aa, Zea mays subsp. mays
  misc_feature (1)..(487): Ceres Seq. ID no. 15180352
  misc_feature (343)..(477): Pfam Name: Sodium/calcium exchanger protein Pfam Description: Sodium/calcium exchanger protein
  misc_feature (173)..(413): Homolog of NCBI NO: 15226193 NR Description: calcium-binding EF-hand family protein
  misc_feature (103)..(487): Homolog of NCBI NO: 26449859 NR Description: unknown protein [Arabidopsis thaliana]
  misc_feature (1)..(136): Homolog of NCBI NO: 15218787 NR Description: calcium-binding EF-hand family protein
  misc_feature (148)..(478): Homolog of NCBI NO: 15218787 NR Description: calcium-binding EF-hand family protein
  misc_feature (1)..(452): Homolog of NCBI NO: 15218787 NR Description: calcium-binding EF-hand family protein
  misc_feature (1)..(487): Homolog of NCBI NO: 13605639 NR Description: At1g53210/F12M16_12 [Arabidopsis thaliana]
  misc_feature (1)..(487): Homolog of NCBI NO: 25405975 NR Description: protein F12M16.12 [imported] - Arabidopsis
  misc_feature (1)..(487): Homolog of NCBI NO: 30695448 NR Description: expressed protein [Arabidopsis thaliana]
  misc_feature (1)..(42): Homolog of NCBI NO: 34903912 NR Description: unnamed protein product [Oryza sativa (japonica
  misc_feature (51)..(487): Homolog of NCBI NO: 34903912 NR Description: unnamed protein product [Oryza sativa (japonica
MFKAATFLSAGSELLLEIMGPGLVGGLLLPILGALPDALLVLVSGLSGSKEEAQSQVLIGMGLLAGSTVFLLTLLWGTCVVVGKCDLGPGREAVDVTDTKGFSLTGTGVTTDVQTSYAARIMGLSVIPFIIAQFPKMLKTHHGQRLAMLLALVVSFALVLAYCLYQVFQPWIQRRKLAYAKHKHVISGILRHAQMQSLGRLLNDDGTPNEQVIRKLFRKIDMDESRSLSRAELHALIVGINFEEVDFDRTDAVDKVMDDFDTSRNDVVEEEEFVQGMRKWLDEARRSVPVGGAFSSKFIHEYHERTRQEHDELVDRSDEAVESVENPGWCIAKAVALLLLGSAAAAAFADPLVDAVHGFSNATRIPSFFISFIALPLATNSSEAVSAIIFASRKKQRTCSLTFSEVYGGVTMNNTLCLGVFLALIYFRNLTWDFSSEVLIILLVCVVMALFTSFRTTFPLWTCLVAYMLYPLSLIIVYILDYVFGWS

SEQ ID NO: 110519 - protein, 469 aa, Zea mays subsp. mays
  misc_feature (1)..(469): Ceres Seq. ID no. 15180353
  misc_feature (325)..(459): Pfam Name: Sodium/calcium exchanger protein Pfam Description: Sodium/calcium exchanger protein
  misc_feature (155)..(395): Homolog of NCBI NO: 15226193 NR Description: calcium-binding EF-hand family protein
  misc_feature (85)..(469): Homolog of NCBI NO: 26449859 NR Description: unknown protein [Arabidopsis thaliana]
  misc_feature (1)..(118): Homolog of NCBI NO: 15218787 NR Description: calcium-binding EF-hand family protein
  misc_feature (130)..(460): Homolog of NCBI NO: 15218787 NR Description: calcium-binding EF-hand family protein
  misc_feature (1)..(434): Homolog of NCBI NO: 15218787 NR Description: calcium-binding EF-hand family protein
  misc_feature (1)..(469): Homolog of NCBI NO: 13605639 NR Description: At1g53210/F12M16_12 [Arabidopsis thaliana]
  misc_feature (1)..(469): Homolog of NCBI NO: 25405975 NR Description: protein F12M16.12 [imported] - Arabidopsis
  misc_feature (1)..(469): Homolog of NCBI NO: 30695448 NR Description: expressed protein [Arabidopsis thaliana]
  misc_feature (1)..(24): Homolog of NCBI NO: 34903912 NR Description: unnamed protein product [Oryza sativa (japonica
  misc_feature (33)..(469): Homolog of NCBI NO: 34903912 NR Description: unnamed protein product [Oryza sativa (japonica
MGPGLVGGLLLPILGALPDALLVLVSGLSGSKEEAQSQVLIGMGLLAGSTVFLLTLLWGTCVVVGKCDLGPGREAVDVTDTKGFSLTGTGVTTDVQTSYAARIMGLSVIPFIIAQFPKMLKTHHGQRLAMLLALVVSFALVLAYCLYQVFQPWIQRRKLAYAKHKHVISGILRHAQMQSLGRLLNDDGTPNEQVIRKLFRKIDMDESRSLSRAELHALIVGINFEEVDFDRTDAVDKVMDDFDTSRNDVVEEEEFVQGMRKWLDEARRSVPVGGAFSSKFIHEYHERTRQEHDELVDRSDEAVESVENPGWCIAKAVALLLLGSAAAAAFADPLVDAVHGFSNATRIPSFFISFIALPLATNSSEAVSAIIFASRKKQRTCSLTFSEVYGGVTMNNTLCLGVFLALIYFRNLTWDFSSEVLIILLVCVVMALFTSFRTTFPLWTCLVAYMLYPLSLIIVYILDYVFGWS

SEQ ID NO: 110520 - DNA, 2139 bp, Zea mays subsp. mays
  misc_feature (1)..(2139): Ceres Seq. ID no. 15180181
gttttctcagtctcctccttctccacgcacgtcatctcctaactccccagccgctccctctagccctcatctcgtcggccctggctgctggtcgtcgtcggccgcgagctctccaacacaggccggcttcctcttcctcccctgcccaagctctccactcgacgcctaggtatccatggcgtctcctccccttcctttactctgccatggacgcgagttccaagctcctgctcgtccaggcccccttcccaggcgcccctgcagagcccctggccgagcttccccatggtgtctcccccaactatggcgccctctgctcctccaagccggtgacccctcctctctggttctgcgcagggaactccctccatggctggcgtccctgtgctcgcgcccttgatccccatgcccgagctcctctccatcgtctttagctcgccatggtacagcgccactgtcaaatccggtctccagctcaccagcaacttccccttccttgcccttgcacacctctggtgcagcccttccctggtgctcgatgaaatggtcatgtggagctctttattgtgtgcagccccatctgcaacaccgtagaccccggtgaggtcctgttctcgccctgtcgttttagcgctcgatgtcgattactaatgtgtgaatttgtgtgttgatgagggagttaactggtaaagaagcgaggtccgtgagacgtttgccaagtgtttgatggaaggttcgaactgggaacctcgccgttctcgcggatcttcgggtcggtttgtgaattgcgcaagcatatggtgtgtcgactttcagattcattgctgtccatatgtgtgatatagttggtgaatgaacatgtcaaaggagagtaaattctttaggcatatgagaaaggattgatgattgcggtcataccattcacttcaaagatccttgaaccttgccagtcaagtatcgcatatcgacctccaaatccctggaccatgggaattctaagtctacttgctgaaatttataatcttccaaacctcaagatgaatctgaaatttgatattgaggtgctatttaagaaccttactgttgacataaaggatgtgaaaccaacttccctgctcaaagatcgtctgcgcgaagtcgagggaaatccagatttttcaaataaagatgttactgcatctcaaacccctgtggttgcagaagtcccttcagggaccatcccttcactaactcatatggaacaacaacctgagatcaatatcacatcccgagctatgagccttccaaatatacttaatgagtatgctgctcctgtccgtctacctacaaacaacacggtagaagatgacaaagttgctctgatgatgcctgagcaagtgccctcgttgacccaggtttcgccagcacaaacacaatcaacatcaccatctccattttctgttaaccagcttatggcggctattccacgtgaagagatacgtttcaaaataaatccaaagctcggctcccttgatccacaactgtaatatagcaaaattatggatttggttttggataaggctaacagggagataatactccctgttattcaaagaagtgtgaccatagcaagccgaactacaaaagaacttattctgaaggattatgcactggagtctgataacaatacgataactcgatccgcacatttgatggttggaacattagccggaagtctgacacatgttatttgcaaggaacctcttcgtgttgcactatattctaatcttcggaatctcattcagaaccttatgagcggcagtgaaactatcgagcaacttattcacacgctaatcaatgataacttggatcttggctgtgccatcattgagatttaaaagcttaaggtttacaattgttgggactatgcttcgtcgccgctcataaggttctgaatgagattccgaagattagaatatagtgcaacacgaagaggttccttgcaaataacttgtgcccgtatacttcgatctgttaaaatctattggttgtgtgccctgtgtctgttgtttgggtatctatactgttattttgagacatggttgacttgcatggtcatctggattgggttcgcttttctgagtcatttgtcttgacatg

SEQ ID NO: 110521 - protein, 207 aa, Zea mays subsp. mays
  misc_feature (1)..(207): Ceres Seq. ID no. 15180182
  misc_feature (1)..(90): Homolog of NCBI NO: 32407043 NR Description: hypothetical protein [Neurospora crassa]
  misc_feature (157)..(207): Homolog of NCBI NO: 32407043 NR Description: hypothetical protein [Neurospora crassa]
  misc_feature (1)..(207): Homolog of NCBI NO: 24652112 NR Description: CG1884-PA [Drosophila melanogaster]
  misc_feature (1)..(207): Homolog of NCBI NO: 24652110 NR Description: CG1884-PB [Drosophila melanogaster]
  misc_feature (1)..(85): Homolog of NCBI NO: 23508245 NR Description: hypothetical protein, conserved [Plasmodium
  misc_feature (196)..(207): Homolog of NCBI NO: 23508245 NR Description: hypothetical protein, conserved [Plasmodium
  misc_feature (1)..(207): Homolog of NCBI NO: 32398785 NR Description: putative transcription regulatory protein,
  misc_feature (1)..(207): Homolog of NCBI NO: 30678237 NR Description: expressed protein [Arabidopsis thaliana]
  misc_feature (1)..(12): Homolog of NCBI NO: 37536772 NR Description: putative transcription regulatory protein
  misc_feature (34)..(207): Homolog of NCBI NO: 37536772 NR Description: putative transcription regulatory protein
MIAVIPFTSKILEPCQSSIAYRPPNPWTMGILSLLAEIYNLPNLKMNLKFDIEVLFKNLTVDIKDVKPTSLLKDRLREVEGNPDFSNKDVTASQTPVVAEVPSGTIPSLTHMEQQPEINITSRAMSLPNILNEYAAPVRLPTNNTVEDDKVALMMPEQVPSLTQVSPAQTQSTSPSPFSVNQLMAAIPREEIRFKINPKLGSLDPQL

SEQ ID NO: 110522 - protein, 179 aa, Zea mays subsp. mays
  misc_feature (1)..(179): Ceres Seq. ID no. 15180183
  misc_feature (168)..(179): Homolog of NCBI NO: 23478681 NR Description: hypothetical protein [Plasmodium yoelii yoelii]
  misc_feature (1)..(62): Homolog of NCBI NO: 32407043 NR Description: hypothetical protein [Neurospora crassa]
  misc_feature (129)..(179): Homolog of NCBI NO: 32407043 NR Description: hypothetical protein [Neurospora crassa]
  misc_feature (1)..(179): Homolog of NCBI NO: 24652112 NR Description: CG1884-PA [Drosophila melanogaster]
  misc_feature (1)..(179): Homolog of NCBI NO: 24652110 NR Description: CG1884-PB [Drosophila melanogaster]
  misc_feature (1)..(57): Homolog of NCBI NO: 23508245 NR Description: hypothetical protein, conserved [Plasmodium
  misc_feature (168)..(179): Homolog of NCBI NO: 23508245 NR Description: hypothetical protein, conserved [Plasmodium
  misc_feature (1)..(179): Homolog of NCBI NO: 32398785 NR Description: putative transcription regulatory protein,
  misc_feature (1)..(179): Homolog of NCBI NO: 30678237 NR Description: expressed protein [Arabidopsis thaliana]
  misc_feature (6)..(179): Homolog of NCBI NO: 37536772 NR Description: putative transcription regulatory protein
MGILSLLAEIYNLPNLKMNLKFDIEVLFKNLTVDIKDVKPTSLLKDRLREVEGNPDFSNKDVTASQTPVVAEVPSGTIPSLTHMEQQPEINITSRAMSLPNILNEYAAPVRLPTNNTVEDDKVALMMPEQVPSLTQVSPAQTQSTSPSPFSVNQLMAAIPREEIRFKINPKLGSLDPQL

SEQ ID NO: 110523 - protein, 162 aa, Zea mays subsp. mays
  misc_feature (1)..(162): Ceres Seq. ID no. 15180184
  misc_feature (151)..(162): Homolog of NCBI NO: 23478681 NR Description: hypothetical protein [Plasmodium yoelii yoelii]
  misc_feature (1)..(45): Homolog of NCBI NO: 32407043 NR Description: hypothetical protein [Neurospora crassa]
  misc_feature (112)..(162): Homolog of NCBI NO: 32407043 NR Description: hypothetical protein [Neurospora crassa]
  misc_feature (1)..(162): Homolog of NCBI NO: 24652112 NR Description: CG1884-PA [Drosophila melanogaster]
  misc_feature (1)..(162): Homolog of NCBI NO: 24652110 NR Description: CG1884-PB [Drosophila melanogaster]
  misc_feature (1)..(40): Homolog of NCBI NO: 23508245 NR Description: hypothetical protein, conserved [Plasmodium
  misc_feature (151)..(162): Homolog of NCBI NO: 23508245 NR Description: hypothetical protein, conserved [Plasmodium
  misc_feature (1)..(162): Homolog of NCBI NO: 32398785 NR Description: putative transcription regulatory protein,
  misc_feature (1)..(162): Homolog of NCBI NO: 30678237 NR Description: expressed protein [Arabidopsis thaliana]
  misc_feature (1)..(162): Homolog of NCBI NO: 37536772 NR Description: putative transcription regulatory protein
MNLKFDIEVLFKNLTVDIKDVKPTSLLKDRLREVEGNPDFSNKDVTASQTPVVAEVPSGTIPSLTHMEQQPEINITSRAMSLPNILNEYAAPVRLPTNNTVEDDKVALMMPEQVPSLTQVSPAQTQSTSPSPFSVNQLMAAIPREEIRFKINPKLGSLDPQL

SEQ ID NO: 110524 - DNA, 1036 bp, Zea mays subsp. mays
  misc_feature (1)..(1036): Ceres Seq. ID no. 15180175
aaagacggagaagaagaagaagagtcgcgaaggaatggggaagggtaaggtgcatccctcgccgccgccagctgccgcggccgcggccgcgggcagcggagccggggagacgacggcggaggcggtgctgatgcggctgctgccggcggcggtgctcgcggccgcggcgccgctcggggccgaggggaaggaggtgctggcgtacctggtgctggcgtcgcttcggtcctcggccccgccgacgccgacgccgaccccggcgcgcggggacgggcaccgcccggagctcgggtgcggctgcttcgggtgctacacggcctactggtcccgctgggacgggtccccctagggcgaccgcgaggccatccaccgcgccatcgaggcgttcgaggagcacctggcggaggaggagaagggccgcgggaagggaggcgggccccgccgcggacggaagaagcgcgccgagggcaaggggaggtggaaggtgaagaaggaaaaggaggtggaggtcggcgtcgattcactcccgcccccgtccgatctccccgccccggaggaggcccccaaggcggaggacggcgcggagtacctgacggcggaggacgagaaggaggaggacgctccgaccgcggccgccggccccgaggatgagaagcggcggcgctggtggggctccgtgctgagctggaaggcgtggggcctctgggggtcccactagtcaggtccctcccctcgctacgcttcgccctgttcaattagttaggtttggtgctttctttgcttgctgctatcgctggggtttagctgctgctgctgctgctgcaggtggattagttggtgatggttagtactcctacgctatttggcagtctggatggggatgttgtgttttagtatctgttggtgcggtgtgtcacgtgttaggctcttctcttgtgtactgtacatacacgcaggcatggagtgtgtggtttggttggtgtaaattatcattgtaatgtactcctactaatgtaaatgcggcagtagttgtgat

SEQ ID NO: 110525 - protein, 115 aa, Zea mays subsp. mays
  misc_feature (1)..(115): Ceres Seq. ID no. 15180176
  misc_feature (14)..(115): Homolog of NCBI NO: 7940288 NR Description: F2401.15 [Arabidopsis thaliana]
  misc_feature (14)..(115): Homolog of NCBI NO: 7486149 NR Description: hypothetical protein F25O1.15 - Arabidopsis
  misc_feature (14)..(115): Homolog of NCBI NO: 15221172 NR Description: expressed protein [Arabidopsis thaliana]
  misc_feature (1)..(115): Homolog of NCBI NO: 7486369 NR Description: hypothetical protein F3I6.21 - Arabidopsis
  misc_feature (1)..(115): Homolog of NCBI NO: 15221709 NR Description: hypothetical protein [Arabidopsis thaliana]
  misc_feature (14)..(115): Homolog of NCBI NO: 18416955 NR Description: expressed protein [Arabidopsis thaliana]
  misc_feature (14)..(115): Homolog of NCBI NO: 9955553 NR Description: putative protein [Arabidopsis thaliana]
  misc_feature (14)..(115): Homolog of NCBI NO: 21554382 NR Description: unknown [Arabidopsis thaliana]
  misc_feature (14)..(115): Homolog of NCBI NO: 13430564 NR Description: unknown protein [Arabidopsis thaliana]
  misc_feature (13)..(115): Homolog of NCBI NO: 32488390 NR Description: OSJNBa0043A12.20 [Oryza sativa (japonica
KTEKKKKSREGMGKGKVHPSPPPAAAAAAAGSGAGETTAEAVLMRLLPAAVLAAAAPLGAEGKEVLAYLVLASLRSSAPPTPTPTPARGDGHRPELGCGCFGCYTAYWSRWDGSP

SEQ ID NO: 110526 - protein, 104 aa, Zea mays subsp. mays
  misc_feature (1)..(104): Ceres Seq. ID no. 15180177
  misc_feature (3)..(104): Homolog of NCBI NO: 7940288 NR Description: F2401.15 [Arabidopsis thaliana]
  misc_feature (3)..(104): Homolog of NCBI NO: 7486149 NR Description: hypothetical protein F25O1.15 - Arabidopsis
  misc_feature (3)..(104): Homolog of NCBI NO: 15221172 NR Description: expressed protein [Arabidopsis thaliana]
  misc_feature (1)..(104): Homolog of NCBI NO: 7486369 NR Description: hypothetical protein F3I6.21 - Arabidopsis
  misc_feature (1)..(104): Homolog of NCBI NO: 15221709 NR Description: hypothetical protein [Arabidopsis thaliana]
  misc_feature (3)..(104): Homolog of NCBI NO: 18416955 NR Description: expressed protein [Arabidopsis thaliana]
  misc_feature (3)..(104): Homolog of NCBI NO: 9955553 NR Description: putative protein [Arabidopsis thaliana]
  misc_feature (3)..(104): Homolog of NCBI NO: 21554382 NR Description: unknown [Arabidopsis thaliana]
  misc_feature (3)..(104): Homolog of NCBI NO: 13430564 NR Description: unknown protein [Arabidopsis thaliana]
  misc_feature (2)..(104): Homolog of NCBI NO: 32488390 NR Description: OSJNBa0043A12.20 [Oryza sativa (japonica
MGKGKVHPSPPPAAAAAAAGSGAGETTAEAVLMRLLPAAVLAAAAPLGAEGKEVLAYLVLASLRSSAPPTPTPTPARGDGHRPELGCGCFGCYTAYWSRWDGSP

SEQ ID NO: 110527 - protein, 72 aa, Zea mays subsp. mays
  misc_feature (1)..(72): Ceres Seq. ID no. 15180178
  misc_feature (1)..(72): Homolog of NCBI NO: 7940288 NR Description: F2401.15 [Arabidopsis thaliana]
  misc_feature (1)..(72): Homolog of NCBI NO: 7486149 NR Description: hypothetical protein F25O1.15 - Arabidopsis
  misc_feature (1)..(72): Homolog of NCBI NO: 15221172 NR Description: expressed protein [Arabidopsis thaliana]
  misc_feature (1)..(72): Homolog of NCBI NO: 7486369 NR Description: hypothetical protein F3I6.21 - Arabidopsis
  misc_feature (1)..(72): Homolog of NCBI NO: 15221709 NR Description: hypothetical protein [Arabidopsis thaliana]
  misc_feature (1)..(72): Homolog of NCBI NO: 18416955 NR Description: expressed protein [Arabidopsis thaliana]
  misc_feature (1)..(72): Homolog of NCBI NO: 9955553 NR Description: putative protein [Arabidopsis thaliana]
  misc_feature (1)..(72): Homolog of NCBI NO: 21554382 NR Description: unknown [Arabidopsis thaliana]
  misc_feature (1)..(72): Homolog of NCBI NO: 13430564 NR Description: unknown protein [Arabidopsis thaliana]
  misc_feature (1)..(72): Homolog of NCBI NO: 32488390 NR Description: OSJNBa0043A12.20 [Oryza sativa (japonica
MRLLPAAVLAAAAPLGAEGKEVLAYLVLASLRSSAPPTPTPTPARGDGHRPELGCGCFGCYTAYWSRWDGSP

SEQ ID NO: 110528 - DNA, 1204 bp, Zea mays subsp. mays
  misc_feature (1)..(1204): Ceres Seq. ID no. 15225677
tcttctcccctgtctgcttctgtggactgtggatgtgctcactgcttagtttggtgggttctgctcaccaatctcgctcgcagtatacgaagcctccatagtccatcatcctactgcactcggagaccacggacttggaataccaccctcgcccacagtcccacaccaggaaccatgaggaccatcatggcgaagagcccccacgactcctccttctcccggaggaacttcaagtggccggttcttgtcaagagcagcagccatggcgccgcagccggcggcggggaggacagctccggcaagggcgcggaggacgccgacgaggacgaggcgaccatggcgttctcctccagctgcccgtcgttccactcggaggacttcgtatccccgccgcccaatcccaaggcgccacctccaccgaagcagcggggcaagaggtgccgcgcggcggtctcccggctgcgcgcggcgcttgccgcggccatcgccggacggcaccgacaggtcgggctcggagcgcggatcacgggcacgctctacggccgccgccgcggccacgtgcacctcgcgttccaggtggacccgcgcgcgtgccccgcgctgctgctcgagctcgccgcgcccacggcgtcgctggtgcgcgagatggcctcgggcctcgtccgcatcgcgctagagtgcgaccgcgccaagggcgcctgcgccttcccgagcgccgcggccgcaaccaatggcggcgccggtgggtgcaggaagctggtcgaggagaaggcgtggcgcgcgtactgcaacggcaagggctgcgggtacgcggtgcggcgcgagtgcggtgccgcagacctgcgcgtgctgcgcgcgctggagcccgtctctatgggcgcgggcgtcataccggcggcgtgcggtggcggcgagggggacgtcatgtacatgcgcgctcgctttgagcgcgtcgtgggctcccgcgactcggaggcattctacatgatgaaccctgacagcagcaccggcggcaatggcggcccggagcttagcatctacctccttagagtttgattgcacatttaacttcgcggcgcatgcgtcagacaccgtgatcttgcatgctaacctgctgtctttctagtacatttgatttcttcgtgcttattattgctctggtggttgtgaaaaatgcttgtcagtttagactgcagaacgaaac

SEQ ID NO: 110529 - protein, 351 aa, Zea mays subsp. mays
  misc_feature (1)..(351): Ceres Seq. ID no. 15225678
  misc_feature (174)..(351): Pfam Name: Protein of unknown function, DUF617 Pfam Description: Protein of unknown function, DUF617
  misc_feature (173)..(351): Homolog of NCBI NO: 15235158 NR Description: expressed protein [Arabidopsis thaliana]
  misc_feature (149)..(351): Homolog of NCBI NO: 34909066 NR Description: P0702B09.30 [Oryza sativa (japonica
  misc_feature (159)..(351): Homolog of NCBI NO: 32129319 NR Description: hypothetical protein [Oryza sativa (japonica
  misc_feature (172)..(351): Homolog of NCBI NO: 15240220 NR Description: hypothetical protein [Arabidopsis thaliana]
  misc_feature (171)..(351): Homolog of NCBI NO: 21593037 NR Description: unknown [Arabidopsis thaliana]
  misc_feature (171)..(351): Homolog of NCBI NO: 18405770 NR Description: expressed protein [Arabidopsis thaliana]
  misc_feature (104)..(351): Homolog of NCBI NO: 15230862 NR Description: expressed protein [Arabidopsis thaliana]
  misc_feature (104)..(351): Homolog of NCBI NO: 11994755 NR Description: gb|AAB84348.1~gene_id:T5M7.9~similar to unknown
  misc_feature (150)..(351): Homolog of NCBI NO: 15237221 NR Description: expressed protein [Arabidopsis thaliana]
  misc_feature (59)..(351): Homolog of NCBI NO: 34911646 NR Description: P0039G05.26 [Oryza sativa (japonica
SSPLSASVDCGCAHCLVWWVLLTNLARSIRSLHSPSSYCTRRPRTWNTTLAHSPTPGTMRTIMAKSPHDSSFSRRNFKWPVLVKSSSHGAAAGGGEDSSGKGAEDADEDEATMAFSSSCPSFHSEDFVSPPPNPKAPPPPKQRGKRCRAAVSRLRAALAAAIAGRHRQVGLGARITGTLYGRRRGHVHLAFQVDPRACPALLLELAAPTASLVREMASGLVRIALECDRAKGACAFPSAAAATNGGAGGCRKLVEEKAWRAYCNGKGCGYAVRRECGAADLRVLRALEPVSMGAGVIPAACGGGEGDVMYMRARFERVVGSRDSEAFYMMNPDSSTGGNGGPELSIYLLRV

SEQ ID NO: 110530 - protein, 293 aa, Zea mays subsp. mays
  misc_feature (1)..(293): Ceres Seq. ID no. 15225679
  misc_feature (116)..(293): Pfam Name: Protein of unknown function, DUF617 Pfam Description: Protein of unknown function, DUF617
  misc_feature (115)..(293): Homolog of NCBI NO: 15235158 NR Description: expressed protein [Arabidopsis thaliana]
  misc_feature (91)..(293): Homolog of NCBI NO: 34909066 NR Description: P0702B09.30 [Oryza sativa (japonica
  misc_feature (101)..(293): Homolog of NCBI NO: 32129319 NR Description: hypothetical protein [Oryza sativa (japonica
  misc_feature (114)..(293): Homolog of NCBI NO: 15240220 NR Description: hypothetical protein [Arabidopsis thaliana]
  misc_feature (113)..(293): Homolog of NCBI NO: 21593037 NR Description: unknown [Arabidopsis thaliana]
  misc_feature (113)..(293): Homolog of NCBI NO: 18405770 NR Description: expressed protein [Arabidopsis thaliana]
  misc_feature (46)..(293): Homolog of NCBI NO: 15230862 NR Description: expressed protein [Arabidopsis thaliana]
  misc_feature (46)..(293): Homolog of NCBI NO: 11994755 NR Description: gb|AAB84348.1~gene_id:T5M7.9~similar to unknown
  misc_feature (92)..(293): Homolog of NCBI NO: 15237221 NR Description: expressed protein [Arabidopsis thaliana]
  misc_feature (1)..(293): Homolog of NCBI NO: 34911646 NR Description: P0039G05.26 [Oryza sativa (japonica
MRTIMAKSPHDSSFSRRNFKWPVLVKSSSHGAAAGGGEDSSGKGAEDADEDEATMAFSSSCPSFHSEDFVSPPPNPKAPPPPKQRGKRCRAAVSRLRAALAAAIAGRHRQVGLGARITGTLYGRRRGHVHLAFQVDPRACPALLLELAAPTASLVREMASGLVRIALECDRAKGACAFPSAAAATNGGAGGCRKLVEEKAWRAYCNGKGCGYAVRRECGAADLRVLRALEPVSMGAGVIPAACGGGEGDVMYMRARFERVVGSRDSEAFYMMNPDSSTGGNGGPELSIYLLRV

SEQ ID NO: 110531 - protein, 289 aa, Zea mays subsp. mays
  misc_feature (1)..(289): Ceres Seq. ID no. 15225680
  misc_feature (112)..(289): Pfam Name: Protein of unknown function, DUF617 Pfam Description: Protein of unknown function, DUF617
  misc_feature (111)..(289): Homolog of NCBI NO: 15235158 NR Description: expressed protein [Arabidopsis thaliana]
  misc_feature (87)..(289): Homolog of NCBI NO: 34909066 NR Description: P0702B09.30 [Oryza sativa (japonica
  misc_feature (97)..(289): Homolog of NCBI NO: 32129319 NR Description: hypothetical protein [Oryza sativa (japonica
  misc_feature (110)..(289): Homolog of NCBI NO: 15240220 NR Description: hypothetical protein [Arabidopsis thaliana]
  misc_feature (109)..(289): Homolog of NCBI NO: 21593037 NR Description: unknown [Arabidopsis thaliana]
  misc_feature (109)..(289): Homolog of NCBI NO: 18405770 NR Description: expressed protein [Arabidopsis thaliana]
  misc_feature (42)..(289): Homolog of NCBI NO: 15230862 NR Description: expressed protein [Arabidopsis thaliana]
  misc_feature (42)..(289): Homolog of NCBI NO: 11994755 NR Description: gb|AAB84348.1~gene_id:T5M7.9~similar to unknown
  misc_feature (88)..(289): Homolog of NCBI NO: 15237221 NR Description: expressed protein [Arabidopsis thaliana]
  misc_feature (1)..(289): Homolog of NCBI NO: 34911646 NR Description: P0039G05.26 [Oryza sativa (japonica
MAKSPHDSSFSRRNFKWPVLVKSSSHGAAAGGGEDSSGKGAEDADEDEATMAFSSSCPSFHSEDFVSPPPNPKAPPPPKQRGKRCRAAVSRLRAALAAAIAGRHRQVGLGARITGTLYGRRRGHVHLAFQVDPRACPALLLELAAPTASLVREMASGLVRIALECDRAKGACAFPSAAAATNGGAGGCRKLVEEKAWRAYCNGKGCGYAVRRECGAADLRVLRALEPVSMGAGVIPAACGGGEGDVMYMRARFERVVGSRDSEAFYMMNPDSSTGGNGGPELSIYLLRV

SEQ ID NO: 110532 - DNA, 2689 bp, Zea mays subsp. mays
  misc_feature (1)..(2689): Ceres Seq. ID no. 15180386
  misc_feature: MA Experiment ID: 108522 Result: Down-regulated in Transcription
  misc_feature: MA Experiment 108522 PARAMETER Experiment Name: Zm_42deg_Heat_P Parameter: Age (day) Value: 8
  misc_feature: MA Experiment 108522 PARAMETER Experiment Name: Zm_42deg_Heat_P Parameter: Organism Value: Zea mays
  misc_feature: MA Experiment 108522 PARAMETER Experiment Name: Zm_42deg_Heat_P Parameter: Plant Line Value: 35A19
  misc_feature: MA Experiment 108522 PARAMETER Experiment Name: Zm_42deg_Heat_P Parameter: Temperature (deg C) Value: 42 vs. 22
  misc_feature: MA Experiment 108522 PARAMETER Experiment Name: Zm_42deg_Heat_P Parameter: Timepoint (hr) Value: 1
  misc_feature: MA Experiment 108522 PARAMETER Experiment Name: Zm_42deg_Heat_P Parameter: Tissue Value: Aerial
  misc_feature: MA Experiment ID: 108545 Result: Down-regulated in Transcription
  misc_feature: MA Experiment 108545 PARAMETER Experiment Name: Zm_Imbibed_Seeds_P Parameter: Age (day) Value: 3 vs. 2
  misc_feature: MA Experiment 108545 PARAMETER Experiment Name: Zm_Imbibed_Seeds_P Parameter: Organism Value: Zea mays
  misc_feature: MA Experiment 108545 PARAMETER Experiment Name: Zm_Imbibed_Seeds_P Parameter: Plant Line Value: 35A19
  misc_feature: MA Experiment 108545 PARAMETER Experiment Name: Zm_Imbibed_Seeds_P Parameter: Tissue Value: Aerial vs. Embryo
  misc_feature: MA Experiment ID: 20000487 Result: Up-regulated in Transcription
  misc_feature: MA Experiment 20000487 PARAMETER Experiment Name: Zm_50mM_NH4NO3_L_to_H_P Parameter: Organism Value: Zea mays
  misc_feature: MA Experiment 20000487 PARAMETER Experiment Name: Zm_50mM_NH4NO3_L_to_H_P Parameter: Timepoint (hr) Value: 4
  misc_feature: MA Experiment 20000487 PARAMETER Experiment Name: Zm_50mM_NH4NO3_L_to_H_P Parameter: Tissue Value: Leaves
  misc_feature: MA Experiment 20000487 PARAMETER Experiment Name: Zm_50mM_NH4NO3_L_to_H_P Parameter: Treatment Value: 50mM NH4NO3 vs. 100mM Mannitol
  misc_feature: MA Experiment ID: 20000534 Result: Up-regulated in Transcription
  misc_feature: MA Experiment 20000534 PARAMETER Experiment Name: Zm_Hybrid_Pollen_P Parameter: Age (day) Value: 8
  misc_feature: MA Experiment 20000534 PARAMETER Experiment Name: Zm_Hybrid_Pollen_P Parameter: Organism Value: Zea mays
  misc_feature: MA Experiment 20000534 PARAMETER Experiment Name: Zm_Hybrid_Pollen_P Parameter: Plant Line Value: 35A19
  misc_feature: MA Experiment 20000534 PARAMETER Experiment Name: Zm_Hybrid_Pollen_P Parameter: Tissue Value: Pollen vs. Aerial
tcacagcgtcgtgacgtcgtcctctgcttcgcaagcgcccgagccgcgcgccgccgaacccgccgcctcctccagcctccgggcacatcggagcacccagccaatcgcacctcgacacggcggcaccggaggaacccctccttcttggtcgtagcctccgtggcctccctcccctcaccccttccggtgttggattgagggtggagcggagatccgccacggcttggattgatccctggatcgatacgccatataatttgggattctaaggtcccggtgcagcttcttctcgcagaagtttaccctctatgcccctctctaagcccacccttgtgattccgccgtgacgcctcatccacgggagaaacgccatgatgtcaaggtttgcccacttggggaagagcagaaaactcgctgaaacccttttggttgcctcaaagcccaatactgctagtggccaaaacattgcttcaagctttgcattcggcttgggttattccagcaggacatttttgcatgggaaggttcataatggtccaaacacctcctacatgctgggaagagcaaatgatagcttacattggagcactggtgtgaggaaattctcaattctttcatcttgtagccagaatgcatttcagaatcagattgcttggaagcgacttgtagcactgggttctcgtgcaccaaaagcatctccaatttttagtaaggttgcttgtgccattggcttggctgtgagtaggtctaatataactccttaccttgtcgcttttattgcgggagaggtaatgctagctcagaagacatctgcagatggagaatactacccaatacgtgagcgagctcaggatggccgtatttacgttacctctctaatatattcggcagtagaattggtaattataatcttcagatcaatatatttggcattgctgttcactccaagtatactgatggccccatttgcagagactcttggcagtaagtataggaaaacatggcttcgacttgtccatcgtactttggagcttgcaggtcctgcgtttatcaaatggggccaatgggctgcaacacgccctgatctgtttccaagtgacctttgtactgaattgtcaaagctgcacacaaaagcaccagctcacagctttacctatactaagaaaactgttgagaaagcttttggtcgaaagctatcagacatttttgaaaattttgaagaggaccctgttgcatctggaagtgttgctcaagtgcatcgggctgttctacgattccggtatcctaatcggcagacaaagcgtgtaactgttgcagtaaaagtaaggcatcctggtgtaggggactcgataagaagagatttcaatatcatcaatgccgtagcaaaaatatctagatatatccccacgctgaattggttgcgcctagatgagagtgtacaacagtttgctgtcttcatgatgtctcaagttgaccttgcaagggaagctgctcatctgagccggtttatctacaacttccgaaggtggaaggatgtatctttcccaagacctctctatccacttgttcatcctgctgttttagttgagacttacgagcatggggagagtgtttcacactatgttgatgaccttgaaggacatgatcgaattaaaagtgctctggcccatattggtactcacgcgctcctgaaaatgctactggttgataatttcgtccatgcagatatgcacccaggaaatattttagtccgtgtcgcacaaccaaagaactcaaataacacccttataaagtcaaggccacatgtagtcttcctggatgtaggaatgactgctgaactttcaagtaatgaccgtgtgaatttacttgagttcttcaaggctgttgctcgccgagatggtcgtacagctgcagaaagtactctaaagttgtcaaaacaacagaattgtccaaatccaaaagcttttattgaggaagttgaacgatcattctctttttggggcactgctgaaggtgatgctatccacccagctgagtgtatgcaccaactgcttgagcaagttcgatgtcataaagtgaatatcgatggcaatgtttgtactgtcatggtgactacattagttcttgagggctggcaacgtaagttggatccagattataatgttatgaagactctgcaaactttactttttaaggaagactgggcgaagtctcttcaatacactatccaagggctcatggcgccttagggtcgtccgcaatcctttctaaagttttgatctggtttgtgttcgaccggaggatcctcttctctcaccatcacgattctggcttcttttctacttaatttcacgtttcgtttctctgtacctgtcctggcgttgtgctgctaaagcagccttgatgataaagtaataactgcagtaaaaattttcagaagctaccagagtactatgctgctcagctctgggctgtcttcttatatgttcttgaagggccaaagaattaggtccttttcccccctcctaccaacacttttgacaatagctcttagatgatgtagcaaaaggcgttctgttctgatgatctttttgtaactggagaggttgtatccgtggactggagagttgcttatgtacagacagagatactgttaatctcgaaggaatccacttgtcaactgacaatc

SEQ ID NO: 110533 - protein, 625 aa, Zea mays subsp. mays
  misc_feature (1)..(625): Ceres Seq. ID no. 15180387
  misc_feature (269)..(395): Pfam Name: ABC1 family Pfam Description: ABC1 family
  misc_feature (290)..(536): Homolog of NCBI NO: 32261307 NR Description: aarF domain containing kinase 2
  misc_feature (182)..(301): Homolog of NCBI NO: 32409949 NR Description: hypothetical protein [Neurospora crassa]
  misc_feature (476)..(606): Homolog of NCBI NO: 32409949 NR Description: hypothetical protein [Neurospora crassa]
  misc_feature (286)..(477): Homolog of NCBI NO: 32409949 NR Description: hypothetical protein [Neurospora crassa]
  misc_feature (196)..(625): Homolog of NCBI NO: 25404331 NR Description: hypothetical protein T25B24.1 [imported] -
  misc_feature (44)..(610): Homolog of NCBI NO: 34394005 NR Description: putative ubiquinone biosynthesis protein AarF
  misc_feature (1)..(625): Homolog of NCBI NO: 30696591 NR Description: expressed protein [Arabidopsis thaliana]
  misc_feature (196)..(625): Homolog of NCBI NO: 30682208 NR Description: hypethetical 62.8 KD protein in SSE1-CAR1
  misc_feature (1)..(625): Homolog of NCBI NO: 32488318 NR Description: OSJNBa0015K02.12 [Oryza sativa (japonica
  misc_feature (1)..(625): Homolog of NCBI NO: 19387282 NR Description: putative 62.8 kDa protein [Oryza sativa (japonica
MMSRFAHLGKSRKLAETLLVASKPNTASGQNIASSFAFGLGYSSRTFLHGKVHNGPNTSYMLGRANDSLHWSTGVRKFSILSSCSQNAFQNQIAWKRLVALGSRAPKASPIFSKVACAIGLAVSRSNITPYLVAFIAGEVMLAQKTSADGEYYPIRERAQDGRIYVTSLIYSAVELVIIIFRSIYLALLFTPSILMAPFAETLGSKYRKTWLRLVHRTLELAGPAFIKWGQWAATRPDLFPSDLCTELSKLHTKAPAHSFTYTKKTVEKAFGRKLSDIFENFEEDPVASGSVAQVHRAVLRFRYPNRQTKRVTVAVKVRHPGVGDSIRRDFNIINAVAKISRYIPTLNWLRLDESVQQFAVFMMSQVDLAREAAHLSRFIYNFRRWKDVSFPRPLYPLVHPAVLVETYEHGESVSHYVDDLEGHDRIKSALAHIGTHALLKMLLVDNFVHADMHPGNILVRVAQPKNSNNTLIKSRPHVVFLDVGMTAELSSNDRVNLLEFFKAVARRDGRTAAESTLKLSKQQNCPNPKAFIEEVERSFSFWGTAEGDAIHPAECMHQLLEQVRCHKVNIDGNVCTVMVTTLVLEGWQRKLDPDYNVMKTLQTLLFKEDWAKSLQYTIQGLMAP

SEQ ID NO: 110534 - protein, 624 aa, Zea mays subsp. mays
  misc_feature (1)..(624): Ceres Seq. ID no. 15180388
  misc_feature (268)..(394): Pfam Name: ABC1 family Pfam Description: ABC1 family
  misc_feature (289)..(535): Homolog of NCBI NO: 32261307 NR Description: aarF domain containing kinase 2
  misc_feature (181)..(300): Homolog of NCBI NO: 32409949 NR Description: hypothetical protein [Neurospora crassa]
  misc_feature (475)..(605): Homolog of NCBI NO: 32409949 NR Description: hypothetical protein [Neurospora crassa]
  misc_feature (285)..(476): Homolog of NCBI NO: 32409949 NR Description: hypothetical protein [Neurospora crassa]
  misc_feature (195)..(624): Homolog of NCBI NO: 25404331 NR Description: hypothetical protein T25B24.1 [imported] -
  misc_feature (43)..(609): Homolog of NCBI NO: 34394005 NR Description: putative ubiquinone biosynthesis protein AarF
  misc_feature (1)..(624): Homolog of NCBI NO: 30696591 NR Description: expressed protein [Arabidopsis thaliana]
  misc_feature (195)..(624): Homolog of NCBI NO: 30682208 NR Description: hypethetical 62.8 KD protein in SSE1-CAR1
  misc_feature (1)..(624): Homolog of NCBI NO: 32488318 NR Description: OSJNBa0015K02.12 [Oryza sativa (japonica
  misc_feature (1)..(624): Homolog of NCBI NO: 19387282 NR Description: putative 62.8 kDa protein [Oryza sativa (japonica
MSRFAHLGKSRKLAETLLVASKPNTASGQNIASSFAFGLGYSSRTFLHGKVHNGPNTSYMLGRANDSLHWSTGVRKFSILSSCSQNAFQNQIAWKRLVALGSRAPKASPIFSKVACAIGLAVSRSNITPYLVAFIAGEVMLAQKTSADGEYYPIRERAQDGRIYVTSLIYSAVELVIIIFRSIYLALLFTPSILMAPFAETLGSKYRKTWLRLVHRTLELAGPAFIKWGQWAATRPDLFPSDLCTELSKLHTKAPAHSFTYTKKTVEKAFGRKLSDIFENFEEDPVASGSVAQVHRAVLRFRYPNRQTKRVTVAVKVRHPGVGDSIRRDFNIINAVAKISRYIPTLNWLRLDESVQQFAVFMMSQVDLAREAAHLSRFIYNFRRWKDVSFPRPLYPLVHPAVLVETYEHGESVSHYVDDLEGHDRIKSALAHIGTHALLKMLLVDNFVHADMHPGNILVRVAQPKNSNNTLIKSRPHVVFLDVGMTAELSSNDRVNLLEFFKAVARRDGRTAAESTLKLSKQQNCPNPKAFIEEVERSFSFWGTAEGDAIHPAECMHQLLEQVRCHKVNIDGNVCTVMVTTLVLEGWQRKLDPDYNVMKTLQTLLFKEDWAKSLQYTIQGLMAP

SEQ ID NO: 110535 - protein, 565 aa, Zea mays subsp. mays
  misc_feature (1)..(565): Ceres Seq. ID no. 15180389
  misc_feature (209)..(335): Pfam Name: ABC1 family Pfam Description: ABC1 family
  misc_feature (230)..(476): Homolog of NCBI NO: 32261307 NR Description: aarF domain containing kinase 2
  misc_feature (122)..(241): Homolog of NCBI NO: 32409949 NR Description: hypothetical protein [Neurospora crassa]
  misc_feature (416)..(546): Homolog of NCBI NO: 32409949 NR Description: hypothetical protein [Neurospora crassa]
  misc_feature (226)..(417): Homolog of NCBI NO: 32409949 NR Description: hypothetical protein [Neurospora crassa]
  misc_feature (136)..(565): Homolog of NCBI NO: 25404331 NR Description: hypothetical protein T25B24.1 [imported] -
  misc_feature (1)..(550): Homolog of NCBI NO: 34394005 NR Description: putative ubiquinone biosynthesis protein AarF
  misc_feature (1)..(565): Homolog of NCBI NO: 30696591 NR Description: expressed protein [Arabidopsis thaliana]
  misc_feature (136)..(565): Homolog of NCBI NO: 30682208 NR Description: hypethetical 62.8 KD protein in SSE1-CAR1
  misc_feature (1)..(565): Homolog of NCBI NO: 32488318 NR Description: OSJNBa0015K02.12 [Oryza sativa (japonica
  misc_feature (1)..(565): Homolog of NCBI NO: 19387282 NR Description: putative 62.8 kDa protein [Oryza sativa (japonica
MLGRANDSLHWSTGVRKFSILSSCSQNAFQNQIAWKRLVALGSRAPKASPIFSKVACAIGLAVSRSNITPYLVAFIAGEVMLAQKTSADGEYYPIRERAQDGRIYVTSLIYSAVELVIIIFRSIYLALLFTPSILMAPFAETLGSKYRKTWLRLVHRTLELAGPAFIKWGQWAATRPDLFPSDLCTELSKLHTKAPAHSFTYTKKTVEKAFGRKLSDIFENFEEDPVASGSVAQVHRAVLRFRYPNRQTKRVTVAVKVRHPGVGDSIRRDFNIINAVAKISRYIPTLNWLRLDESVQQFAVFMMSQVDLAREAAHLSRFIYNFRRWKDVSFPRPLYPLVHPAVLVETYEHGESVSHYVDDLEGHDRIKSALAHIGTHALLKMLLVDNFVHADMHPGNILVRVAQPKNSNNTLIKSRPHVVFLDVGMTAELSSNDRVNLLEFFKAVARRDGRTAAESTLKLSKQQNCPNPKAFIEEVERSFSFWGTAEGDAIHPAECMHQLLEQVRCHKVNIDGNVCTVMVTTLVLEGWQRKLDPDYNVMKTLQTLLFKEDWAKSLQYTIQGLMAP

SEQ ID NO: 110536 - DNA, 1241 bp, Zea mays subsp. mays
  misc_feature (1)..(1241): Ceres Seq. ID no. 14302142
atgtaaggctgcaagggttaagttgttccttgttgagccttgcaaggaattgaccgtgtccagctctccatctactccacccttcaaaagtaaagatggttcagttggcagacctggcaagttagaaggtcaccactagtcattcccaaaaatgatcgccacatcgcactgagtccaagtaccggagcaggatgatgtattcccctccacgcaccgatcctgacagagaggatgagcagtgcttcgcaattggagctaacctgctttcttcactagatcatactatgaagtttgatgagcctatcgcctttccaatgaacaatgtaggcatgcaagagaaggttcagctctacaattctactggagatgctcaactaagtagaaatgtgaacacagggaagtgttcaaagggtggcaaaaggaagggttctggagagaacaattcatcactgcattctctagacgaagccagggcattgttgcagcgagaagtcagcatggagtgtgctgatgagaaggctgctggagccaagagagaggactacgcggcgcatgtccgggcaaagcgaggccaagccaccaacagccacagccttgcagaaagatttcgaagggaaaagataaatgtaaggatgaagcttcttcaggaccttgtcccgggttgcaacaagattacaggcaaggccatgatgcttgacgagatcataaactatgtgcaatctctgcagcgtcaggttgagttcctttcgatgaagctctcagcgatcagaccagggttcaaccgtgacctcgacctgcaagatatcctttgcgcacaagatgccagctccggttttccaggatacagcctgcaagcgagcgatgtgcatcttaatctgtatatagcatctgaagaaagtttctcacacaggatcatccctaatcctgcaaatgttcatgtgacaagaaacggccagctatctgcatttcctcagagaggagttatctggaacgaggaacttcgcagcgttgctccacatactttcgcttcagataccgttgctggttcaatggaagtggagtgacaaactgacaagtcggcagtttaatggtaaatcttgacaagtttagtctgttgggttgctactggtcaactggtgtgcctttgtaagttgcaatggtggcgcggatgagctagtcaactttggtctttggtgcccacacaccatgtacagttataataactaatcaaaggagcacag

SEQ ID NO: 110537 - protein, 290 aa, Zea mays subsp. mays
  misc_feature (1)..(290): Ceres Seq. ID no. 14302143
  misc_feature (129)..(179): Pfam Name: Helix-loop-helix DNA-binding domain Pfam Description: Helix-loop-helix DNA-binding domain
  misc_feature (76)..(264): Homolog of NCBI NO: 21539493 NR Description: unknown protein [Arabidopsis thaliana]
  misc_feature (76)..(264): Homolog of NCBI NO: 20127066 NR Description: putative bHLH transcription factor [Arabidopsis
  misc_feature (76)..(264): Homolog of NCBI NO: 22329164 NR Description: bHLH protein [Arabidopsis thaliana]
  misc_feature (76)..(264): Homolog of NCBI NO: 7487656 NR Description: hypothetical protein T4L20.110 - Arabidopsis
  misc_feature (77)..(213): Homolog of NCBI NO: 30681559 NR Description: expressed protein [Arabidopsis thaliana]
  misc_feature (40)..(205): Homolog of NCBI NO: 20127064 NR Description: putative bHLH transcription factor [Arabidopsis
  misc_feature (40)..(205): Homolog of NCBI NO: 15231450 NR Description: bHLH protein family [Arabidopsis thaliana]
  misc_feature (42)..(254): Homolog of NCBI NO: 15222679 NR Description: bHLH protein [Arabidopsis thaliana]
  misc_feature (98)..(276): Homolog of NCBI NO: 28273388 NR Description: putative Helix-loop-helix DNA-binding domain
  misc_feature (2)..(261): Homolog of NCBI NO: 27311243 NR Description: Hypothetical protein [Oryza sativa (japonica
MMYSPPRTDPDREDEQCFAIGANLLSSLDHTMKFDEPIAFPMNNVGMQEKVQLYNSTGDAQLSRNVNTGKCSKGGKRKGSGENNSSLHSLDEARALLQREVSMECADEKAAGAKREDYAAHVRAKRGQATNSHSLAERFRREKINVRMKLLQDLVPGCNKITGKAMMLDEIINYVQSLQRQVEFLSMKLSAIRPGFNRDLDLQDILCAQDASSGFPGYSLQASDVHLNLYIASEESFSHRIIPNPANVHVTRNGQLSAFPQRGVIWNEELRSVAPHTFASDTVAGSMEVE

SEQ ID NO: 110538 - protein, 289 aa, Zea mays subsp. mays
  misc_feature (1)..(289): Ceres Seq. ID no. 14302144
  misc_feature (128)..(178): Pfam Name: Helix-loop-helix DNA-binding domain Pfam Description: Helix-loop-helix DNA-binding domain
  misc_feature (76)..(212): Homolog of NCBI NO: 30681559 NR Description: expressed protein [Arabidopsis thaliana]
  misc_feature (39)..(204): Homolog of NCBI NO: 20127064 NR Description: putative bHLH transcription factor [Arabidopsis
  misc_feature (39)..(204): Homolog of NCBI NO: 15231450 NR Description: bHLH protein family [Arabidopsis thaliana]
  misc_feature (75)..(263): Homolog of NCBI NO: 21539493 NR Description: unknown protein [Arabidopsis thaliana]
  misc_feature (75)..(263): Homolog of NCBI NO: 20127066 NR Description: putative bHLH transcription factor [Arabidopsis
  misc_feature (75)..(263): Homolog of NCBI NO: 7487656 NR Description: hypothetical protein T4L20.110 - Arabidopsis
  misc_feature (75)..(263): Homolog of NCBI NO: 22329164 NR Description: bHLH protein [Arabidopsis thaliana]
  misc_feature (41)..(253): Homolog of NCBI NO: 15222679 NR Description: bHLH protein [Arabidopsis thaliana]
  misc_feature (97)..(275): Homolog of NCBI NO: 28273388 NR Description: putative Helix-loop-helix DNA-binding domain
  misc_feature (1)..(260): Homolog of NCBI NO: 27311243 NR Description: Hypothetical protein [Oryza sativa (japonica
MYSPPRTDPDREDEQCFAIGANLLSSLDHTMKFDEPIAFPMNNVGMQEKVQLYNSTGDAQLSRNVNTGKCSKGGKRKGSGENNSSLHSLDEARALLQREVSMECADEKAAGAKREDYAAHVRAKRGQATNSHSLAERFRREKINVRMKLLQDLVPGCNKITGKAMMLDEIINYVQSLQRQVEFLSMKLSAIRPGFNRDLDLQDILCAQDASSGFPGYSLQASDVHLNLYIASEESFSHRIIPNPANVHVTRNGQLSAFPQRGVIWNEELRSVAPHTFASDTVAGSMEVE

SEQ ID NO: 110539 - protein, 259 aa, Zea mays subsp. mays
  misc_feature (1)..(259): Ceres Seq. ID no. 14302145
  misc_feature (98)..(148): Pfam Name: Helix-loop-helix DNA-binding domain Pfam Description: Helix-loop-helix DNA-binding domain
  misc_feature (45)..(233): Homolog of NCBI NO: 22329164 NR Description: bHLH protein [Arabidopsis thaliana]
  misc_feature (45)..(233): Homolog of NCBI NO: 21539493 NR Description: unknown protein [Arabidopsis thaliana]
  misc_feature (45)..(233): Homolog of NCBI NO: 20127066 NR Description: putative bHLH transcription factor [Arabidopsis
  misc_feature (45)..(233): Homolog of NCBI NO: 7487656 NR Description: hypothetical protein T4L20.110 - Arabidopsis
  misc_feature (46)..(182): Homolog of NCBI NO: 30681559 NR Description: expressed protein [Arabidopsis thaliana]
  misc_feature (9)..(174): Homolog of NCBI NO: 20127064 NR Description: putative bHLH transcription factor [Arabidopsis
  misc_feature (9)..(174): Homolog of NCBI NO: 15231450 NR Description: bHLH protein family [Arabidopsis thaliana]
  misc_feature (11)..(223): Homolog of NCBI NO: 15222679 NR Description: bHLH protein [Arabidopsis thaliana]
  misc_feature (67)..(245): Homolog of NCBI NO: 28273388 NR Description: putative Helix-loop-helix DNA-binding domain
  misc_feature (1)..(230): Homolog of NCBI NO: 27311243 NR Description: Hypothetical protein [Oryza sativa (japonica
MKFDEPIAFPMNNVGMQEKVQLYNSTGDAQLSRNVNTGKCSKGGKRKGSGENNSSLHSLDEARALLQREVSMECADEKAAGAKREDYAAHVRAKRGQATNSHSLAERFRREKINVRMKLLQDLVPGCNKITGKAMMLDEIINYVQSLQRQVEFLSMKLSAIRPGFNRDLDLQDILCAQDASSGFPGYSLQASDVHLNLYIASEESFSHRIIPNPANVHVTRNGQLSAFPQRGVIWNEELRSVAPHTFASDTVAGSMEVE

SEQ ID NO: 110540 - DNA, 1560 bp, Zea mays subsp. mays
  misc_feature (1)..(1560): Ceres Seq. ID no. 14303305
gatacaaatgaaacggatctgtgaccgcctacgacagtgtagtatatatatacactacacagtgtagctagtatacctcgcccactctaaagcgaagcagcaagcgctctgtgaccgactgtgatcacacaccacgcgtccatggtcgtcatgggcaagcacgatgacgatgagaagcagcagcaccagcagatggagatggaggacgtacatgaagtaggagccgtcgaggtgctgccgctggagaatgaggcggaggcggcgctggtgcgcaagatctccggcctggccgccgccatcgcgaagctgccgtcgctgagcccgtcgccggaggtgaacgcgctgttcacggacctggtcacggcctgcatcccgcgcagcaccgtggacgtggagcgcctgggcccggagctgcagcgcatgcgcgcggggctcatccgccgctgcgccgacgccgaggcccagctggaggcgcactactcggacctgctggcggccttggaggacaacccgctggaccacctgccgctcttcccctacttgggcaactacctgctgctgggcgagctggagcacggcctgctggcgcgccacgtcccgggcccgccgcccgcccgcgtcgccttcgtggggtccggcccgctcccgctcagctccctcgtgctcgccgcgcgccacctccccgccgccgccttcgacaactacgacatctgcgcggaggccaacggccgggcgcgccgcctcgtgcgcgccgacgccgcgctcgccgcgcgcatggcgttccgcacctccgacgtggcccacgtcacgcgggacctggccgcctacgacgtcgtcttcctggcggcgctcgtgggcatggcggccgaggagaaggcgcgcgtggtggaccacctcgggaggcacatggcgcctggcgccgccctggtggtgcgcagcgcgcacggcgcgcgcgccttcctgtaccccgtcgtcgaccccgacgagatccgccgcgccggcttcgacgtgctcgccgtgcaccacccggagggggaggtgatcaactccgtcatcgtcgcgcgtaagcccgtgcccgtccccgtcgccggagtggggcacgcgcacgcgcacgcccacgggcacggcgccgtgctcagccggccctgctgcctctgctgcgagatggaggcccggacgcaccagaagatggaggaggtggccatggagcagctgccgtcctaggcaggcaggcacacggcacacaccacaagcatggatgccagttttacatctatctgatcgatctagtaaatagtaatcccctactacgtctatgtgcccacaccgcatggatatggtaataatccgcacagggtgcgcctaatttatatccgctagctaagggcatgtacagtagagagacaccaaaacggttctccaagcacaggagacaactaagagactttattgtacaatgaagtgtctataaacgtagtctattaataaatacagaattaaatgtatttgttaaaaaaaaaaaaaaaaaaaaaaaaaaaaaaaaaaaaaaaaaaaaaaaag

SEQ ID NO: 110541 - protein, 360 aa, Zea mays subsp. mays
  misc_feature (1)..(360): Ceres Seq. ID no. 14303306
  misc_feature (35)..(313): Pfam Name: Nicotianamine synthase protein Pfam Description: Nicotianamine synthase protein
  misc_feature (36)..(354): Homolog of NCBI NO: 27151641 NR Description: Probable nicotianamine synthase 3
  misc_feature (35)..(358): Homolog of NCBI NO: 27151630 NR Description: Probable nicotianamine synthase 2
  misc_feature (35)..(354): Homolog of NCBI NO: 27151634 NR Description: Probable nicotianamine synthase 1
  misc_feature (35)..(358): Homolog of NCBI NO: 27151642 NR Description: Nicotianamine synthase 1
  misc_feature (36)..(354): Homolog of NCBI NO: 20387262 NR Description: ZmNAS3 [Zea mays]
  misc_feature (35)..(354): Homolog of NCBI NO: 19911064 NR Description: ZmNAS2 [Zea mays]
  misc_feature (39)..(358): Homolog of NCBI NO: 27151636 NR Description: Nicotianamine synthase 9
  misc_feature (28)..(360): Homolog of NCBI NO: 11176988 NR Description: nicotianamine synthase 3 [Oryza sativa (indica
  misc_feature (28)..(360): Homolog of NCBI NO: 34898148 NR Description: nicotianamine synthase 3 [Oryza sativa (japonica
  misc_feature (1)..(360): Homolog of NCBI NO: 20387260 NR Description: nicotianamine synthase 1 [Zea mays]
MVVMGKHDDDEKQQHQQMEMEDVHEVGAVEVLPLENEAEAALVRKISGLAAAIAKLPSLSPSPEVNALFTDLVTACIPRSTVDVERLGPELQRMRAGLIRRCADAEAQLEAHYSDLLAALEDNPLDHLPLFPYLGNYLLLGELEHGLLARHVPGPPPARVAFVGSGPLPLSSLVLAARHLPAAAFDNYDICAEANGRARRLVRADAALAARMAFRTSDVAHVTRDLAAYDVVFLAALVGMAAEEKARVVDHLGRHMAPGAALVVRSAHGARAFLYPVVDPDEIRRAGFDVLAVHHPEGEVINSVIVARKPVPVPVAGVGHAHAHAHGHGAVLSRPCCLCCEMEARTHQKMEEVAMEQLPS

SEQ ID NO: 110542 - protein, 357 aa, Zea mays subsp. mays
  misc_feature (1)..(357): Ceres Seq. ID no. 14303307
  misc_feature (32)..(310): Pfam Name: Nicotianamine synthase protein Pfam Description: Nicotianamine synthase protein
  misc_feature (33)..(351): Homolog of NCBI NO: 27151641 NR Description: Probable nicotianamine synthase 3
  misc_feature (32)..(355): Homolog of NCBI NO: 27151630 NR Description: Probable nicotianamine synthase 2
  misc_feature (32)..(351): Homolog of NCBI NO: 27151634 NR Description: Probable nicotianamine synthase 1
  misc_feature (32)..(355): Homolog of NCBI NO: 27151642 NR Description: Nicotianamine synthase 1
  misc_feature (33)..(351): Homolog of NCBI NO: 20387262 NR Description: ZmNAS3 [Zea mays]
  misc_feature (32)..(351): Homolog of NCBI NO: 19911064 NR Description: ZmNAS2 [Zea mays]
  misc_feature (36)..(355): Homolog of NCBI NO: 27151636 NR Description: Nicotianamine synthase 9
  misc_feature (25)..(357): Homolog of NCBI NO: 11176988 NR Description: nicotianamine synthase 3 [Oryza sativa (indica
  misc_feature (25)..(357): Homolog of NCBI NO: 34898148 NR Description: nicotianamine synthase 3 [Oryza sativa (japonica
  misc_feature (1)..(357): Homolog of NCBI NO: 20387260 NR Description: nicotianamine synthase 1 [Zea mays]
MGKHDDDEKQQHQQMEMEDVHEVGAVEVLPLENEAEAALVRKISGLAAAIAKLPSLSPSPEVNALFTDLVTACIPRSTVDVERLGPELQRMRAGLIRRCADAEAQLEAHYSDLLAALEDNPLDHLPLFPYLGNYLLLGELEHGLLARHVPGPPPARVAFVGSGPLPLSSLVLAARHLPAAAFDNYDICAEANGRARRLVRADAALAARMAFRTSDVAHVTRDLAAYDVVFLAALVGMAAEEKARVVDHLGRHMAPGAALVVRSAHGARAFLYPVVDPDEIRRAGFDVLAVHHPEGEVINSVIVARKPVPVPVAGVGHAHAHAHGHGAVLSRPCCLCCEMEARTHQKMEEVAMEQLPS

SEQ ID NO: 110543 - protein, 343 aa, Zea mays subsp. mays
  misc_feature (1)..(343): Ceres Seq. ID no. 14303308
  misc_feature (18)..(296): Pfam Name: Nicotianamine synthase protein Pfam Description: Nicotianamine synthase protein
  misc_feature (19)..(337): Homolog of NCBI NO: 27151641 NR Description: Probable nicotianamine synthase 3
  misc_feature (18)..(341): Homolog of NCBI NO: 27151630 NR Description: Probable nicotianamine synthase 2
  misc_feature (18)..(337): Homolog of NCBI NO: 27151634 NR Description: Probable nicotianamine synthase 1
  misc_feature (18)..(341): Homolog of NCBI NO: 27151642 NR Description: Nicotianamine synthase 1
  misc_feature (19)..(337): Homolog of NCBI NO: 20387262 NR Description: ZmNAS3 [Zea mays]
  misc_feature (18)..(337): Homolog of NCBI NO: 19911064 NR Description: ZmNAS2 [Zea mays]
  misc_feature (22)..(341): Homolog of NCBI NO: 27151636 NR Description: Nicotianamine synthase 9
  misc_feature (11)..(343): Homolog of NCBI NO: 11176988 NR Description: nicotianamine synthase 3 [Oryza sativa (indica
  misc_feature (11)..(343): Homolog of NCBI NO: 34898148 NR Description: nicotianamine synthase 3 [Oryza sativa (japonica
  misc_feature (1)..(343): Homolog of NCBI NO: 20387260 NR Description: nicotianamine synthase 1 [Zea mays]
MEMEDVHEVGAVEVLPLENEAEAALVRKISGLAAAIAKLPSLSPSPEVNALFTDLVTACIPRSTVDVERLGPELQRMRAGLIRRCADAEAQLEAHYSDLLAALEDNPLDHLPLFPYLGNYLLLGELEHGLLARHVPGPPPARVAFVGSGPLPLSSLVLAARHLPAAAFDNYDICAEANGRARRLVRADAALAARMAFRTSDVAHVTRDLAAYDVVFLAALVGMAAEEKARVVDHLGRHMAPGAALVVRSAHGARAFLYPVVDPDEIRRAGFDVLAVHHPEGEVINSVIVARKPVPVPVAGVGHAHAHAHGHGAVLSRPCCLCCEMEARTHQKMEEVAMEQLPS

SEQ ID NO: 110544 - DNA, 1083 bp, Zea mays subsp. mays
  misc_feature (1)..(1083): Ceres Seq. ID no. 15180294
  misc_feature: MA Experiment ID: 108504 Result: Up-regulated in Transcription
  misc_feature: MA Experiment 108504 PARAMETER Experiment Name: Zm_Drought_P Parameter: Age (day) Value: 8
  misc_feature: MA Experiment 108504 PARAMETER Experiment Name: Zm_Drought_P Parameter: Organism Value: Zea mays
  misc_feature: MA Experiment 108504 PARAMETER Experiment Name: Zm_Drought_P Parameter: Plant Line Value: 35A19
  misc_feature: MA Experiment 108504 PARAMETER Experiment Name: Zm_Drought_P Parameter: Timepoint (hr) Value: 12
  misc_feature: MA Experiment 108504 PARAMETER Experiment Name: Zm_Drought_P Parameter: Tissue Value: Aerial
  misc_feature: MA Experiment 108504 PARAMETER Experiment Name: Zm_Drought_P Parameter: Treatment Value: Drought vs. No Drought
  misc_feature: MA Experiment ID: 20000478 Result: Down-regulated in Transcription
  misc_feature: MA Experiment 20000478 PARAMETER Experiment Name: Zm_5mM_SA_P Parameter: Age (day) Value: 11
  misc_feature: MA Experiment 20000478 PARAMETER Experiment Name: Zm_5mM_SA_P Parameter: Organism Value: Zea mays
  misc_feature: MA Experiment 20000478 PARAMETER Experiment Name: Zm_5mM_SA_P Parameter: Plant Line Value: 35A19
  misc_feature: MA Experiment 20000478 PARAMETER Experiment Name: Zm_5mM_SA_P Parameter: Timepoint (hr) Value: 72
  misc_feature: MA Experiment 20000478 PARAMETER Experiment Name: Zm_5mM_SA_P Parameter: Tissue Value: Aerial
  misc_feature: MA Experiment 20000478 PARAMETER Experiment Name: Zm_5mM_SA_P Parameter: Treatment Value: 5mM SA vs. No Treatment
  misc_feature: MA Experiment ID: 20000480 Result: Down-regulated in Transcription
  misc_feature: MA Experiment 20000480 PARAMETER Experiment Name: Zm_Drought_P Parameter: Age (day) Value: 11
  misc_feature: MA Experiment 20000480 PARAMETER Experiment Name: Zm_Drought_P Parameter: Organism Value: Zea mays
  misc_feature: MA Experiment 20000480 PARAMETER Experiment Name: Zm_Drought_P Parameter: Plant Line Value: 35A19
  misc_feature: MA Experiment 20000480 PARAMETER Experiment Name: Zm_Drought_P Parameter: Timepoint (hr) Value: 72
  misc_feature: MA Experiment 20000480 PARAMETER Experiment Name: Zm_Drought_P Parameter: Tissue Value: Aerial
  misc_feature: MA Experiment 20000480 PARAMETER Experiment Name: Zm_Drought_P Parameter: Treatment Value: Drought vs. No Drought
  misc_feature: MA Experiment ID: 20000492 Result: Up-regulated in Transcription
  misc_feature: MA Experiment 20000492 PARAMETER Experiment Name: Zm_Hybrid_Seed_Dev_P Parameter: DAP Value: 12
  misc_feature: MA Experiment 20000492 PARAMETER Experiment Name: Zm_Hybrid_Seed_Dev_P Parameter: Organism Value: Zea mays
  misc_feature: MA Experiment 20000492 PARAMETER Experiment Name: Zm_Hybrid_Seed_Dev_P Parameter: Plant Line Value: 35A19
  misc_feature: MA Experiment 20000492 PARAMETER Experiment Name: Zm_Hybrid_Seed_Dev_P Parameter: Tissue Value: Fert Kernel vs. Unfert Floret
cttcccacccacccccgcgcctgcctgctccccgacaccgggggcgccacggcggcgacagcaagccgggacatggcgcgcggcggcctcgcccgcctgctcgccacgctcatcctcttcctcctgctcgccgccggaccttccctcgccgagtcagaggcggacctcgcgcggggcgcgtccgaggcggcgccggacgcgcagcagcacctcctgccgcgcccgctcgtcatcgagctcccgtcggcgcgggccggggccgagctcgacgccgacgccgacgccgacgccgtggtaacggtcgacgtgcgctgcgccagctggcggctcgcggccgaggccaacaacctcgcgccgtgggcggcggtgccgcccgaatgcgcgccgcacgtgcgggactacgtcaccggctccgcctaccgctccgacctcgacctcgtggcgcgggagtcggccgcctacgcgcgcgccgccgcgccggccggcgccgccgacggacgcgacgcctgggtgttcgacgtcgacgagacgctgctctccaatctcccatactacgccgagcacggctacggggccgagttgttcgaccaccacaagttcgacgagtgggtggaaaggggcgaggcggccgccatcccttccagcttgaagctctacaacgaggtccgcgggctgggattcaagaccttcctgctcacgggcagaagcgaggcgcaccgaggagtcacggtggagaacctcacaaagcaggggttccatgactgggagaagctcatactcagggcagcaggtgaccgcgagaaaacagcgacagtctacaaatcagagaagagggacgaaatggaacaggagggttacaggatcctaggcaactccggcgaccaatggagcgacctgctgggatcttccatgagcgctcgctctttcaagctccctaacccaatgtactatatcccgtgacagaaagaaactggagaacagggcgggtgaaaggtgctctgcgtttactggatgcacattctaccaggccctcggctgatgatggaaaatgaaaaataattttgcaatggaattaaactgtac

SEQ ID NO: 110545 - protein, 319 aa, Zea mays subsp. mays
  misc_feature (1)..(319): Ceres Seq. ID no. 15180295
  misc_feature (101)..(319): Pfam Name: HAD superfamily, subfamily IIIB (Acid phosphatase) Pfam Description: HAD superfamily, subfamily IIIB (Acid
  misc_feature (105)..(319): Homolog of NCBI NO: 15233504 NR Description: acid phosphatase-related protein [Arabidopsis
  misc_feature (105)..(318): Homolog of NCBI NO: 15233526 NR Description: acid phosphatase-related protein [Arabidopsis
  misc_feature (70)..(318): Homolog of NCBI NO: 445113 NR Description: acid phosphatase 1
  misc_feature (101)..(319): Homolog of NCBI NO: 15234949 NR Description: acid phosphatase - like protein [Arabidopsis
  misc_feature (70)..(318): Homolog of NCBI NO: 130718 NR Description: Acid phosphatase precursor 1
  misc_feature (77)..(319): Homolog of NCBI NO: 15241412 NR Description: acid phosphatase [Arabidopsis thaliana]
LPTHPRACLLPDTGGATAATASRDMARGGLARLLATLILFLLLAAGPSLAESEADLARGASEAAPDAQQHLLPRPLVIELPSARAGAELDADADADAVVTVDVRCASWRLAAEANNLAPWAAVPPECAPHVRDYVTGSAYRSDLDLVARESAAYARAAAPAGAADGRDAWVFDVDETLLSNLPYYAEHGYGAELFDHHKFDEWVERGEAAAIPSSLKLYNEVRGLGFKTFLLTGRSEAHRGVTVENLTKQGFHDWEKLILRAAGDREKTATVYKSEKRDEMEQEGYRILGNSGDQWSDLLGSSMSARSFKLPNPMYYIP

SEQ ID NO: 110546 - protein, 295 aa, Zea mays subsp. mays
  misc_feature (1)..(295): Ceres Seq. ID no. 15180296
  misc_feature (77)..(295): Pfam Name: HAD superfamily, subfamily IIIB (Acid phosphatase) Pfam Description: HAD superfamily, subfamily IIIB (Acid
  misc_feature (81)..(295): Homolog of NCBI NO: 15233504 NR Description: acid phosphatase-related protein [Arabidopsis
  misc_feature (81)..(294): Homolog of NCBI NO: 15233526 NR Description: acid phosphatase-related protein [Arabidopsis
  misc_feature (46)..(294): Homolog of NCBI NO: 445113 NR Description: acid phosphatase 1
  misc_feature (77)..(295): Homolog of NCBI NO: 15234949 NR Description: acid phosphatase - like protein [Arabidopsis
  misc_feature (46)..(294): Homolog of NCBI NO: 130718 NR Description: Acid phosphatase precursor 1
  misc_feature (53)..(295): Homolog of NCBI NO: 15241412 NR Description: acid phosphatase [Arabidopsis thaliana]
MARGGLARLLATLILFLLLAAGPSLAESEADLARGASEAAPDAQQHLLPRPLVIELPSARAGAELDADADADAVVTVDVRCASWRLAAEANNLAPWAAVPPECAPHVRDYVTGSAYRSDLDLVARESAAYARAAAPAGAADGRDAWVFDVDETLLSNLPYYAEHGYGAELFDHHKFDEWVERGEAAAIPSSLKLYNEVRGLGFKTFLLTGRSEAHRGVTVENLTKQGFHDWEKLILRAAGDREKTATVYKSEKRDEMEQEGYRILGNSGDQWSDLLGSSMSARSFKLPNPMYYIP

SEQ ID NO: 110547 - protein, 252 aa, Zea mays subsp. mays
  misc_feature (1)..(252): Ceres Seq. ID no. 15180297
  misc_feature (13)..(237): Pfam Name: HlyD family secretion protein Pfam Description: HlyD family secretion protein
  misc_feature (3)..(210): Homolog of NCBI NO: 29247944 NR Description: GLP_26_54603_52153 [Giardia lamblia ATCC 50803]
  misc_feature (2)..(165): Homolog of NCBI NO: 29247944 NR Description: GLP_26_54603_52153 [Giardia lamblia ATCC 50803]
  misc_feature (3)..(146): Homolog of NCBI NO: 23120317 NR Description: hypothetical protein [Desulfitobacterium
  misc_feature (11)..(244): Homolog of NCBI NO: 29828079 NR Description: putative oxidoreductase [Streptomyces avermitilis
  misc_feature (5)..(252): Homolog of NCBI NO: 32038635 NR Description: hypothetical protein [Pseudomonas aeruginosa
  misc_feature (6)..(235): Homolog of NCBI NO: 32042481 NR Description: hypothetical protein [Pseudomonas aeruginosa
  misc_feature (3)..(251): Homolog of NCBI NO: 29247944 NR Description: GLP_26_54603_52153 [Giardia lamblia ATCC 50803]
  misc_feature (5)..(252): Homolog of NCBI NO: 11362193 NR Description: hypothetical protein
  misc_feature (2)..(250): Homolog of NCBI NO: 23018055 NR Description: hypothetical protein [Thermobifida fusca]
  misc_feature (3)..(248): Homolog of NCBI NO: 23105870 NR Description: hypothetical protein [Azotobacter vinelandii]
SHPPPRLPAPRHRGRHGGDSKPGHGARRPRPPARHAHPLPPARRRTFPRRVRGGPRAGRVRGGAGRAAAPPAAPARHRAPVGAGRGRARRRRRRRRRGNGRRALRQLAARGRGQQPRAVGGGAARMRAARAGLRHRLRLPLRPRPRGAGVGRLRARRRAGRRRRRTRRLGVRRRRDAALQSPILRRARLRGRVVRPPQVRRVGGKGRGGRHPFQLEALQRGPRAGIQDLPAHGQKRGAPRSHGGEPHKAGVP

SEQ ID NO: 110548 - DNA, 1018 bp, Zea mays subsp. mays
  misc_feature (1)..(1018): Ceres Seq. ID no. 13598869
aagtgccaagtccggagcaacagcaaccaaccaaccacctcctcccctctccgtctcccagtccggcctcgctcgccactcggagtctcggagtcaaccgccagcgcctcgatccggcgaagccagcccagcccatggcctccggcgccgtaccaccgcagcgggtcgccctgctggcgctcgccgtcctctccgtcgtctcattcccgcacctgtccctccccgcctcgtcccatccgctcccgcaggaagctgctgctgctgctgctgcgggtgcggcggcgggaggcgaggcgtccgagcctcacggcaccgccgccgatggtgccgccgtggcgcggcgcgcgtgcacgtacacggtgcagatcaagacgagctgcgcgtccccgcggagctccgcggacgcggtgagcctcgcgttcggggacgcgtaccgcaacgaggtgtacgcggcgacggtgacgccgcggcgcgggttcgagcgctgcgccacggacacgttccgcgtcgccgggccctgcggctacggcgtctgctacctctacatgcgccggtcgggccgcgccgccgggtggacgcccgagtgggtcagggtgtacgagccggcgtccggcgcgccctccaccttctactacggcgacccgctccccgacggcgtctggtacggcttcgaccgctgcgtcaaggccggggccggcgcctctgccgagcatggtgccgcggcgcggacgctgtgacggacggacgcggacgccgccggtctctgggcgacagggcgaggtagcagagcgccactcgtggcgcgcggtcctgctgccgtgtcaagcgatgattgctggggcacggcgtctctttctgtgcaagtggagagtattcatttcgggtggctgctagtagtaatagcttctctattgggtctatttgcgttacgtgtagtacgtgccacgcataataaaaagtagtatggccaaamamaawaaagttggaactggarrrgsktatcgataccgtcgacctc

SEQ ID NO: 110549 - protein, 260 aa, Zea mays subsp. mays
  misc_feature (1)..(260): Ceres Seq. ID no. 15222441
SAKSGATATNQPPPPLSVSQSGLARHSESRSQPPAPRSGEASPAHGLRRRTTAAGRPAGARRPLRRLIPAPVPPRLVPSAPAGSCCCCCCGCGGGRRGVRASRHRRRWCRRGAARVHVHGADQDELRVPAELRGRGEPRVRGRVPQRGVRGDGDAAARVRALRHGHVPRRRALRLRRLLPLHAPVGPRRRVDARVGQGVRAGVRRALHLLLRRPAPRRRLVRLRPLRQGRGRRLCRAWCRGADAVTDGRGRRRSLGDRAR

SEQ ID NO: 110550 - protein, 244 aa, Zea mays subsp. mays
  misc_feature (1)..(244): Ceres Seq. ID no. 15222442
  misc_feature (100)..(226): Pfam Name: Embryo-specific protein 3, (ATS3) Pfam Description: Embryo-specific protein 3, (ATS3)
  misc_feature (15)..(139): Homolog of NCBI NO: 11360494 NR Description: antifreeze glycopeptide AFGP polyprotein
  misc_feature (116)..(236): Homolog of NCBI NO: 15240721 NR Description: embryo-specific protein 3 (ATS3) [Arabidopsis
  misc_feature (116)..(236): Homolog of NCBI NO: 13877521 NR Description: embryo-specific protein 3; ATS3 [Arabidopsis
  misc_feature (116)..(236): Homolog of NCBI NO: 3335171 NR Description: embryo-specific protein 3 [Arabidopsis thaliana]
  misc_feature (115)..(226): Homolog of NCBI NO: 26450767 NR Description: embryo-specific protein like [Arabidopsis
  misc_feature (115)..(226): Homolog of NCBI NO: 15241758 NR Description: embryo-specific protein - like [Arabidopsis
  misc_feature (116)..(229): Homolog of NCBI NO: 15241727 NR Description: expressed protein [Arabidopsis thaliana]
  misc_feature (116)..(229): Homolog of NCBI NO: 8809633 NR Description: contains similarity to embryo-specific protein
  misc_feature (115)..(236): Homolog of NCBI NO: 15227355 NR Description: hypothetical protein [Arabidopsis thaliana]
  misc_feature (45)..(236): Homolog of NCBI NO: 34910236 NR Description: OSJNBa0089K24.2 [Oryza sativa (japonica
VPSPEQQQPTNHLLPSPSPSPASLATRSLGVNRQRLDPAKPAQPMASGAVPPQRVALLALAVLSVVSFPHLSLPASSHPLPQEAAAAAAAGAAAGGEASEPHGTAADGAAVARRACTYTVQIKTSCASPRSSADAVSLAFGDAYRNEVYAATVTPRRGFERCATDTFRVAGPCGYGVCYLYMRRSGRAAGWTPEWVRVYEPASGAPSTFYYGDPLPDGVWYGFDRCVKAGAGASAEHGAAARTL

SEQ ID NO: 110551 - protein, 200 aa, Zea mays subsp. mays
  misc_feature (1)..(200): Ceres Seq. ID no. 15222443
  misc_feature (56)..(182): Pfam Name: Embryo-specific protein 3, (ATS3) Pfam Description: Embryo-specific protein 3, (ATS3)
  misc_feature (72)..(185): Homolog of NCBI NO: 15241727 NR Description: expressed protein [Arabidopsis thaliana]
  misc_feature (72)..(185): Homolog of NCBI NO: 8809633 NR Description: contains similarity to embryo-specific protein
  misc_feature (1)..(95): Homolog of NCBI NO: 11360494 NR Description: antifreeze glycopeptide AFGP polyprotein
  misc_feature (72)..(192): Homolog of NCBI NO: 13877521 NR Description: embryo-specific protein 3; ATS3 [Arabidopsis
  misc_feature (71)..(182): Homolog of NCBI NO: 26450767 NR Description: embryo-specific protein like [Arabidopsis
  misc_feature (71)..(182): Homolog of NCBI NO: 15241758 NR Description: embryo-specific protein - like [Arabidopsis
  misc_feature (72)..(192): Homolog of NCBI NO: 3335171 NR Description: embryo-specific protein 3 [Arabidopsis thaliana]
  misc_feature (72)..(192): Homolog of NCBI NO: 15240721 NR Description: embryo-specific protein 3 (ATS3) [Arabidopsis
  misc_feature (71)..(192): Homolog of NCBI NO: 15227355 NR Description: hypothetical protein [Arabidopsis thaliana]
  misc_feature (1)..(192): Homolog of NCBI NO: 34910236 NR Description: OSJNBa0089K24.2 [Oryza sativa (japonica
MASGAVPPQRVALLALAVLSVVSFPHLSLPASSHPLPQEAAAAAAAGAAAGGEASEPHGTAADGAAVARRACTYTVQIKTSCASPRSSADAVSLAFGDAYRNEVYAATVTPRRGFERCATDTFRVAGPCGYGVCYLYMRRSGRAAGWTPEWVRVYEPASGAPSTFYYGDPLPDGVWYGFDRCVKAGAGASAEHGAAARTL

SEQ ID NO: 110552 - DNA, 702 bp, Zea mays subsp. mays
  misc_feature (1)..(702): Ceres Seq. ID no. 14312544
  misc_feature: MA Experiment ID: 108540 Result: Down-regulated in Transcription
  misc_feature: MA Experiment 108540 PARAMETER Experiment Name: Zm_20percent_PEG_P Parameter: Age (day) Value: 8
  misc_feature: MA Experiment 108540 PARAMETER Experiment Name: Zm_20percent_PEG_P Parameter: Organism Value: Zea mays
  misc_feature: MA Experiment 108540 PARAMETER Experiment Name: Zm_20percent_PEG_P Parameter: Plant Line Value: 35A19
  misc_feature: MA Experiment 108540 PARAMETER Experiment Name: Zm_20percent_PEG_P Parameter: Timepoint (hr) Value: 6
  misc_feature: MA Experiment 108540 PARAMETER Experiment Name: Zm_20percent_PEG_P Parameter: Tissue Value: Aerial
  misc_feature: MA Experiment 108540 PARAMETER Experiment Name: Zm_20percent_PEG_P Parameter: Treatment Value: 20percent PEG vs. No Treatment
  misc_feature: MA Experiment ID: 20000477 Result: Down-regulated in Transcription
  misc_feature: MA Experiment 20000477 PARAMETER Experiment Name: Zm_5mM_SA_P Parameter: Age (day) Value: 10
  misc_feature: MA Experiment 20000477 PARAMETER Experiment Name: Zm_5mM_SA_P Parameter: Organism Value: Zea mays
  misc_feature: MA Experiment 20000477 PARAMETER Experiment Name: Zm_5mM_SA_P Parameter: Plant Line Value: 35A19
  misc_feature: MA Experiment 20000477 PARAMETER Experiment Name: Zm_5mM_SA_P Parameter: Timepoint (hr) Value: 48
  misc_feature: MA Experiment 20000477 PARAMETER Experiment Name: Zm_5mM_SA_P Parameter: Tissue Value: Aerial
  misc_feature: MA Experiment 20000477 PARAMETER Experiment Name: Zm_5mM_SA_P Parameter: Treatment Value: 5mM SA vs. No Treatment
aacgccgctcctgcgcgccatcactccactcgatcgaccgcctccgtgtccgtgccctacagctggtcatgagcgcccgcccaaccatggcggcggcggcgcccgtgcgcgcctgggtggtggcgctggcgctggtgctggcgtgcgcgctgctccagccgcggccgtccgacgccgcggcgcagcccgccccgcagtcgccggcgacggcggtgtcgtcgggcgccgccaagcccaagtgcgtggccggcgccaggaacgaccacgcgtgccgcgtcggcgccgtgcacgacccggacagccaggaggaggagggctccagcgtcaccatcgacgcgcccgccgccgcgcccgacgacgtcggccacgacgacggcagcgactacaacgaccccgacgtgcccaacaacgaccagctcgtcgtcgtcggccactgaaagctgccgcgcgcgcgcgcgcgccgacccgtggaccatgcgtgcatgaagaagaatgcagggggtgggcctgggcctgtaacctgttaatggatcggattctcggtgccaattcgtgatcttgaccggtctaagaagatggggacttgcgtctttgtttcattggttattatttctactagtgtgtatatggtaaagtcgtgtgctgtgaacctgcgatcatttatcctctgttcattgaattgaagcaatcccctctcccgtt

SEQ ID NO: 110553 - protein, 184 aa, Zea mays subsp. mays
  misc_feature (1)..(184): Ceres Seq. ID no. 14312545
  misc_feature (75)..(143): Pfam Name: TT viral orf 1 Pfam Description: TT viral orf 1
  misc_feature (21)..(158): Homolog of NCBI NO: 11024339 NR Description: PKSA putative O-methyltransferase; PKSA-ORF6
  misc_feature (33)..(157): Homolog of NCBI NO: 34911576 NR Description: P0004A09.11 [Oryza sativa (japonica
  misc_feature (13)..(156): Homolog of NCBI NO: 29247944 NR Description: GLP_26_54603_52153 [Giardia lamblia ATCC 50803]
  misc_feature (31)..(146): Homolog of NCBI NO: 17027049 NR Description: elongation factor-1 alpha [Chimarra rossi]
TPLLRAITPLDRPPPCPCPTAGHERPPNHGGGGARARLGGGAGAGAGVRAAPAAAVRRRGAARPAVAGDGGVVGRRQAQVRGRRQERPRVPRRRRARPGQPGGGGLQRHHRRARRRARRRRPRRRQRLQRPRRAQQRPARRRRPLKAAARARAPTRGPCVHEEECRGWAWACNLLMDRILGANS

SEQ ID NO: 110554 - protein, 144 aa, Zea mays subsp. mays
  misc_feature (1)..(144): Ceres Seq. ID no. 14312546
RRSCAPSLHSIDRLRVRALQLVMSARPTMAAAAPVRAWVVALALVLACALLQPRPSDAAAQPAPQSPATAVSSGAAKPKCVAGARNDHACRVGAVHDPDSQEEEGSSVTIDAPAAAPDDVGHDDGSDYNDPDVPNNDQLVVVGH

SEQ ID NO: 110555 - protein, 122 aa, Zea mays subsp. mays
  misc_feature (1)..(122): Ceres Seq. ID no. 14312547
MSARPTMAAAAPVRAWVVALALVLACALLQPRPSDAAAQPAPQSPATAVSSGAAKPKCVAGARNDHACRVGAVHDPDSQEEEGSSVTIDAPAAAPDDVGHDDGSDYNDPDVPNNDQLVVVGH

SEQ ID NO: 110556 - DNA, 817 bp, Zea mays subsp. mays
  misc_feature (1)..(817): Ceres Seq. ID no. 12637747
aatcataagtaaggtcatgaaaaaaaacaccagcaactggacacggcattacacacctagagcgcccacctggccgttgcggatgggatagctcaaactatgcgagctgctggcgcgggatcgggccagcgctttgaggtgtcatatcgggagccctcctgtacattagagacgactttgctgcggtggaaaagagcactgtattaagggagacaatagtcagtatggctgttgctggagctatatttggagctgcatttggtggctggatgaatgacaagtttggaaggaggcctttcatcatacttgccgatgcactgttctttgaaggtgccgttatcatggcattttccccgacacctagagttatcgttgttgggagggtatttgttggtcttggtgttggaatggcttccatgacagctcctctgtacatctctcaagcctcccctgctaggatcagaggtgctctagtgagcacaaatgggcttctcatcactggtggccagttcttggcctacctcatcaatctagccttcactaaggtgccagggacctggcggtggatgcttggcattgcaggggttcctgccctagtccagttcgtactaatgctgccagaatcacctagatggctctacaggaaggttgatagtagtatttgtttttacaaaaagtagttcgtatacaagaattactttggattcaaataccacatctttgtctgtaccttatagatagctacataatatagtgagtcattatccaatgccaacacgaggaaaggattatctgcgaaagggaaggaacagaatgg

SEQ ID NO: 110557 - protein, 151 aa, Zea mays subsp. mays
  misc_feature (1)..(151): Ceres Seq. ID no. 12637748
  misc_feature (1)..(151): Pfam Name: Sugar (and other) transporter Pfam Description: Sugar (and other) transporter
  misc_feature (1)..(145): Homolog of NCBI NO: 29501739 NR Description: putative Na+/myo-inositol symporter
  misc_feature (1)..(141): Homolog of NCBI NO: 38347452 NR Description: OSJNBa0076N16.21 [Oryza sativa (japonica
  misc_feature (1)..(141): Homolog of NCBI NO: 30689342 NR Description: sugar transporter family [Arabidopsis thaliana]
  misc_feature (1)..(140): Homolog of NCBI NO: 15227479 NR Description: putative sugar transporter; protein id:
  misc_feature (1)..(141): Homolog of NCBI NO: 9652184 NR Description: putative Na+/myo-inositol symporter
  misc_feature (1)..(141): Homolog of NCBI NO: 9652186 NR Description: putative Na+/myo-inositol symporter
  misc_feature (1)..(141): Homolog of NCBI NO: 33146705 NR Description: putative proton myo-inositol transporter
  misc_feature (1)..(141): Homolog of NCBI NO: 15220697 NR Description: hypothetical protein
  misc_feature (1)..(141): Homolog of NCBI NO: 15235767 NR Description: membrane transporter like protein; protein id:
  misc_feature (1)..(151): Homolog of NCBI NO: 16974757 NR Description: putative Na+/myo-inositol symporter [Lycopersicon
MAVAGAIFGAAFGGWMNDKFGRRPFIILADALFFEGAVIMAFSPTPRVIVVGRVFVGLGVGMASMTAPLYISQASPARIRGALVSTNGLLITGGQFLAYLINLAFTKVPGTWRWMLGIAGVPALVQFVLMLPESPRWLYRKVDSSICFYKK

SEQ ID NO: 110558 - protein, 136 aa, Zea mays subsp. mays
  misc_feature (1)..(136): Ceres Seq. ID no. 12637749
  misc_feature (1)..(136): Pfam Name: Sugar (and other) transporter Pfam Description: Sugar (and other) transporter
  misc_feature (1)..(130): Homolog of NCBI NO: 29501739 NR Description: putative Na+/myo-inositol symporter
  misc_feature (1)..(126): Homolog of NCBI NO: 38347452 NR Description: OSJNBa0076N16.21 [Oryza sativa (japonica
  misc_feature (1)..(126): Homolog of NCBI NO: 30689342 NR Description: sugar transporter family [Arabidopsis thaliana]
  misc_feature (1)..(125): Homolog of NCBI NO: 15227479 NR Description: putative sugar transporter; protein id:
  misc_feature (1)..(126): Homolog of NCBI NO: 9652184 NR Description: putative Na+/myo-inositol symporter
  misc_feature (1)..(126): Homolog of NCBI NO: 9652186 NR Description: putative Na+/myo-inositol symporter
  misc_feature (1)..(126): Homolog of NCBI NO: 33146705 NR Description: putative proton myo-inositol transporter
  misc_feature (1)..(126): Homolog of NCBI NO: 15220697 NR Description: hypothetical protein
  misc_feature (1)..(126): Homolog of NCBI NO: 15235767 NR Description: membrane transporter like protein; protein id:
  misc_feature (1)..(136): Homolog of NCBI NO: 16974757 NR Description: putative Na+/myo-inositol symporter [Lycopersicon
MNDKFGRRPFIILADALFFEGAVIMAFSPTPRVIVVGRVFVGLGVGMASMTAPLYISQASPARIRGALVSTNGLLITGGQFLAYLINLAFTKVPGTWRWMLGIAGVPALVQFVLMLPESPRWLYRKVDSSICFYKK

SEQ ID NO: 110559 - protein, 112 aa, Zea mays subsp. mays
  misc_feature (1)..(112): Ceres Seq. ID no. 12637750
  misc_feature (1)..(112): Pfam Name: Sugar (and other) transporter Pfam Description: Sugar (and other) transporter
  misc_feature (1)..(106): Homolog of NCBI NO: 29501739 NR Description: putative Na+/myo-inositol symporter
  misc_feature (1)..(102): Homolog of NCBI NO: 38347452 NR Description: OSJNBa0076N16.21 [Oryza sativa (japonica
  misc_feature (1)..(102): Homolog of NCBI NO: 30689342 NR Description: sugar transporter family [Arabidopsis thaliana]
  misc_feature (1)..(101): Homolog of NCBI NO: 15227479 NR Description: putative sugar transporter; protein id:
  misc_feature (1)..(102): Homolog of NCBI NO: 9652184 NR Description: putative Na+/myo-inositol symporter
  misc_feature (1)..(102): Homolog of NCBI NO: 9652186 NR Description: putative Na+/myo-inositol symporter
  misc_feature (1)..(102): Homolog of NCBI NO: 33146705 NR Description: putative proton myo-inositol transporter
  misc_feature (1)..(102): Homolog of NCBI NO: 15220697 NR Description: hypothetical protein
  misc_feature (1)..(102): Homolog of NCBI NO: 15235767 NR Description: membrane transporter like protein; protein id:
  misc_feature (1)..(112): Homolog of NCBI NO: 16974757 NR Description: putative Na+/myo-inositol symporter [Lycopersicon
MAFSPTPRVIVVGRVFVGLGVGMASMTAPLYISQASPARIRGALVSTNGLLITGGQFLAYLINLAFTKVPGTWRWMLGIAGVPALVQFVLMLPESPRWLYRKVDSSICFYKK

SEQ ID NO: 110560 - DNA, 558 bp, Zea mays subsp. mays
  misc_feature (1)..(558): Ceres Seq. ID no. 12590378
  misc_feature: MA Experiment ID: 108527 Result: Up-regulated in Transcription
  misc_feature: MA Experiment 108527 PARAMETER Experiment Name: Zm_5mM_NO_P Parameter: Age (day) Value: 8
  misc_feature: MA Experiment 108527 PARAMETER Experiment Name: Zm_5mM_NO_P Parameter: Organism Value: Zea mays
  misc_feature: MA Experiment 108527 PARAMETER Experiment Name: Zm_5mM_NO_P Parameter: Plant Line Value: 35A19
  misc_feature: MA Experiment 108527 PARAMETER Experiment Name: Zm_5mM_NO_P Parameter: Timepoint (hr) Value: 6
  misc_feature: MA Experiment 108527 PARAMETER Experiment Name: Zm_5mM_NO_P Parameter: Tissue Value: Aerial
  misc_feature: MA Experiment 108527 PARAMETER Experiment Name: Zm_5mM_NO_P Parameter: Treatment Value: 5mM NO vs. No Treatment
  misc_feature: MA Experiment ID: 108534 Result: Up-regulated in Transcription
  misc_feature: MA Experiment 108534 PARAMETER Experiment Name: Zm_4deg_Cold_P Parameter: Age (hr) Value: 8
  misc_feature: MA Experiment 108534 PARAMETER Experiment Name: Zm_4deg_Cold_P Parameter: Organism Value: Zea mays
  misc_feature: MA Experiment 108534 PARAMETER Experiment Name: Zm_4deg_Cold_P Parameter: Plant Line Value: 35A19
  misc_feature: MA Experiment 108534 PARAMETER Experiment Name: Zm_4deg_Cold_P Parameter: Temperature (deg C) Value: 4 vs. 22
  misc_feature: MA Experiment 108534 PARAMETER Experiment Name: Zm_4deg_Cold_P Parameter: Timepoint (hr) Value: 6
  misc_feature: MA Experiment 108534 PARAMETER Experiment Name: Zm_4deg_Cold_P Parameter: Tissue Value: Aerial
  misc_feature: MA Experiment ID: 108543 Result: Down-regulated in Transcription
  misc_feature: MA Experiment ID: 108689 Result: Up-regulated in Transcription
  misc_feature: MA Experiment 108689 PARAMETER Experiment Name: Zm_Drought_Roots_P Parameter: Age (day) Value: 9
  misc_feature: MA Experiment 108689 PARAMETER Experiment Name: Zm_Drought_Roots_P Parameter: Organism Value: Zea mays
  misc_feature: MA Experiment 108689 PARAMETER Experiment Name: Zm_Drought_Roots_P Parameter: Plant Line Value: 35A19
  misc_feature: MA Experiment 108689 PARAMETER Experiment Name: Zm_Drought_Roots_P Parameter: Timepoint (hr) Value: 24
  misc_feature: MA Experiment 108689 PARAMETER Experiment Name: Zm_Drought_Roots_P Parameter: Tissue Value: Roots
  misc_feature: MA Experiment 108689 PARAMETER Experiment Name: Zm_Drought_Roots_P Parameter: Treatment Value: Drought vs. No Drought
atcctgggttacgttcctcgcacggcggaggcaaacaaaccctagccgccaggcgcaggcggtcagggagcgagtaccgagcgccccagttcacacgtgagatgtcagaatacaagaacgtcgttggggggaggctaaagctgaagggtaaggcactggatgtgaaggaaggtggagtcaagaagaaaaaaaagaagcatcagcttgaagagtcgtctcagattgagcacgatgagctccacaaagggggaaactctggcttaccagctgatcacaacaatgagcttattgaagctggcaaggtgggagatgaagaaaggaatctacatccagactacgaccacctcacaccggcggagcgacgctatatagatcagaagcagaagatcgacatgcaaaagctgatgcttcttaatttcgtcattttcctccttccttctaataagatttctctctcaccctcggccccccttcacgtgcgattgtaggtgtttgacgcttttgtaataatgcatgctgacatgttgcataaattgctccccaaaaaaatcttatttc

SEQ ID NO: 110561 - protein, 161 aa, Zea mays subsp. mays
  misc_feature (1)..(161): Ceres Seq. ID no. 12590379
  misc_feature (34)..(134): Homolog of NCBI NO: 18394403 NR Description: expressed protein
PGLRSSHGGGKQTLAARRRRSGSEYRAPQFTREMSEYKNVVGGRLKLKGKALDVKEGGVKKKKKKHQLEESSQIEHDELHKGGNSGLPADHNNELIEAGKVGDEERNLHPDYDHLTPAERRYIDQKQKIDMQKLMLLNFVIFLLPSNKISLSPSAPLHVRL

SEQ ID NO: 110562 - protein, 128 aa, Zea mays subsp. mays
  misc_feature (1)..(128): Ceres Seq. ID no. 12590380
  misc_feature (1)..(101): Homolog of NCBI NO: 18394403 NR Description: expressed protein
MSEYKNVVGGRLKLKGKALDVKEGGVKKKKKKHQLEESSQIEHDELHKGGNSGLPADHNNELIEAGKVGDEERNLHPDYDHLTPAERRYIDQKQKIDMQKLMLLNFVIFLLPSNKISLSPSAPLHVRL

SEQ ID NO: 110563 - DNA, 914 bp, Zea mays subsp. mays
  misc_feature (1)..(914): Ceres Seq. ID no. 12633896
  misc_feature: MA Experiment ID: 108504 Result: Up-regulated in Transcription
  misc_feature: MA Experiment 108504 PARAMETER Experiment Name: Zm_Drought_P Parameter: Age (day) Value: 8
  misc_feature: MA Experiment 108504 PARAMETER Experiment Name: Zm_Drought_P Parameter: Organism Value: Zea mays
  misc_feature: MA Experiment 108504 PARAMETER Experiment Name: Zm_Drought_P Parameter: Plant Line Value: 35A19
  misc_feature: MA Experiment 108504 PARAMETER Experiment Name: Zm_Drought_P Parameter: Timepoint (hr) Value: 12
  misc_feature: MA Experiment 108504 PARAMETER Experiment Name: Zm_Drought_P Parameter: Tissue Value: Aerial
  misc_feature: MA Experiment 108504 PARAMETER Experiment Name: Zm_Drought_P Parameter: Treatment Value: Drought vs. No Drought
  misc_feature: MA Experiment ID: 108544 Result: Down-regulated in Transcription
  misc_feature: MA Experiment ID: 108556 Result: Up-regulated in Transcription
  misc_feature: MA Experiment 108556 PARAMETER Experiment Name: Zm_Drought_P Parameter: Age (day) Value: 9
  misc_feature: MA Experiment 108556 PARAMETER Experiment Name: Zm_Drought_P Parameter: Organism Value: Zea mays
  misc_feature: MA Experiment 108556 PARAMETER Experiment Name: Zm_Drought_P Parameter: Plant Line Value: 35A19
  misc_feature: MA Experiment 108556 PARAMETER Experiment Name: Zm_Drought_P Parameter: Timepoint (hr) Value: 24
  misc_feature: MA Experiment 108556 PARAMETER Experiment Name: Zm_Drought_P Parameter: Tissue Value: Aerial
  misc_feature: MA Experiment 108556 PARAMETER Experiment Name: Zm_Drought_P Parameter: Treatment Value: Drought vs. No Drought
  misc_feature: MA Experiment ID: 20000492 Result: Up-regulated in Transcription
  misc_feature: MA Experiment 20000492 PARAMETER Experiment Name: Zm_Hybrid_Seed_Dev_P Parameter: DAP Value: 12
  misc_feature: MA Experiment 20000492 PARAMETER Experiment Name: Zm_Hybrid_Seed_Dev_P Parameter: Organism Value: Zea mays
  misc_feature: MA Experiment 20000492 PARAMETER Experiment Name: Zm_Hybrid_Seed_Dev_P Parameter: Plant Line Value: 35A19
  misc_feature: MA Experiment 20000492 PARAMETER Experiment Name: Zm_Hybrid_Seed_Dev_P Parameter: Tissue Value: Fert Kernel vs. Unfert Floret
  misc_feature: MA Experiment ID: 20000535 Result: Up-regulated in Transcription
  misc_feature: MA Experiment 20000535 PARAMETER Experiment Name: Zm_Hybrid_Seed_Dev_P Parameter: DAP Value: 30 vs. 12
  misc_feature: MA Experiment 20000535 PARAMETER Experiment Name: Zm_Hybrid_Seed_Dev_P Parameter: Organism Value: Zea mays
  misc_feature: MA Experiment 20000535 PARAMETER Experiment Name: Zm_Hybrid_Seed_Dev_P Parameter: Plant Line Value: 35A19
  misc_feature: MA Experiment 20000535 PARAMETER Experiment Name: Zm_Hybrid_Seed_Dev_P Parameter: Tissue Value: Embryo vs. Unfert Floret
aatctcggtttttagcacgcaaacacacggcacgagcagctgagcgcccatggcaggtccccggcgtctcctcctcctcctgctcccgctgctcgtgctcctcggcgcgcacccgccgcagcgcgggtccgcggaggaggggacgaaggtctccctggagctctactacgagtcgctgtgcccgtactgctcgcggttcatcgtcaaccacctcgcggggatcttcgaggacgggctcatcgacgccgtccacctccggctcgtcccctacggcaacgcgcgcgtcgcatccaacagcgagatctcttgccagcatggtccgtacgagtgtctgctcaacaccgtggaagcttgcgccatcgacgcctggccggatctggatgtgcatttcagcttcatctactgcgtggaggacctggtggtgaagcggcagtacaaggactgggagtcctgcttcgagaagctgggccttgacgccaagcccgtaacagaatgctacaaaagcgagcatggccacaagctcgagctcaagtacgcgaaccagaccgacgctctcgagccgccgcaccggtacgtgccctgggtggtcgtcgacgggcagcccctgctagaggattacgagaatttcgaggcttacatctgcaaggcttacaagggcactccaccgaaggcctgtgagggcctggaacgtctgcagatggccctcgagacagcggcggaggcgcgcaacggcgtcagctacaactccggtgtcagcaagcttgcgactgctgaagatgagggtggggagcataaggtgggagaatactagtacgtaattgactagcgacgtgcccttttttgggtcatgtgaagatatgaaggaccgttccatctcgttgtccgggtttttattgtacagtaatagctaatat

SEQ ID NO: 110564 - protein, 253 aa, Zea mays subsp. mays
  misc_feature (1)..(253): Ceres Seq. ID no. 12633897
  misc_feature (34)..(143): Pfam Name: Gamma interferon inducible lysosomal thiol Pfam Description: Gamma interferon inducible lysosomal thiol
  misc_feature (28)..(190): Homolog of NCBI NO: 7487272 NR Description: hypothetical protein T20K18.240 - Arabidopsis
  misc_feature (28)..(209): Homolog of NCBI NO: 21593852 NR Description: unknown [Arabidopsis thaliana]
  misc_feature (28)..(209): Homolog of NCBI NO: 15235540 NR Description: putative protein
  misc_feature (1)..(220): Homolog of NCBI NO: 15235523 NR Description: putative protein; protein id: At4g12900.1
  misc_feature (28)..(209): Homolog of NCBI NO: 21593076 NR Description: unknown [Arabidopsis thaliana]
  misc_feature (28)..(209): Homolog of NCBI NO: 18413888 NR Description: putative protein
  misc_feature (27)..(241): Homolog of NCBI NO: 15241015 NR Description: putative protein; protein id: At5g01580.1
  misc_feature (33)..(209): Homolog of NCBI NO: 25406953 NR Description: hypothetical protein [imported] - Arabidopsis
  misc_feature (33)..(209): Homolog of NCBI NO: 18390723 NR Description: expressed protein
  misc_feature (33)..(212): Homolog of NCBI NO: 30793446 NR Description: 27K protein [Triticum aestivum]
MAGPRRLLLLLLPLLVLLGAHPPQRGSAEEGTKVSLELYYESLCPYCSRFIVNHLAGIFEDGLIDAVHLRLVPYGNARVASNSEISCQHGPYECLLNTVEACAIDAWPDLDVHFSFIYCVEDLVVKRQYKDWESCFEKLGLDAKPVTECYKSEHGHKLELKYANQTDALEPPHRYVPWVVVDGQPLLEDYENFEAYICKAYKGTPPKACEGLERLQMALETAAEARNGVSYNSGVSKLATAEDEGGEHKVGEY

SEQ ID NO: 110565 - protein, 140 aa, Zea mays subsp. mays
  misc_feature (1)..(140): Ceres Seq. ID no. 12633898
  misc_feature (20)..(140): Homolog of NCBI NO: 13592175 NR Description: ppg3 [Leishmania major]
  misc_feature (20)..(140): Homolog of NCBI NO: 13592175 NR Description: ppg3 [Leishmania major]
  misc_feature (20)..(140): Homolog of NCBI NO: 11359723 NR Description: proteophosphoglycan, membrane-associated
  misc_feature (23)..(140): Homolog of NCBI NO: 13592175 NR Description: ppg3 [Leishmania major]
  misc_feature (23)..(140): Homolog of NCBI NO: 5420387 NR Description: proteophosphoglycan [Leishmania major]
  misc_feature (20)..(140): Homolog of NCBI NO: 5420387 NR Description: proteophosphoglycan [Leishmania major]
  misc_feature (20)..(140): Homolog of NCBI NO: 11359723 NR Description: proteophosphoglycan, membrane-associated
  misc_feature (23)..(140): Homolog of NCBI NO: 5420387 NR Description: proteophosphoglycan [Leishmania major]
  misc_feature (23)..(140): Homolog of NCBI NO: 11359723 NR Description: proteophosphoglycan, membrane-associated
  misc_feature (20)..(140): Homolog of NCBI NO: 13592175 NR Description: ppg3 [Leishmania major]
SRFLARKHTARAAERPWQVPGVSSSSCSRCSCSSARTRRSAGPRRRGRRSPWSSTTSRCARTARGSSSTTSRGSSRTGSSTPSTSGSSPTATRASHPTARSLASMVRTSVCSTPWKLAPSTPGRIWMCISASSTAWRTWW

SEQ ID NO: 110566 - DNA, 1239 bp, Zea mays subsp. mays
  misc_feature (1)..(1239): Ceres Seq. ID no. 13587439
gcactgcttggaatccaacgagccaatcattcaaatcctccccggaaccgcgttgagcagggcacggtcgattggatctagggtgagggtccgtcgccgaagaaactcgcaggcggtcacgaggaggcggcgggggagggcgggggagatggcctcggaggagatgacggcgacggaggtggccgctgctggacttgaagccgcacccggagggcggcttctacaccgagaccttccgcgacggctccatcacgctcaccacgtcccagctcccgccccactttgctctgggtggtgatccttcgccgagccaccagttgatctctcacgatttgggggttccctcattcttctccaacctccaggcattggtggacgggatggctagtcagttgaagttgcagggtgcttctgttccagagggagcttcgtctctggcgcgttggaatccggtgctgcttcagcagcgtgtttctgacttagaggcggcgaatgctgatatggcccgacagtattctgttcttgaagaaaaacattctcaaagccaggctgaactggtccggcggtgctctgatcttgaggaaaagtattcccaaagccagactgggctggcccaggtttctgctgctctgaatgatgctaacatgctaaattctactctccgcgctcagctcgattatgaaaaggaagaaaaatgtgcccttgttacttctcgtgacaatcttgataggctatatcgtgactccagcaactcgttgaccatcctggagaggagtcatcgcttcaccatggaggagttagacaatcatcgttataagctgcaggaatccatggacgacgtgattcgcctcaggcagttgaaatcggctaaagatgatgtcatcaaggaactacgtgcttccaagaagtccatcgcccaggagctggagaccgctcagttggctgtcaaggttgctgaagaaacttccgctactctgagggcccagcgcaacagagctatggataaagccattcgcgcagggcggatcttgatgaggagacctggtgtggttgtccccgacgacataagggctgatgtgaacgctactcctgattcctcaagttgctcttcttcgtcggttgctcctgagaagaatgttgcaaaatagaaaaacattgcgtgctttgagcgcgcggttaacgtgctcggatattttgttagaggacgcccgcttaatattgaatgctactattattccc

SEQ ID NO: 110567 - protein, 255 aa, Zea mays subsp. mays
  misc_feature (1)..(255): Ceres Seq. ID no. 13587440
  misc_feature (1)..(255): Homolog of NCBI NO: 33113962 NR Description: putative gypsy-type retrotransposon [Zea mays]
MASQLKLQGASVPEGASSLARWNPVLLQQRVSDLEAANADMARQYSVLEEKHSQSQAELVRRCSDLEEKYSQSQTGLAQVSAALNDANMLNSTLRAQLDYEKEEKCALVTSRDNLDRLYRDSSNSLTILERSHRFTMEELDNHRYKLQESMDDVIRLRQLKSAKDDVIKELRASKKSIAQELETAQLAVKVAEETSATLRAQRNRAMDKAIRAGRILMRRPGVVVPDDIRADVNATPDSSSCSSSSVAPEKNVAK

SEQ ID NO: 110568 - protein, 215 aa, Zea mays subsp. mays
  misc_feature (1)..(215): Ceres Seq. ID no. 13587441
  misc_feature (1)..(215): Homolog of NCBI NO: 33113962 NR Description: putative gypsy-type retrotransposon [Zea mays]
MARQYSVLEEKHSQSQAELVRRCSDLEEKYSQSQTGLAQVSAALNDANMLNSTLRAQLDYEKEEKCALVTSRDNLDRLYRDSSNSLTILERSHRFTMEELDNHRYKLQESMDDVIRLRQLKSAKDDVIKELRASKKSIAQELETAQLAVKVAEETSATLRAQRNRAMDKAIRAGRILMRRPGVVVPDDIRADVNATPDSSSCSSSSVAPEKNVAK

SEQ ID NO: 110569 - protein, 167 aa, Zea mays subsp. mays
  misc_feature (1)..(167): Ceres Seq. ID no. 13587442
  misc_feature (1)..(167): Homolog of NCBI NO: 33113962 NR Description: putative gypsy-type retrotransposon [Zea mays]
MLNSTLRAQLDYEKEEKCALVTSRDNLDRLYRDSSNSLTILERSHRFTMEELDNHRYKLQESMDDVIRLRQLKSAKDDVIKELRASKKSIAQELETAQLAVKVAEETSATLRAQRNRAMDKAIRAGRILMRRPGVVVPDDIRADVNATPDSSSCSSSSVAPEKNVAK

SEQ ID NO: 110570 - DNA, 681 bp, Zea mays subsp. mays
  misc_feature (1)..(681): Ceres Seq. ID no. 15180320
gacgcacaccaagtctactctcacctcctccgtctctcagatccacgctgcctagttgttcggacttcagaccccgccgtgcgctgcccatggccgcgggtcgcggcgacgccgcgagcatggtggcagtgggtctggtgtggggcgccaccaacgcgctgatgcggcggggcgcgctcgtctgggaccgccgcgcccgtgcctgcccctccggtaacgtcctccggcggtgggcggagctgctcctgacgtggcagtactcggcgccgttcgccgccaacctgagcgcgtccgcggccttcttcgcgctcctcggcgccgcgcccatctccgtggccgtccccgtcaccaacgccgtcactttcgccgccacggccgccgccgccgcggccctcggcgagcgcgtccggccagcgcccgcggtccttggtaccacgctcatcgtcctcggcgtctgggtctgcatctcgtagacttaggctgaagatctgcttggtttggttctggcattacagtcgcatgggaaataaaaaggaagttttgagggcaattctcaggattccatttcacccctctgtgctgtgttgccaattgccatatgagtgaattatgcccagtttgttgatggcagcggcgtttcattagctagatggtcagaatataatgcagtttcgttctggt

SEQ ID NO: 110571 - protein, 156 aa, Zea mays subsp. mays
  misc_feature (1)..(156): Ceres Seq. ID no. 15180321
  misc_feature (24)..(134): Homolog of NCBI NO: 31239883 NR Description: ENSANGP00000014009 [Anopheles gambiae]
  misc_feature (30)..(156): Homolog of NCBI NO: 22267454 NR Description: RIKEN cDNA 2510006D16 [Mus musculus]
  misc_feature (30)..(156): Homolog of NCBI NO: 12855603 NR Description: unnamed protein product [Mus musculus]
  misc_feature (30)..(156): Homolog of NCBI NO: 13436137 NR Description: Similar to RIKEN cDNA 4933407D05 gene [Homo
  misc_feature (30)..(156): Homolog of NCBI NO: 21361814 NR Description: hypothetical protein RP4-622L5 [Homo sapiens]
  misc_feature (37)..(150): Homolog of NCBI NO: 24652124 NR Description: CG12929-PA [Drosophila melanogaster]
  misc_feature (39)..(156): Homolog of NCBI NO: 28829061 NR Description: similar to putative protein
  misc_feature (36)..(155): Homolog of NCBI NO: 15239774 NR Description: expressed protein [Arabidopsis thaliana]
RTPSLLSPPPSLRSTLPSCSDFRPRRALPMAAGRGDAASMVAVGLVWGATNALMRRGALVWDRRARACPSGNVLRRWAELLLTWQYSAPFAANLSASAAFFALLGAAPISVAVPVTNAVTFAATAAAAAALGERVRPAPAVLGTTLIVLGVWVCIS

SEQ ID NO: 110572 - protein, 127 aa, Zea mays subsp. mays
  misc_feature (1)..(127): Ceres Seq. ID no. 15180322
  misc_feature (1)..(105): Homolog of NCBI NO: 31239883 NR Description: ENSANGP00000014009 [Anopheles gambiae]
  misc_feature (1)..(127): Homolog of NCBI NO: 22267454 NR Description: RIKEN cDNA 2510006D16 [Mus musculus]
  misc_feature (1)..(127): Homolog of NCBI NO: 12855603 NR Description: unnamed protein product [Mus musculus]
  misc_feature (1)..(127): Homolog of NCBI NO: 13436137 NR Description: Similar to RIKEN cDNA 4933407D05 gene [Homo
  misc_feature (1)..(127): Homolog of NCBI NO: 21361814 NR Description: hypothetical protein RP4-622L5 [Homo sapiens]
  misc_feature (8)..(121): Homolog of NCBI NO: 24652124 NR Description: CG12929-PA [Drosophila melanogaster]
  misc_feature (10)..(127): Homolog of NCBI NO: 28829061 NR Description: similar to putative protein
  misc_feature (7)..(126): Homolog of NCBI NO: 15239774 NR Description: expressed protein [Arabidopsis thaliana]
MAAGRGDAASMVAVGLVWGATNALMRRGALVWDRRARACPSGNVLRRWAELLLTWQYSAPFAANLSASAAFFALLGAAPISVAVPVTNAVTFAATAAAAAALGERVRPAPAVLGTTLIVLGVWVCIS

SEQ ID NO: 110573 - protein, 117 aa, Zea mays subsp. mays
  misc_feature (1)..(117): Ceres Seq. ID no. 15180323
  misc_feature (1)..(117): Homolog of NCBI NO: 12855603 NR Description: unnamed protein product [Mus musculus]
  misc_feature (1)..(117): Homolog of NCBI NO: 13436137 NR Description: Similar to RIKEN cDNA 4933407D05 gene [Homo
  misc_feature (1)..(117): Homolog of NCBI NO: 21361814 NR Description: hypothetical protein RP4-622L5 [Homo sapiens]
  misc_feature (1)..(111): Homolog of NCBI NO: 24652124 NR Description: CG12929-PA [Drosophila melanogaster]
  misc_feature (1)..(117): Homolog of NCBI NO: 28829061 NR Description: similar to putative protein
  misc_feature (1)..(116): Homolog of NCBI NO: 15239774 NR Description: expressed protein [Arabidopsis thaliana]
  misc_feature (1)..(95): Homolog of NCBI NO: 31239883 NR Description: ENSANGP00000014009 [Anopheles gambiae]
  misc_feature (1)..(117): Homolog of NCBI NO: 22267454 NR Description: RIKEN cDNA 2510006D16 [Mus musculus]
MVAVGLVWGATNALMRRGALVWDRRARACPSGNVLRRWAELLLTWQYSAPFAANLSASAAFFALLGAAPISVAVPVTNAVTFAATAAAAAALGERVRPAPAVLGTTLIVLGVWVCIS

SEQ ID NO: 110574 - DNA, 977 bp, Zea mays subsp. mays
  misc_feature (1)..(977): Ceres Seq. ID no. 14302179
tctggccttaaaaacctctgctcccccgtctcggcgcgattgccatcgccatcgccatcgccatcgcgcaccgcctccccgtgtcccctccttctcgcccggcaccgtcgagctcggctgtggaaacagaacaaacccatcaaccatggcgaactcggcgtcggggatggccgtgagcgacgagtgcaagctcaagttccaggagctcaagtcgaagcgaagcttccggttcatcacgttcaagatcaacgagcagacgcagcaggtggtggtggacaggctggggcagccgggcgacacctacgacgacttcaccggctccatgcccgagagcgagtgccgctacgccgtcttcgacttcgacttcaccaccgacgagaactgccagaagagcaagatcttgttcatctcctggtccccggacacctcgagggtcaggagcaagatgctgtacgcgagctccaaggaccggttcaagagggagctggagggcatccagctggagctgcaggccaccgaccccagcgagatgagcatggacattgtcagggcgcgagctctctgaagaggaagacgcgcatccgctcgcgcgatcgccatgcatgccccggaacgacagaagctgtttgtcttgcatcgaccggcggcctctgcatgtacccgtgtgccgttttttgcaccgccggtgccagtgttctcttactccatgtaaactactctagacagtgctcggtgagtacagctgctcggtgagtacggtgtcacagtcactccgtgtaggcagtgccatttcgaagacaatattgcaaaatttaactaacttggttttacaatgcgtttggttggaagtattcctccgggtcactaataattcatgctttgtatatacatgacgtggtcgtggtctatggaatatagcttaaaccattactagtataatacgttgtaacaacacatcaatcatatttgatttatag

SEQ ID NO: 110575 - protein, 250 aa, Zea mays subsp. mays
  misc_feature (1)..(250): Ceres Seq. ID no. 14302180
SGLKNLCSPVSARLPSPSPSPSRTASPCPLLLARHRRARLWKQNKPINHGELGVGDGRERRVQAQVPGAQVEAKLPVHHVQDQRADAAGGGGQAGAAGRHLRRLHRLHARERVPLRRLRLRLHHRRELPEEQDLVHLLVPGHLEGQEQDAVRELQGPVQEGAGGHPAGAAGHRPQRDEHGHCQGASSLKRKTRIRSRDRHACPGTTEAVCLASTGGLCMYPCAVFCTAGASVLLLHVNYSRQCSVSTAAR

SEQ ID NO: 110576 - protein, 187 aa, Zea mays subsp. mays
  misc_feature (1)..(187): Ceres Seq. ID no. 14302181
  misc_feature (60)..(186): Pfam Name: Cofilin/tropomyosin-type actin-binding protein Pfam Description: Cofilin/tropomyosin-type actin-binding protein
  misc_feature (56)..(187): Homolog of NCBI NO: 15235159 NR Description: actin depolymerizing factor-related protein
  misc_feature (49)..(185): Homolog of NCBI NO: 1168345 NR Description: Actin-depolymerizing factor 1 (ADF 1) (ZmABP1)
  misc_feature (49)..(187): Homolog of NCBI NO: 18423381 NR Description: actin depolymerizing factor-related [Arabidopsis
  misc_feature (56)..(185): Homolog of NCBI NO: 7441448 NR Description: actin-depolymerizing factor F6N23.12 -
  misc_feature (49)..(186): Homolog of NCBI NO: 22831338 NR Description: putative actin-depolymerizing factor 2
  misc_feature (49)..(187): Homolog of NCBI NO: 22857914 NR Description: pollen specific actin-depolymerizing factor 2
  misc_feature (49)..(185): Homolog of NCBI NO: 18411410 NR Description: actin-depolymerizing factor -related [Arabidopsis
  misc_feature (49)..(185): Homolog of NCBI NO: 15223471 NR Description: actin depolymerizing factor -related [Arabidopsis
  misc_feature (49)..(186): Homolog of NCBI NO: 231509 NR Description: Actin-depolymerizing factor (ADF)
  misc_feature (49)..(187): Homolog of NCBI NO: 38345587 NR Description: OSJNBb0012E24.5 [Oryza sativa (japonica
LALKTSAPPSRRDCHRHRHRHRAPPPRVPSFSPGTVELGCGNRTNPSTMANSASGMAVSDECKLKFQELKSKRSFRFITFKINEQTQQVVVDRLGQPGDTYDDFTGSMPESECRYAVFDFDFTTDENCQKSKILFISWSPDTSRVRSKMLYASSKDRFKRELEGIQLELQATDPSEMSMDIVRARAL

SEQ ID NO: 110577 - protein, 139 aa, Zea mays subsp. mays
  misc_feature (1)..(139): Ceres Seq. ID no. 14302182
  misc_feature (12)..(138): Pfam Name: Cofilin/tropomyosin-type actin-binding protein Pfam Description: Cofilin/tropomyosin-type actin-binding protein
  misc_feature (8)..(139): Homolog of NCBI NO: 15235159 NR Description: actin depolymerizing factor-related protein
  misc_feature (1)..(137): Homolog of NCBI NO: 1168345 NR Description: Actin-depolymerizing factor 1 (ADF 1) (ZmABP1)
  misc_feature (1)..(139): Homolog of NCBI NO: 18423381 NR Description: actin depolymerizing factor-related [Arabidopsis
  misc_feature (8)..(137): Homolog of NCBI NO: 7441448 NR Description: actin-depolymerizing factor F6N23.12 -
  misc_feature (1)..(138): Homolog of NCBI NO: 22831338 NR Description: putative actin-depolymerizing factor 2
  misc_feature (1)..(139): Homolog of NCBI NO: 22857914 NR Description: pollen specific actin-depolymerizing factor 2
  misc_feature (1)..(137): Homolog of NCBI NO: 18411410 NR Description: actin-depolymerizing factor -related [Arabidopsis
  misc_feature (1)..(137): Homolog of NCBI NO: 15223471 NR Description: actin depolymerizing factor -related [Arabidopsis
  misc_feature (1)..(138): Homolog of NCBI NO: 231509 NR Description: Actin-depolymerizing factor (ADF)
  misc_feature (1)..(139): Homolog of NCBI NO: 38345587 NR Description: OSJNBb0012E24.5 [Oryza sativa (japonica
MANSASGMAVSDECKLKFQELKSKRSFRFITFKINEQTQQVVVDRLGQPGDTYDDFTGSMPESECRYAVFDFDFTTDENCQKSKILFISWSPDTSRVRSKMLYASSKDRFKRELEGIQLELQATDPSEMSMDIVRARAL

SEQ ID NO: 110578 - DNA, 916 bp, Zea mays subsp. mays
  misc_feature (1)..(916): Ceres Seq. ID no. 15179538
  misc_feature: MA Experiment ID: 108544 Result: Down-regulated in Transcription
  misc_feature: MA Experiment ID: 108545 Result: Down-regulated in Transcription
  misc_feature: MA Experiment 108545 PARAMETER Experiment Name: Zm_Imbibed_Seeds_P Parameter: Age (day) Value: 3 vs. 2
  misc_feature: MA Experiment 108545 PARAMETER Experiment Name: Zm_Imbibed_Seeds_P Parameter: Organism Value: Zea mays
  misc_feature: MA Experiment 108545 PARAMETER Experiment Name: Zm_Imbibed_Seeds_P Parameter: Plant Line Value: 35A19
  misc_feature: MA Experiment 108545 PARAMETER Experiment Name: Zm_Imbibed_Seeds_P Parameter: Tissue Value: Aerial vs. Embryo
  misc_feature: MA Experiment ID: 108547 Result: Down-regulated in Transcription
  misc_feature: MA Experiment 108547 PARAMETER Experiment Name: Zm_Imbibed_Seeds_P Parameter: Age (day) Value: 4 vs. 2
  misc_feature: MA Experiment 108547 PARAMETER Experiment Name: Zm_Imbibed_Seeds_P Parameter: Organism Value: Zea mays
  misc_feature: MA Experiment 108547 PARAMETER Experiment Name: Zm_Imbibed_Seeds_P Parameter: Plant Line Value: 35A19
  misc_feature: MA Experiment 108547 PARAMETER Experiment Name: Zm_Imbibed_Seeds_P Parameter: Tissue Value: Aerial vs. Embryo
  misc_feature: MA Experiment ID: 108556 Result: Down-regulated in Transcription
  misc_feature: MA Experiment 108556 PARAMETER Experiment Name: Zm_Drought_P Parameter: Age (day) Value: 9
  misc_feature: MA Experiment 108556 PARAMETER Experiment Name: Zm_Drought_P Parameter: Organism Value: Zea mays
  misc_feature: MA Experiment 108556 PARAMETER Experiment Name: Zm_Drought_P Parameter: Plant Line Value: 35A19
  misc_feature: MA Experiment 108556 PARAMETER Experiment Name: Zm_Drought_P Parameter: Timepoint (hr) Value: 24
  misc_feature: MA Experiment 108556 PARAMETER Experiment Name: Zm_Drought_P Parameter: Tissue Value: Aerial
  misc_feature: MA Experiment 108556 PARAMETER Experiment Name: Zm_Drought_P Parameter: Treatment Value: Drought vs. No Drought
  misc_feature: MA Experiment ID: 108689 Result: Down-regulated in Transcription
  misc_feature: MA Experiment 108689 PARAMETER Experiment Name: Zm_Drought_Roots_P Parameter: Age (day) Value: 9
  misc_feature: MA Experiment 108689 PARAMETER Experiment Name: Zm_Drought_Roots_P Parameter: Organism Value: Zea mays
  misc_feature: MA Experiment 108689 PARAMETER Experiment Name: Zm_Drought_Roots_P Parameter: Plant Line Value: 35A19
  misc_feature: MA Experiment 108689 PARAMETER Experiment Name: Zm_Drought_Roots_P Parameter: Timepoint (hr) Value: 24
  misc_feature: MA Experiment 108689 PARAMETER Experiment Name: Zm_Drought_Roots_P Parameter: Tissue Value: Roots
  misc_feature: MA Experiment 108689 PARAMETER Experiment Name: Zm_Drought_Roots_P Parameter: Treatment Value: Drought vs. No Drought
  misc_feature: MA Experiment ID: 20000534 Result: Up-regulated in Transcription
  misc_feature: MA Experiment 20000534 PARAMETER Experiment Name: Zm_Hybrid_Pollen_P Parameter: Age (day) Value: 8
  misc_feature: MA Experiment 20000534 PARAMETER Experiment Name: Zm_Hybrid_Pollen_P Parameter: Organism Value: Zea mays
  misc_feature: MA Experiment 20000534 PARAMETER Experiment Name: Zm_Hybrid_Pollen_P Parameter: Plant Line Value: 35A19
  misc_feature: MA Experiment 20000534 PARAMETER Experiment Name: Zm_Hybrid_Pollen_P Parameter: Tissue Value: Pollen vs. Aerial
  misc_feature: MA Experiment ID: 20000535 Result: Down-regulated in Transcription
  misc_feature: MA Experiment 20000535 PARAMETER Experiment Name: Zm_Hybrid_Seed_Dev_P Parameter: DAP Value: 30 vs. 12
  misc_feature: MA Experiment 20000535 PARAMETER Experiment Name: Zm_Hybrid_Seed_Dev_P Parameter: Organism Value: Zea mays
  misc_feature: MA Experiment 20000535 PARAMETER Experiment Name: Zm_Hybrid_Seed_Dev_P Parameter: Plant Line Value: 35A19
  misc_feature: MA Experiment 20000535 PARAMETER Experiment Name: Zm_Hybrid_Seed_Dev_P Parameter: Tissue Value: Embryo vs. Unfert Floret
  misc_feature: MA Experiment ID: 20001608 Result: Down-regulated in Transcription
  misc_feature: MA Experiment 20001608 PARAMETER Experiment Name: Zm_50ppm_KNO3_L-to-H_P Parameter: Age (day) Value: 21
  misc_feature: MA Experiment 20001608 PARAMETER Experiment Name: Zm_50ppm_KNO3_L-to-H_P Parameter: Organism Value: Zea mays
  misc_feature: MA Experiment 20001608 PARAMETER Experiment Name: Zm_50ppm_KNO3_L-to-H_P Parameter: Plant Line Value: 35A19
  misc_feature: MA Experiment 20001608 PARAMETER Experiment Name: Zm_50ppm_KNO3_L-to-H_P Parameter: Timepoint (hr) Value: 48
  misc_feature: MA Experiment 20001608 PARAMETER Experiment Name: Zm_50ppm_KNO3_L-to-H_P Parameter: Tissue Value: Shoots
  misc_feature: MA Experiment 20001608 PARAMETER Experiment Name: Zm_50ppm_KNO3_L-to-H_P Parameter: Treatment Value: 50ppm KNO3 vs. 50ppm KCl
ctccgcgtcgtccaggtcctcctcagatccgccaaacccgccgagacagagagatcgccatggccgcggcatcgcctccgctcctccccaccacggtcgtcccggcggccgcagcacccccgacacccgcgcccacggccatatcctccgcggacgccaccgacaccaacccagcggcgatccgggccttcctctcccgcctcctcgacaccacccggcgcgcgctgtcgggcgcccgcccctggtccgagctcgcggaccgctcggctctctcccgcccggagtccctcgccgaggccacgtcccgcttgcgcaagaacctggcctacttccgcgtcaactacgccgccgtggccgcgctgtgcctcgccgcggcgctcctggcgcaccccttctccctggccgcgctgctggcgctgctcgccgcctggtgcctcctctacgtgctccgccccgccgacgcgccccccgtctccgcgttcggccgcaccttctccgaccgcgaggtgctcggaggcctcgccgccgcctccgcgttcgtcgtcttcctcacgtcggtgggctcgctcatcttctccgcgctcgcgctggggaccgccatcgtctgcgcgcacggcgcgtgccgcgtgcccgaggacctcttcctcgacgatgttgaccaggctgccggcggcaccggcaacccgctgctgtcgctcatcgcctccgccaccggaggccgcgtctgatcatgagtctgtaatagatgctatgcttgaggtcactgccattttcttgatcgattattttcgcggaactatttatgcagctcaaaaattatactactatatatagctacggaaagcaacaaatcaaaccatatactggagtttgtttatgtatcatcgagcagaaatatattcttgttattcgtagc

SEQ ID NO: 110579 - protein, 277 aa, Zea mays subsp. mays
  misc_feature (1)..(277): Ceres Seq. ID no. 15179539
  misc_feature (30)..(241): Pfam Name: Formin Homology 2 Domain Pfam Description: Formin Homology 2 Domain
  misc_feature (9)..(239): Homolog of NCBI NO: 30684163 NR Description: proline-rich protein -related [Arabidopsis
  misc_feature (11)..(242): Homolog of NCBI NO: 23017082 NR Description: hypothetical protein [Thermobifida fusca]
  misc_feature (42)..(244): Homolog of NCBI NO: 2429362 NR Description: proline rich protein [Santalum album]
  misc_feature (1)..(242): Homolog of NCBI NO: 14253159 NR Description: VMP3 protein [Volvox carteri f. nagariensis]
  misc_feature (10)..(238): Homolog of NCBI NO: 23017082 NR Description: hypothetical protein [Thermobifida fusca]
  misc_feature (3)..(204): Homolog of NCBI NO: 81286 NR Description: extensin - Volvox carteri (fragment)
  misc_feature (4)..(239): Homolog of NCBI NO: 81286 NR Description: extensin - Volvox carteri (fragment)
  misc_feature (2)..(238): Homolog of NCBI NO: 39596044 NR Description: Hypothetical protein CBG15933 [Caenorhabditis
  misc_feature (20)..(237): Homolog of NCBI NO: 39596044 NR Description: Hypothetical protein CBG15933 [Caenorhabditis
  misc_feature (20)..(238): Homolog of NCBI NO: 39596044 NR Description: Hypothetical protein CBG15933 [Caenorhabditis
LRVVQVLLRSAKPAETERSPWPRHRLRSSPPRSSRRPQHPRHPRPRPYPPRTPPTPTQRRSGPSSPASSTPPGARCRAPAPGPSSRTARLSPARSPSPRPRPACARTWPTSASTTPPWPRCASPRRSWRTPSPWPRCWRCSPPGASSTCSAPPTRPPSPRSAAPSPTARCSEASPPPPRSSSSSRRWARSSSPRSRWGPPSSARTARAACPRTSSSTMLTRLPAAPATRCCRSSPPPPEAASDHESVIDAMLEVTAIFLIDYFRGTIYAAQKLYYYI

SEQ ID NO: 110580 - protein, 241 aa, Zea mays subsp. mays
  misc_feature (1)..(241): Ceres Seq. ID no. 15179540
  misc_feature (19)..(225): Homolog of NCBI NO: 34897194 NR Description: putative prenylated Rab receptor
  misc_feature (25)..(238): Homolog of NCBI NO: 40539036 NR Description: putative prenylated rab acceptor protein
  misc_feature (26)..(226): Homolog of NCBI NO: 15240698 NR Description: expressed protein [Arabidopsis thaliana]
  misc_feature (37)..(241): Homolog of NCBI NO: 15450978 NR Description: putative protein [Arabidopsis thaliana]
  misc_feature (37)..(241): Homolog of NCBI NO: 15228824 NR Description: expressed protein [Arabidopsis thaliana]
  misc_feature (22)..(241): Homolog of NCBI NO: 15226664 NR Description: expressed protein [Arabidopsis thaliana]
  misc_feature (20)..(224): Homolog of NCBI NO: 15241022 NR Description: expressed protein [Arabidopsis thaliana]
  misc_feature (37)..(236): Homolog of NCBI NO: 18072825 NR Description: prenylated Rab receptor 2 [Arabidopsis thaliana]
  misc_feature (37)..(236): Homolog of NCBI NO: 15239101 NR Description: expressed protein [Arabidopsis thaliana]
  misc_feature (20)..(224): Homolog of NCBI NO: 15224494 NR Description: expressed protein [Arabidopsis thaliana]
PRRPGPPQIRQTRRDREIAMAAASPPLLPTTVVPAAAAPPTPAPTAISSADATDTNPAAIRAFLSRLLDTTRRALSGARPWSELADRSALSRPESLAEATSRLRKNLAYFRVNYAAVAALCLAAALLAHPFSLAALLALLAAWCLLYVLRPADAPPVSAFGRTFSDREVLGGLAAASAFVVFLTSVGSLIFSALALGTAIVCAHGACRVPEDLFLDDVDQAAGGTGNPLLSLIASATGGRV

SEQ ID NO: 110581 - protein, 222 aa, Zea mays subsp. mays
  misc_feature (1)..(222): Ceres Seq. ID no. 15179541
  misc_feature (1)..(206): Homolog of NCBI NO: 34897194 NR Description: putative prenylated Rab receptor
  misc_feature (6)..(219): Homolog of NCBI NO: 40539036 NR Description: putative prenylated rab acceptor protein
  misc_feature (7)..(207): Homolog of NCBI NO: 15240698 NR Description: expressed protein [Arabidopsis thaliana]
  misc_feature (18)..(222): Homolog of NCBI NO: 15450978 NR Description: putative protein [Arabidopsis thaliana]
  misc_feature (18)..(222): Homolog of NCBI NO: 15228824 NR Description: expressed protein [Arabidopsis thaliana]
  misc_feature (3)..(222): Homolog of NCBI NO: 15226664 NR Description: expressed protein [Arabidopsis thaliana]
  misc_feature (1)..(205): Homolog of NCBI NO: 15241022 NR Description: expressed protein [Arabidopsis thaliana]
  misc_feature (18)..(217): Homolog of NCBI NO: 18072825 NR Description: prenylated Rab receptor 2 [Arabidopsis thaliana]
  misc_feature (18)..(217): Homolog of NCBI NO: 15239101 NR Description: expressed protein [Arabidopsis thaliana]
  misc_feature (1)..(205): Homolog of NCBI NO: 15224494 NR Description: expressed protein [Arabidopsis thaliana]
MAAASPPLLPTTVVPAAAAPPTPAPTAISSADATDTNPAAIRAFLSRLLDTTRRALSGARPWSELADRSALSRPESLAEATSRLRKNLAYFRVNYAAVAALCLAAALLAHPFSLAALLALLAAWCLLYVLRPADAPPVSAFGRTFSDREVLGGLAAASAFVVFLTSVGSLIFSALALGTAIVCAHGACRVPEDLFLDDVDQAAGGTGNPLLSLIASATGGRV

SEQ ID NO: 110582 - DNA, 865 bp, Zea mays subsp. mays
  misc_feature (1)..(865): Ceres Seq. ID no. 13586237
gaatcgtcttattatattatacaaaacaaatagaaaaaattaaaaacgagaacataatagactaacttatttcttaaacgagaaaatatataatgactactccgtatagcattaattaatatactcctcgcaaaacgatatagaagttgtagtacggactttggctggccacccacctcccgtcccgtcttgaaccatccacacgaacacaacacgcctctcctctactagacttgttttttccgtccatccatccatacgttatacatttcgtttgttccacctgcgcaactgcgacggggataattacgtcttccagatgacgacggcggcatggccgcggccacgcctcctcctcctcctcccccagcctggattcctccgctcggtctgccacggtctctgcgcccgctgtctcttctgcttcctgctgctcctcgccttcgcctgcagctccagctccggacgggtggtggtcaccagcttgcctggcttcgacggcgacctccccttccacctcgaaacagggtgcgcgtgcccgcgtggcgtgtctactagtagtatcctccttcttcttcattcattcatcctggtggtgtactactagactactactagtagctcacgcgcgcggcacatgtagatgtagcctctaaccaccgttgctgccctgaaactgaaaactaaggtacgtggaggtggaggaggacgccggcgtggagctcttctactacttcgtccaggccgagtccggcgccgccgccgccgccgatgacacccctttcctcttctggctcaccggcggcgaccgctgctccgtcttcagcggcctcgcctacgagatcggtacgccaagtatttggat

SEQ ID NO: 110583 - protein, 95 aa, Zea mays subsp. mays
  misc_feature (1)..(95): Ceres Seq. ID no. 13586238
  misc_feature (35)..(70): Homolog of NCBI NO: 38344210 NR Description: OSJNBb0051N19.2 [Oryza sativa (japonica
  misc_feature (33)..(70): Homolog of NCBI NO: 28273383 NR Description: putative serine carboxypeptidase
  misc_feature (2)..(70): Homolog of NCBI NO: 37530314 NR Description: putative serine carboxypeptidase
  misc_feature (32)..(70): Homolog of NCBI NO: 28273381 NR Description: putative glucose acyltransferase
MTTAAWPRPRLLLLLPQPGFLRSVCHGLCARCLFCFLLLLAFACSSSSGRVVVTSLPGFDGDLPFHLETGCACPRGVSTSSILLLLHSFILVVYY

SEQ ID NO: 110584 - protein, 74 aa, Zea mays subsp. mays
  misc_feature (1)..(74): Ceres Seq. ID no. 13586239
MAAATPPPPPPPAWIPPLGLPRSLRPLSLLLPAAPRLRLQLQLRTGGGHQLAWLRRRPPLPPRNRVRVPAWRVY

SEQ ID NO: 110585 - DNA, 940 bp, Zea mays subsp. mays
  misc_feature (1)..(940): Ceres Seq. ID no. 13600483
aataaatagtctcgctccgctggccggcaactggcaccagcaccgaggcaggagcggcgatccattccacacaaccaccactgctcttgccccagcccgcctcaggagttgccagatctgccccggtcacaggaactccgactccgagccctctccaatggcggttaaggtctacgtcgtgtactattccatgtatggacatgttggcaaactagctgaagagatccagaaaggtgcctcgtctgttgaaggtgttgaagctaaaacatggctggtccctgaaaccctccctgaggaagtgcttggaaagatgggcgcaccccctaagcctgacgtgccagtcatcacgccgcaagaactcgcagaggccgacggaatcctcttcgggttcccaacgaggttcggaatgatggcagcgcagatgaaggcgttcttcgatgccactggtgggctctggagggagcagagccttgccggcaagcctgccggcgtcttcttctgcactggatcccagggtggtggccatgagacgacagcgttgacagcgatcacccagttgacgcaccacggcatggtgttcgtgcctgtgggctacaccttcggcgccaagctgttcggcatggaccaggttcagggcggcagcccctacggcgccggcacgttcgccgccgacggctcgaggtggccgagcgaggtggagctggagcacgccttccaccaggggaagtacttcgcaggcatcgccaagaagctcaagggttcagcctgatctacacatatacccttgtcggatatcataaaaaacacttattacagattcgtctaacccatcaatagatcggtctgttctctcgtggtgtctggatgttgtgtggctcagtggaactttcatgctacggtgactttgttgtaatctggagttggaatatcgttgtttcgc

SEQ ID NO: 110586 - protein, 255 aa, Zea mays subsp. mays
  misc_feature (1)..(255): Ceres Seq. ID no. 15218945
  misc_feature (90)..(255): Homolog of NCBI NO: 37724581 NR Description: putative quinone reductase [Vitis vinifera]
  misc_feature (53)..(252): Homolog of NCBI NO: 2564066 NR Description: LEDI-3 protein [Lithospermum erythrorhizon]
  misc_feature (53)..(255): Homolog of NCBI NO: 7445353 NR Description: hypothetical protein M4I22.80 - Arabidopsis
  misc_feature (53)..(252): Homolog of NCBI NO: 12484052 NR Description: quinone-oxidoreductase QR2 [Triphysaria
  misc_feature (53)..(255): Homolog of NCBI NO: 30687535 NR Description: quinone reductase family [Arabidopsis thaliana]
  misc_feature (53)..(254): Homolog of NCBI NO: 15239652 NR Description: quinone reductase, putative [Arabidopsis
  misc_feature (53)..(255): Homolog of NCBI NO: 38636776 NR Description: putative quinone-oxidoreductase QR2
  misc_feature (56)..(254): Homolog of NCBI NO: 21068664 NR Description: putative quinone oxidoreductase [Cicer arietinum]
  misc_feature (53)..(254): Homolog of NCBI NO: 5031275 NR Description: unknown [Prunus armeniaca]
  misc_feature (53)..(255): Homolog of NCBI NO: 34910128 NR Description: putative 1,4-benzoquinone reductase
INSLAPLAGNWHQHRGRSGDPFHTTTTALAPARLRSCQICPGHRNSDSEPSPMAVKVYVVYYSMYGHVGKLAEEIQKGASSVEGVEAKTWLVPETLPEEVLGKMGAPPKPDVPVITPQELAEADGILFGFPTRFGMMAAQMKAFFDATGGLWREQSLAGKPAGVFFCTGSQGGGHETTALTAITQLTHHGMVFVPVGYTFGAKLFGMDQVQGGSPYGAGTFAADGSRWPSEVELEHAFHQGKYFAGIAKKLKGSA

SEQ ID NO: 110587 - protein, 203 aa, Zea mays subsp. mays
  misc_feature (1)..(203): Ceres Seq. ID no. 15218946
  misc_feature (38)..(203): Homolog of NCBI NO: 37724581 NR Description: putative quinone reductase [Vitis vinifera]
  misc_feature (1)..(200): Homolog of NCBI NO: 2564066 NR Description: LEDI-3 protein [Lithospermum erythrorhizon]
  misc_feature (1)..(203): Homolog of NCBI NO: 7445353 NR Description: hypothetical protein M4I22.80 - Arabidopsis
  misc_feature (1)..(200): Homolog of NCBI NO: 12484052 NR Description: quinone-oxidoreductase QR2 [Triphysaria
  misc_feature (1)..(203): Homolog of NCBI NO: 30687535 NR Description: quinone reductase family [Arabidopsis thaliana]
  misc_feature (1)..(202): Homolog of NCBI NO: 15239652 NR Description: quinone reductase, putative [Arabidopsis
  misc_feature (1)..(203): Homolog of NCBI NO: 38636776 NR Description: putative quinone-oxidoreductase QR2
  misc_feature (4)..(202): Homolog of NCBI NO: 21068664 NR Description: putative quinone oxidoreductase [Cicer arietinum]
  misc_feature (1)..(202): Homolog of NCBI NO: 5031275 NR Description: unknown [Prunus armeniaca]
  misc_feature (1)..(203): Homolog of NCBI NO: 34910128 NR Description: putative 1,4-benzoquinone reductase
MAVKVYVVYYSMYGHVGKLAEEIQKGASSVEGVEAKTWLVPETLPEEVLGKMGAPPKPDVPVITPQELAEADGILFGFPTRFGMMAAQMKAFFDATGGLWREQSLAGKPAGVFFCTGSQGGGHETTALTAITQLTHHGMVFVPVGYTFGAKLFGMDQVQGGSPYGAGTFAADGSRWPSEVELEHAFHQGKYFAGIAKKLKGSA

SEQ ID NO: 110588 - protein, 192 aa, Zea mays subsp. mays
  misc_feature (1)..(192): Ceres Seq. ID no. 15218947
  misc_feature (27)..(192): Homolog of NCBI NO: 37724581 NR Description: putative quinone reductase [Vitis vinifera]
  misc_feature (1)..(189): Homolog of NCBI NO: 2564066 NR Description: LEDI-3 protein [Lithospermum erythrorhizon]
  misc_feature (1)..(192): Homolog of NCBI NO: 7445353 NR Description: hypothetical protein M4I22.80 - Arabidopsis
  misc_feature (1)..(189): Homolog of NCBI NO: 12484052 NR Description: quinone-oxidoreductase QR2 [Triphysaria
  misc_feature (1)..(192): Homolog of NCBI NO: 30687535 NR Description: quinone reductase family [Arabidopsis thaliana]
  misc_feature (1)..(191): Homolog of NCBI NO: 15239652 NR Description: quinone reductase, putative [Arabidopsis
  misc_feature (1)..(192): Homolog of NCBI NO: 38636776 NR Description: putative quinone-oxidoreductase QR2
  misc_feature (1)..(191): Homolog of NCBI NO: 21068664 NR Description: putative quinone oxidoreductase [Cicer arietinum]
  misc_feature (1)..(191): Homolog of NCBI NO: 5031275 NR Description: unknown [Prunus armeniaca]
  misc_feature (1)..(192): Homolog of NCBI NO: 34910128 NR Description: putative 1,4-benzoquinone reductase
MYGHVGKLAEEIQKGASSVEGVEAKTWLVPETLPEEVLGKMGAPPKPDVPVITPQELAEADGILFGFPTRFGMMAAQMKAFFDATGGLWREQSLAGKPAGVFFCTGSQGGGHETTALTAITQLTHHGMVFVPVGYTFGAKLFGMDQVQGGSPYGAGTFAADGSRWPSEVELEHAFHQGKYFAGIAKKLKGSA

SEQ ID NO: 110589 - DNA, 838 bp, Zea mays subsp. mays
  misc_feature (1)..(838): Ceres Seq. ID no. 14312533
  misc_feature: MA Experiment ID: 108504 Result: Up-regulated in Transcription
  misc_feature: MA Experiment 108504 PARAMETER Experiment Name: Zm_Drought_P Parameter: Age (day) Value: 8
  misc_feature: MA Experiment 108504 PARAMETER Experiment Name: Zm_Drought_P Parameter: Organism Value: Zea mays
  misc_feature: MA Experiment 108504 PARAMETER Experiment Name: Zm_Drought_P Parameter: Plant Line Value: 35A19
  misc_feature: MA Experiment 108504 PARAMETER Experiment Name: Zm_Drought_P Parameter: Timepoint (hr) Value: 12
  misc_feature: MA Experiment 108504 PARAMETER Experiment Name: Zm_Drought_P Parameter: Tissue Value: Aerial
  misc_feature: MA Experiment 108504 PARAMETER Experiment Name: Zm_Drought_P Parameter: Treatment Value: Drought vs. No Drought
  misc_feature: MA Experiment ID: 108523 Result: Up-regulated in Transcription
  misc_feature: MA Experiment 108523 PARAMETER Experiment Name: Zm_42deg_Heat_P Parameter: Age (day) Value: 8
  misc_feature: MA Experiment 108523 PARAMETER Experiment Name: Zm_42deg_Heat_P Parameter: Organism Value: Zea mays
  misc_feature: MA Experiment 108523 PARAMETER Experiment Name: Zm_42deg_Heat_P Parameter: Plant Line Value: 35A19
  misc_feature: MA Experiment 108523 PARAMETER Experiment Name: Zm_42deg_Heat_P Parameter: Temperature (deg C) Value: 42 vs. 22
  misc_feature: MA Experiment 108523 PARAMETER Experiment Name: Zm_42deg_Heat_P Parameter: Timepoint (hr) Value: 6
  misc_feature: MA Experiment 108523 PARAMETER Experiment Name: Zm_42deg_Heat_P Parameter: Tissue Value: Aerial
  misc_feature: MA Experiment ID: 108530 Result: Up-regulated in Transcription
  misc_feature: MA Experiment 108530 PARAMETER Experiment Name: Zm_Imbibed_Seeds_P Parameter: Age (day) Value: 6 vs. 2
  misc_feature: MA Experiment 108530 PARAMETER Experiment Name: Zm_Imbibed_Seeds_P Parameter: Organism Value: Zea mays
  misc_feature: MA Experiment 108530 PARAMETER Experiment Name: Zm_Imbibed_Seeds_P Parameter: Plant Line Value: 35A19
  misc_feature: MA Experiment 108530 PARAMETER Experiment Name: Zm_Imbibed_Seeds_P Parameter: Tissue Value: Aerial vs. Embryo
  misc_feature: MA Experiment ID: 108539 Result: Up-regulated in Transcription
  misc_feature: MA Experiment 108539 PARAMETER Experiment Name: Zm_20percent_PEG_P Parameter: Age (day) Value: 8
  misc_feature: MA Experiment 108539 PARAMETER Experiment Name: Zm_20percent_PEG_P Parameter: Organism Value: Zea mays
  misc_feature: MA Experiment 108539 PARAMETER Experiment Name: Zm_20percent_PEG_P Parameter: Plant Line Value: 35A19
  misc_feature: MA Experiment 108539 PARAMETER Experiment Name: Zm_20percent_PEG_P Parameter: Timepoint (hr) Value: 1
  misc_feature: MA Experiment 108539 PARAMETER Experiment Name: Zm_20percent_PEG_P Parameter: Tissue Value: Aerial
  misc_feature: MA Experiment 108539 PARAMETER Experiment Name: Zm_20percent_PEG_P Parameter: Treatment Value: 20percent PEG vs. No Treatment
  misc_feature: MA Experiment ID: 108540 Result: Up-regulated in Transcription
  misc_feature: MA Experiment 108540 PARAMETER Experiment Name: Zm_20percent_PEG_P Parameter: Age (day) Value: 8
  misc_feature: MA Experiment 108540 PARAMETER Experiment Name: Zm_20percent_PEG_P Parameter: Organism Value: Zea mays
  misc_feature: MA Experiment 108540 PARAMETER Experiment Name: Zm_20percent_PEG_P Parameter: Plant Line Value: 35A19
  misc_feature: MA Experiment 108540 PARAMETER Experiment Name: Zm_20percent_PEG_P Parameter: Timepoint (hr) Value: 6
  misc_feature: MA Experiment 108540 PARAMETER Experiment Name: Zm_20percent_PEG_P Parameter: Tissue Value: Aerial
  misc_feature: MA Experiment 108540 PARAMETER Experiment Name: Zm_20percent_PEG_P Parameter: Treatment Value: 20percent PEG vs. No Treatment
  misc_feature: MA Experiment ID: 108543 Result: Down-regulated in Transcription
  misc_feature: MA Experiment ID: 108556 Result: Up-regulated in Transcription
  misc_feature: MA Experiment 108556 PARAMETER Experiment Name: Zm_Drought_P Parameter: Age (day) Value: 9
  misc_feature: MA Experiment 108556 PARAMETER Experiment Name: Zm_Drought_P Parameter: Organism Value: Zea mays
  misc_feature: MA Experiment 108556 PARAMETER Experiment Name: Zm_Drought_P Parameter: Plant Line Value: 35A19
  misc_feature: MA Experiment 108556 PARAMETER Experiment Name: Zm_Drought_P Parameter: Timepoint (hr) Value: 24
  misc_feature: MA Experiment 108556 PARAMETER Experiment Name: Zm_Drought_P Parameter: Tissue Value: Aerial
  misc_feature: MA Experiment 108556 PARAMETER Experiment Name: Zm_Drought_P Parameter: Treatment Value: Drought vs. No Drought
  misc_feature: MA Experiment ID: 108597 Result: Up-regulated in Transcription
  misc_feature: MA Experiment 108597 PARAMETER Experiment Name: Zm_100uM_ABA_P Parameter: Age (day) Value: 9
  misc_feature: MA Experiment 108597 PARAMETER Experiment Name: Zm_100uM_ABA_P Parameter: Organism Value: Zea mays
  misc_feature: MA Experiment 108597 PARAMETER Experiment Name: Zm_100uM_ABA_P Parameter: Plant Line Value: 35A19
  misc_feature: MA Experiment 108597 PARAMETER Experiment Name: Zm_100uM_ABA_P Parameter: Timepoint (hr) Value: 24
  misc_feature: MA Experiment 108597 PARAMETER Experiment Name: Zm_100uM_ABA_P Parameter: Tissue Value: Aerial
  misc_feature: MA Experiment 108597 PARAMETER Experiment Name: Zm_100uM_ABA_P Parameter: Treatment Value: 100uM ABA vs. No Treatment
  misc_feature: MA Experiment ID: 108688 Result: Down-regulated in Transcription
  misc_feature: MA Experiment 108688 PARAMETER Experiment Name: Zm_Embryos-Flowers__P Parameter: Tissue Value: Immature Flowers vs. Aerial+
  misc_feature: MA Experiment ID: 20000480 Result: Up-regulated in Transcription
  misc_feature: MA Experiment 20000480 PARAMETER Experiment Name: Zm_Drought_P Parameter: Age (day) Value: 11
  misc_feature: MA Experiment 20000480 PARAMETER Experiment Name: Zm_Drought_P Parameter: Organism Value: Zea mays
  misc_feature: MA Experiment 20000480 PARAMETER Experiment Name: Zm_Drought_P Parameter: Plant Line Value: 35A19
  misc_feature: MA Experiment 20000480 PARAMETER Experiment Name: Zm_Drought_P Parameter: Timepoint (hr) Value: 72
  misc_feature: MA Experiment 20000480 PARAMETER Experiment Name: Zm_Drought_P Parameter: Tissue Value: Aerial
  misc_feature: MA Experiment 20000480 PARAMETER Experiment Name: Zm_Drought_P Parameter: Treatment Value: Drought vs. No Drought
  misc_feature: MA Experiment ID: 20000626 Result: Up-regulated in Transcription
  misc_feature: MA Experiment 20000626 PARAMETER Experiment Name: Zm_Herbicide-Treatments_P Parameter: Timepoint (hr) Value: 12
  misc_feature: MA Experiment 20000626 PARAMETER Experiment Name: Zm_Herbicide-Treatments_P Parameter: Tissue Value: Aerial
  misc_feature: MA Experiment 20000626 PARAMETER Experiment Name: Zm_Herbicide-Treatments_P Parameter: Treatment Value: Roundup vs. No Treatment
  misc_feature: MA Experiment ID: 20000629 Result: Up-regulated in Transcription
  misc_feature: MA Experiment 20000629 PARAMETER Experiment Name: Zm_Herbicide-Treatments_P Parameter: Timepoint (hr) Value: 12
  misc_feature: MA Experiment 20000629 PARAMETER Experiment Name: Zm_Herbicide-Treatments_P Parameter: Tissue Value: Aerial
  misc_feature: MA Experiment 20000629 PARAMETER Experiment Name: Zm_Herbicide-Treatments_P Parameter: Treatment Value: Trimec vs. No Treatment
  misc_feature: MA Experiment ID: 20001608 Result: Down-regulated in Transcription
  misc_feature: MA Experiment 20001608 PARAMETER Experiment Name: Zm_50ppm_KNO3_L-to-H_P Parameter: Age (day) Value: 21
  misc_feature: MA Experiment 20001608 PARAMETER Experiment Name: Zm_50ppm_KNO3_L-to-H_P Parameter: Organism Value: Zea mays
  misc_feature: MA Experiment 20001608 PARAMETER Experiment Name: Zm_50ppm_KNO3_L-to-H_P Parameter: Plant Line Value: 35A19
  misc_feature: MA Experiment 20001608 PARAMETER Experiment Name: Zm_50ppm_KNO3_L-to-H_P Parameter: Timepoint (hr) Value: 48
  misc_feature: MA Experiment 20001608 PARAMETER Experiment Name: Zm_50ppm_KNO3_L-to-H_P Parameter: Tissue Value: Shoots
  misc_feature: MA Experiment 20001608 PARAMETER Experiment Name: Zm_50ppm_KNO3_L-to-H_P Parameter: Treatment Value: 50ppm KNO3 vs. 50ppm KCl
cttccactgcaggttcctaacccccacccacctcgcccaaattgcaaccttccccgagtgctccaggtcccgtggccggcccccagatcctctccaatcccaatccaagtatcgaacggatcccatcggtggcgctcgagcgagcgagtgcggccggaaccgagcgaagatgggcatctcgagcatgccggcgcccgaggacagcctgctggggttcgtgctgtacaacacggcggcgtcggtggcgatcctggcggggctggtgcgcgccgcgctgctgttcctgggcctggcggcggcggaggacgaggagccgcggcagcaggcggaggccgtgacggtcacggccgtggggcccagcctcgcggaccggttccggagcaggttccggccgtcgcgctacgggcggcgccggggcggggactgccgcgtgtgcctggtgcggttcgagacggagtcggtggtgcagcggctcccctgcggccacctcttccaccgcgcctgcctcgagacctggatcgactacgaccacgccacctgcccgctgtgccgccaccgcctcctgccccccgccgctgccgccgacgaggtgccccggattgcctgattagcgccctaggaattgagagtaggcgtagcactctgcacctcgcagcagcagtgtctctgtacaggtttttttttcttttcctttttgttcgggggagagagaggacagaacggagattgaaggaagaaaatggtggcaacaaagctgttccccctttcgtttctccgaagctctctgttgtctttattcattccaaaangtataatctactcgtatgaaccaagtacc

SEQ ID NO: 110590 - protein, 275 aa, Zea mays subsp. mays
  misc_feature (1)..(275): Ceres Seq. ID no. 14312534
  misc_feature (7)..(167): Homolog of NCBI NO: 17564308 NR Description: COLlagen structural gene (col-142)
  misc_feature (5)..(165): Homolog of NCBI NO: 12240028 NR Description: translation initiation factor IF2 [Myxococcus
LPLQVPNPHPPRPNCNLPRVLQVPWPAPRSSPIPIQVSNGSHRWRSSERVRPEPSEDGHLEHAGARGQPAGVRAVQHGGVGGDPGGAGARRAAVPGPGGGGGRGAAAAGGGRDGHGRGAQPRGPVPEQVPAVALRAAPGRGLPRVPGAVRDGVGGAAAPLRPPLPPRLPRDLDRLRPRHLPAVPPPPPAPRRCRRRGAPDCLISALGIESRRSTLHLAAAVSLYRFFFLFLFVRGRERTERRLKEENGGNKAVPPFVSPKLSVVFIHSKXYNLLV

SEQ ID NO: 110591 - protein, 201 aa, Zea mays subsp. mays
  misc_feature (1)..(201): Ceres Seq. ID no. 14312535
  misc_feature (142)..(183): Pfam Name: Zinc finger, C3HC4 type (RING finger) Pfam Description: Zinc finger, C3HC4 type (RING finger)
  misc_feature (141)..(189): Homolog of NCBI NO: 15233117 NR Description: BRH1 RING finger protein [Arabidopsis thaliana]
  misc_feature (142)..(197): Homolog of NCBI NO: 15233696 NR Description: zinc finger (C3HC4-type RING finger) protein
  misc_feature (128)..(199): Homolog of NCBI NO: 34903102 NR Description: unnamed protein product [Oryza sativa (japonica
  misc_feature (66)..(189): Homolog of NCBI NO: 15229284 NR Description: zinc finger (C3HC4-type RING finger) protein
  misc_feature (109)..(189): Homolog of NCBI NO: 25410884 NR Description: probable RING-H2 finger protein RHA2b
  misc_feature (109)..(189): Homolog of NCBI NO: 18379162 NR Description: C3HC4-type zinc finger protein family (RHA2b)
  misc_feature (57)..(184): Homolog of NCBI NO: 25403249 NR Description: protein F21J9.24 [imported] - Arabidopsis
  misc_feature (133)..(188): Homolog of NCBI NO: 15228108 NR Description: zinc finger (C3HC4-type RING finger) protein
  misc_feature (57)..(134): Homolog of NCBI NO: 15228108 NR Description: zinc finger (C3HC4-type RING finger) protein
  misc_feature (57)..(196): Homolog of NCBI NO: 20340241 NR Description: putative RING zinc finger protein-like protein
FHCRFLTPTHLAQIATFPECSRSRGRPPDPLQSQSKYRTDPIGGARASECGRNRAKMGISSMPAPEDSLLGFVLYNTAASVAILAGLVRAALLFLGLAAAEDEEPRQQAEAVTVTAVGPSLADRFRSRFRPSRYGRRRGGDCRVCLVRFETESVVQRLPCGHLFHRACLETWIDYDHATCPLCRHRLLPPAAAADEVPRIA

SEQ ID NO: 110592 - protein, 145 aa, Zea mays subsp. mays
  misc_feature (1)..(145): Ceres Seq. ID no. 14312536
  misc_feature (86)..(127): Pfam Name: Zinc finger, C3HC4 type (RING finger) Pfam Description: Zinc finger, C3HC4 type (RING finger)
  misc_feature (85)..(133): Homolog of NCBI NO: 15233117 NR Description: BRH1 RING finger protein [Arabidopsis thaliana]
  misc_feature (86)..(141): Homolog of NCBI NO: 15233696 NR Description: zinc finger (C3HC4-type RING finger) protein
  misc_feature (72)..(143): Homolog of NCBI NO: 34903102 NR Description: unnamed protein product [Oryza sativa (japonica
  misc_feature (10)..(133): Homolog of NCBI NO: 15229284 NR Description: zinc finger (C3HC4-type RING finger) protein
  misc_feature (53)..(133): Homolog of NCBI NO: 25410884 NR Description: probable RING-H2 finger protein RHA2b
  misc_feature (53)..(133): Homolog of NCBI NO: 18379162 NR Description: C3HC4-type zinc finger protein family (RHA2b)
  misc_feature (1)..(128): Homolog of NCBI NO: 25403249 NR Description: protein F21J9.24 [imported] - Arabidopsis
  misc_feature (77)..(132): Homolog of NCBI NO: 15228108 NR Description: zinc finger (C3HC4-type RING finger) protein
  misc_feature (1)..(78): Homolog of NCBI NO: 15228108 NR Description: zinc finger (C3HC4-type RING finger) protein
  misc_feature (1)..(140): Homolog of NCBI NO: 20340241 NR Description: putative RING zinc finger protein-like protein
MGISSMPAPEDSLLGFVLYNTAASVAILAGLVRAALLFLGLAAAEDEEPRQQAEAVTVTAVGPSLADRFRSRFRPSRYGRRRGGDCRVCLVRFETESVVQRLPCGHLFHRACLETWIDYDHATCPLCRHRLLPPAAAADEVPRIA

SEQ ID NO: 110593 - DNA, 1180 bp, Zea mays subsp. mays
  misc_feature (1)..(1180): Ceres Seq. ID no. 15180160
attcttctcttctcctggacaactcaagctcaaaacccaaaatcgaccttgtcgacccggatccgagctaggcacccgcacgaccacccgcctcctgccggtcaccgggacctagcatcgccgggcggcggcgggggaggggaaggtaggcgatgaggaaacgtgagcgggagaatccgtgcgggatctgcgggcactaccacaagtacgaggagggggaggtatgcggggtgtgcggccaccgctggaaaccgtcggacggggagggcgccccgtcgaggcacgagtccgccttccccacagaggtgctcaaggacttcctcttcctcgggagctacgacaacgcctcacgctccgaggtcctcaggacgctcagtatctcccacatccttaatactgtgccttattgccacaatctgtacaagaattcattcacatatcacagtcttcaacgggacaggcctttggattttgatgaggcaaaccagtatctagagaaatgtgaaagagataaatcgcgtgttcttgttcattgcatgactggaaaaaacaggtctgctgctattgttgtagccttcttgatgaagtctagagggtggagacttgcacagtcttttcaatgggtgaaagaccgaagaccacaggttcaactgacagatgcttctcataaggagcttttggagtatgagctgaagcttttcggacccagtactcaaaccttggttcccactgaatcatttgcttctcttggatttggttatacaaaaccagcaggtgacatgcaaacgcctgtgttcaaccaaacgaccatgccatccatattcgagcgattcaacccaaatgatcgccccgccaatttcacttttggagttgagaggaaagcagaagctaaccctcgagataacaatagtgatggcagggtaaacccaacttcaatggagaacctgatggacagctcttaagatgatttcacgatgtcgctgttcaatctccttgttccagaagtacacccgctgtaatctgcatgtcgcgggagtaaacctactgctcggtgcctcggtgcaccgaatacttatccggtgtctaggtttcagggaggttttgccttgtcgcttgagaaatggttctctggaaaccgatctttgctttagaatgactctatgaaatagatgtttgtggc

SEQ ID NO: 110594 - protein, 269 aa, Zea mays subsp. mays
  misc_feature (1)..(269): Ceres Seq. ID no. 15180161
  misc_feature (48)..(181): Pfam Name: Dual specificity phosphatase, catalytic domain Pfam Description: Dual specificity phosphatase, catalytic domain
  misc_feature (14)..(182): Homolog of NCBI NO: 28828846 NR Description: similar to dual-specificity protein phosphatase
  misc_feature (33)..(179): Homolog of NCBI NO: 18254478 NR Description: dual specificity phosphatase 19
  misc_feature (52)..(163): Homolog of NCBI NO: 15229482 NR Description: dual-specificity protein phosphatase [Arabidopsis
  misc_feature (52)..(163): Homolog of NCBI NO: 9294518 NR Description: dual-specificity protein phosphatase-like protein
  misc_feature (39)..(204): Homolog of NCBI NO: 1050849 NR Description: MAP kinase phosphatase [Xenopus laevis]
  misc_feature (42)..(231): Homolog of NCBI NO: 28317042 NR Description: RE08706p [Drosophila melanogaster]
  misc_feature (40)..(200): Homolog of NCBI NO: 30851156 NR Description: Unknown (protein for MGC:55423) [Danio rerio]
  misc_feature (42)..(231): Homolog of NCBI NO: 24666604 NR Description: Mitogen-activated protein kinase phosphatase 3
  misc_feature (1)..(253): Homolog of NCBI NO: 15228155 NR Description: protein phosphatase -related [Arabidopsis
  misc_feature (1)..(255): Homolog of NCBI NO: 28393745 NR Description: putative protein phosphatase [Arabidopsis
MRKRERENPCGICGHYHKYEEGEVCGVCGHRWKPSDGEGAPSRHESAFPTEVLKDFLFLGSYDNASRSEVLRTLSISHILNTVPYCHNLYKNSFTYHSLQRDRPLDFDEANQYLEKCERDKSRVLVHCMTGKNRSAAIVVAFLMKSRGWRLAQSFQWVKDRRPQVQLTDASHKELLEYELKLFGPSTQTLVPTESFASLGFGYTKPAGDMQTPVFNQTTMPSIFERFNPNDRPANFTFGVERKAEANPRDNNSDGRVNPTSMENLMDSS

SEQ ID NO: 110595 - protein, 141 aa, Zea mays subsp. mays
  misc_feature (1)..(141): Ceres Seq. ID no. 15180162
  misc_feature (1)..(53): Pfam Name: Dual specificity phosphatase, catalytic domain Pfam Description: Dual specificity phosphatase, catalytic domain
  misc_feature (1)..(54): Homolog of NCBI NO: 28828846 NR Description: similar to dual-specificity protein phosphatase
  misc_feature (1)..(51): Homolog of NCBI NO: 18254478 NR Description: dual specificity phosphatase 19
  misc_feature (1)..(35): Homolog of NCBI NO: 15229482 NR Description: dual-specificity protein phosphatase [Arabidopsis
  misc_feature (1)..(35): Homolog of NCBI NO: 9294518 NR Description: dual-specificity protein phosphatase-like protein
  misc_feature (1)..(76): Homolog of NCBI NO: 1050849 NR Description: MAP kinase phosphatase [Xenopus laevis]
  misc_feature (1)..(103): Homolog of NCBI NO: 28317042 NR Description: RE08706p [Drosophila melanogaster]
  misc_feature (1)..(72): Homolog of NCBI NO: 30851156 NR Description: Unknown (protein for MGC:55423) [Danio rerio]
  misc_feature (1)..(103): Homolog of NCBI NO: 24666604 NR Description: Mitogen-activated protein kinase phosphatase 3
  misc_feature (1)..(125): Homolog of NCBI NO: 15228155 NR Description: protein phosphatase -related [Arabidopsis
  misc_feature (1)..(127): Homolog of NCBI NO: 28393745 NR Description: putative protein phosphatase [Arabidopsis
MTGKNRSAAIVVAFLMKSRGWRLAQSFQWVKDRRPQVQLTDASHKELLEYELKLFGPSTQTLVPTESFASLGFGYTKPAGDMQTPVFNQTTMPSIFERFNPNDRPANFTFGVERKAEANPRDNNSDGRVNPTSMENLMDSS

SEQ ID NO: 110596 - DNA, 1022 bp, Zea mays subsp. mays
  misc_feature (1)..(1022): Ceres Seq. ID no. 15180273
  misc_feature: MA Experiment ID: 108530 Result: Up-regulated in Transcription
  misc_feature: MA Experiment 108530 PARAMETER Experiment Name: Zm_Imbibed_Seeds_P Parameter: Age (day) Value: 6 vs. 2
  misc_feature: MA Experiment 108530 PARAMETER Experiment Name: Zm_Imbibed_Seeds_P Parameter: Organism Value: Zea mays
  misc_feature: MA Experiment 108530 PARAMETER Experiment Name: Zm_Imbibed_Seeds_P Parameter: Plant Line Value: 35A19
  misc_feature: MA Experiment 108530 PARAMETER Experiment Name: Zm_Imbibed_Seeds_P Parameter: Tissue Value: Aerial vs. Embryo
  misc_feature: MA Experiment ID: 108547 Result: Up-regulated in Transcription
  misc_feature: MA Experiment 108547 PARAMETER Experiment Name: Zm_Imbibed_Seeds_P Parameter: Age (day) Value: 4 vs. 2
  misc_feature: MA Experiment 108547 PARAMETER Experiment Name: Zm_Imbibed_Seeds_P Parameter: Organism Value: Zea mays
  misc_feature: MA Experiment 108547 PARAMETER Experiment Name: Zm_Imbibed_Seeds_P Parameter: Plant Line Value: 35A19
  misc_feature: MA Experiment 108547 PARAMETER Experiment Name: Zm_Imbibed_Seeds_P Parameter: Tissue Value: Aerial vs. Embryo
  misc_feature: MA Experiment ID: 20001610 Result: Up-regulated in Transcription
  misc_feature: MA Experiment 20001610 PARAMETER Experiment Name: Zm_50ppm_KNO3_L-to-H_P Parameter: Age (day) Value: 19
  misc_feature: MA Experiment 20001610 PARAMETER Experiment Name: Zm_50ppm_KNO3_L-to-H_P Parameter: Organism Value: Zea mays
  misc_feature: MA Experiment 20001610 PARAMETER Experiment Name: Zm_50ppm_KNO3_L-to-H_P Parameter: Plant Line Value: 35A19
  misc_feature: MA Experiment 20001610 PARAMETER Experiment Name: Zm_50ppm_KNO3_L-to-H_P Parameter: Timepoint (hr) Value: 2
  misc_feature: MA Experiment 20001610 PARAMETER Experiment Name: Zm_50ppm_KNO3_L-to-H_P Parameter: Tissue Value: Roots
  misc_feature: MA Experiment 20001610 PARAMETER Experiment Name: Zm_50ppm_KNO3_L-to-H_P Parameter: Treatment Value: 50ppm KNO3 vs. 50ppm KCl
gccagttgccaccagccactaggacgtcgctgcttccacgcctcctttactcctgctccaacggtgtattccaagcacagcgagaaagcggagacctttgcgcgagtgcgctctcgttctacctccagcagcagcagcagcggcgccgcagcggcatgccgaggagacggcacggagggttccggctcggctggaagctgctcggcgtctggcgctgggcggcgctctgccggcgccgccgccgcggccgcgggtacctccgcctgcacccgcgccaacaaggaggaggcagcgacagatccccgcccctccaggcgggtgtagcagcggtgtgcgccacgaagcagaagaagcagcagcagcagcagcgggatgactctgccgactcgcctcggatgctcacgtgggggcggtcgctggcgcggcggatgagcctcctgcgccggcgtgcgggagggaagggccggctgctggaggacgaggacgccgcggaggccaccacgcccaaggggcaggtggccgtgtacgtgggcggcgccgagcccggggcagagtcgatgcggtacgtggtccccgtggtgtacttcaaccacccgctgttcggggagctgctgcgcgaggccgaggaggagttcggcttccagcaccccggcgggatcaccatcccgtgcgcggcctcgcgcttcgagcgcgccgccgccgtcgtcgccgcgggcggcggcgccgggaagaaggtgcccgctggctggtggtagtgctagcagcatgtggcccacacggtggccgctgtacataccacacgtgcatgctcctgaccctcttcccctcagcggctcagcctcaggcaggaggtgaggaggatcccgattcccatggggaacgatccttcttctttttctttctcattagtttgactctttttttttttgcctctgttggacaccaaaataaacggacggtccggtccatgggcccggacggtccgcgtgtcccgagattagattaactcggatgtttatccg

SEQ ID NO: 110597 - protein, 250 aa, Zea mays subsp. mays
  misc_feature (1)..(250): Ceres Seq. ID no. 15180274
  misc_feature (131)..(236): Pfam Name: Auxin responsive protein Pfam Description: Auxin responsive protein
  misc_feature (168)..(229): Homolog of NCBI NO: 30687983 NR Description: auxin-induced (indole-3-acetic acid induced)
  misc_feature (115)..(250): Homolog of NCBI NO: 6906857 NR Description: unknown [Zea mays]
  misc_feature (143)..(228): Homolog of NCBI NO: 15234827 NR Description: small auxin up RNA (SAUR-AC1) [Arabidopsis
  misc_feature (168)..(235): Homolog of NCBI NO: 18411465 NR Description: auxin-induced (indole-3-acetic acid induced)
  misc_feature (137)..(237): Homolog of NCBI NO: 15234550 NR Description: auxin-induced (indole-3-acetic acid induced)
  misc_feature (138)..(237): Homolog of NCBI NO: 15235723 NR Description: auxin-induced (indole-3-acetic acid induced)
  misc_feature (131)..(241): Homolog of NCBI NO: 15225432 NR Description: auxin-induced (indole-3-acetic acid induced)
  misc_feature (131)..(240): Homolog of NCBI NO: 15232400 NR Description: auxin-induced (indole-3-acetic acid induced)
  misc_feature (52)..(97): Homolog of NCBI NO: 38567865 NR Description: OSJNBa0091D06.3 [Oryza sativa (japonica
  misc_feature (123)..(238): Homolog of NCBI NO: 38567865 NR Description: OSJNBa0091D06.3 [Oryza sativa (japonica
QLPPATRTSLLPRLLYSCSNGVFQAQRESGDLCASALSFYLQQQQQRRRSGMPRRRHGGFRLGWKLLGVWRWAALCRRRRRGRGYLRLHPRQQGGGSDRSPPLQAGVAAVCATKQKKQQQQQRDDSADSPRMLTWGRSLARRMSLLRRRAGGKGRLLEDEDAAEATTPKGQVAVYVGGAEPGAESMRYVVPVVYFNHPLFGELLREAEEEFGFQHPGGITIPCAASRFERAAAVVAAGGGAGKKVPAGWW

SEQ ID NO: 110598 - protein, 199 aa, Zea mays subsp. mays
  misc_feature (1)..(199): Ceres Seq. ID no. 15180275
  misc_feature (80)..(185): Pfam Name: Auxin responsive protein Pfam Description: Auxin responsive protein
  misc_feature (117)..(178): Homolog of NCBI NO: 30687983 NR Description: auxin-induced (indole-3-acetic acid induced)
  misc_feature (64)..(199): Homolog of NCBI NO: 6906857 NR Description: unknown [Zea mays]
  misc_feature (92)..(177): Homolog of NCBI NO: 15234827 NR Description: small auxin up RNA (SAUR-AC1) [Arabidopsis
  misc_feature (117)..(184): Homolog of NCBI NO: 18411465 NR Description: auxin-induced (indole-3-acetic acid induced)
  misc_feature (86)..(186): Homolog of NCBI NO: 15234550 NR Description: auxin-induced (indole-3-acetic acid induced)
  misc_feature (87)..(186): Homolog of NCBI NO: 15235723 NR Description: auxin-induced (indole-3-acetic acid induced)
  misc_feature (80)..(190): Homolog of NCBI NO: 15225432 NR Description: auxin-induced (indole-3-acetic acid induced)
  misc_feature (80)..(189): Homolog of NCBI NO: 15232400 NR Description: auxin-induced (indole-3-acetic acid induced)
  misc_feature (1)..(46): Homolog of NCBI NO: 38567865 NR Description: OSJNBa0091D06.3 [Oryza sativa (japonica
  misc_feature (72)..(187): Homolog of NCBI NO: 38567865 NR Description: OSJNBa0091D06.3 [Oryza sativa (japonica
MPRRRHGGFRLGWKLLGVWRWAALCRRRRRGRGYLRLHPRQQGGGSDRSPPLQAGVAAVCATKQKKQQQQQRDDSADSPRMLTWGRSLARRMSLLRRRAGGKGRLLEDEDAAEATTPKGQVAVYVGGAEPGAESMRYVVPVVYFNHPLFGELLREAEEEFGFQHPGGITIPCAASRFERAAAVVAAGGGAGKKVPAGWW

SEQ ID NO: 110599 - DNA, 1978 bp, Zea mays subsp. mays
  misc_feature (1)..(1978): Ceres Seq. ID no. 15180149
ctcttcccccgcgcggcggccgcgggagtgttcgtgttcctcacttctcccgcttgcgtccccgacactccctcagatccgcggccgtttcccgatccgaggggcattccagccctaaatagcggccggtgagcaggtctccttccgccggcgcggaccacctggagggagtttatcctggagccgtcttcctcctcgcctccttttgcggcgcggcgcggaggccggagtcgcttggaggcccagctgtgtttgggttgatttcttcgtttgtcgcagggcctgtcttctgcctctgcttttgcttcgaagcaatggcgaatgcaagcaagcacttgcaaccttcaagtcaagcaggcaatgacaagaagtatcagggcacgctggttgcttcaccagcaaaggccatttcacctaagtgtgtgaaccgcattgtgccatcgaagcaactgatcttgggtgggggttcaataggccatgtggcatcatttctgatcaaggtcgttgctcttgaggcagtgagaagagtttctaaaacaagatgccctttcatatggaattctgttcaagcattgcagatccttgtgtatcctccatttagctggatccaaagatgggcaccgctcggatttctcgtgcagggaattcagaaactatccatgccactgttgtttctgtcagtcacaacaacagtaagtgagctgtcttccaagcatgatgatgaaccagataacaatacagaacattctgagacaccttccgaaacaaatgaattggcgtcaacttctggcacaagcgatgctgctgatggcacaaaggaaatcgtgcaagagaactggcttgtgttacttttcagggagcttgagaagcaaggcatcactttgcctgagaggtttactgaagatgagttacgcagattttatgttgctgcaaatggcgactttcaaagtttactctcttcggttaagaagacaattcattggagggaaacatttcacatacttacattgcaagaacttgatagatggtctcacttagtcttttggcatgggtttgacacgatgcttcggccttgtttagtagttcgtcttggacttgcatgctctagcatacctcctcatgatagaccccgtttcgggcaagcagtagtttctcaaattgaccatggcgttgtaaatttgatcaatgaagaagattcaaggattaccgttttactggattgccatgggatttcgccattcagatttccaatgcaaatgatgaggtcgttcatcactgtggttcaagaaaactacccgaatcgtcttggggtattgtttgtcatccgtcttcctccagttgtcagagttattgcacagacatttcttcaagtcttgaaaccagctacaaagcagaagttgcgttttgagggagattcgtacaagaaggcattggcggagttcctgcaggctgtgccagcgtttctgggcggtaaatgcagctgcccgcgatgtgagagtcctcgtgatgattcagtgatacaggcaggggaagggagcaagaagcagccccgcttggtcagcgttgatgacgggttacctgtcacagacttggacttcgacttggatgaagagatcccatcaccttatagctgcgagaacgccatcagggctgcgataatcggcctgctgatggtgtgcatcttcgtcgcgtttctggctgggatgatcgaccctgcatccgttccagccagtgcctgagagcttgtggaatagagcatgcacgtacatgtgttgctaattaggatgcagggtgctgtatttcttggcaggcttcttgtatgttgtcgtcagaccgccatagagcgctttctcccagtgtgagcgagcgcatgaataatatatatcctctgtgtcaaatgttggttagcagttcaattcgggcctactagatttcactattttcttttttatcttgatcgggcctactgaatttttgc

SEQ ID NO: 110600 - protein, 474 aa, Zea mays subsp. mays
  misc_feature (1)..(474): Ceres Seq. ID no. 15180150
  misc_feature (241)..(395): Pfam Name: CRAL/TRIO domain Pfam Description: CRAL/TRIO domain
  misc_feature (14)..(471): Homolog of NCBI NO: 15231434 NR Description: SEC14 cytosolic factor, putative [Arabidopsis
  misc_feature (1)..(474): Homolog of NCBI NO: 29124131 NR Description: unknown protein [Oryza sativa (japonica
MANASKHLQPSSQAGNDKKYQGTLVASPAKAISPKCVNRIVPSKQLILGGGSIGHVASFLIKVVALEAVRRVSKTRCPFIWNSVQALQILVYPPFSWIQRWAPLGFLVQGIQKLSMPLLFLSVTTTVSELSSKHDDEPDNNTEHSETPSETNELASTSGTSDAADGTKEIVQENWLVLLFRELEKQGITLPERFTEDELRRFYVAANGDFQSLLSSVKKTIHWRETFHILTLQELDRWSHLVFWHGFDTMLRPCLVVRLGLACSSIPPHDRPRFGQAVVSQIDHGVVNLINEEDSRITVLLDCHGISPFRFPMQMMRSFITVVQENYPNRLGVLFVIRLPPVVRVIAQTFLQVLKPATKQKLRFEGDSYKKALAEFLQAVPAFLGGKCSCPRCESPRDDSVIQAGEGSKKQPRLVSVDDGLPVTDLDFDLDEEIPSPYSCENAIRAAIIGLLMVCIFVAFLAGMIDPASVPASA

SEQ ID NO: 110601 - protein, 359 aa, Zea mays subsp. mays
  misc_feature (1)..(359): Ceres Seq. ID no. 15180151
  misc_feature (126)..(280): Pfam Name: CRAL/TRIO domain Pfam Description: CRAL/TRIO domain
  misc_feature (1)..(356): Homolog of NCBI NO: 15231434 NR Description: SEC14 cytosolic factor, putative [Arabidopsis
  misc_feature (1)..(359): Homolog of NCBI NO: 29124131 NR Description: unknown protein [Oryza sativa (japonica
MPLLFLSVTTTVSELSSKHDDEPDNNTEHSETPSETNELASTSGTSDAADGTKEIVQENWLVLLFRELEKQGITLPERFTEDELRRFYVAANGDFQSLLSSVKKTIHWRETFHILTLQELDRWSHLVFWHGFDTMLRPCLVVRLGLACSSIPPHDRPRFGQAVVSQIDHGVVNLINEEDSRITVLLDCHGISPFRFPMQMMRSFITVVQENYPNRLGVLFVIRLPPVVRVIAQTFLQVLKPATKQKLRFEGDSYKKALAEFLQAVPAFLGGKCSCPRCESPRDDSVIQAGEGSKKQPRLVSVDDGLPVTDLDFDLDEEIPSPYSCENAIRAAIIGLLMVCIFVAFLAGMIDPASVPASA

SEQ ID NO: 110602 - DNA, 1094 bp, Zea mays subsp. mays
  misc_feature (1)..(1094): Ceres Seq. ID no. 15180374
aaggccagtctgagtgtgcgttcgattcgcttgtgctgcagctagggtttagaggttttctgggcgcggagcgggaggcggcggcggctatggctgcggcggaggaggagatcgcggtgaaggagccgctggatctgatacgcctcagcctcgacgagcgcatctacgtcaagctccgatccgaccgcgagctgcgcggcaagctccatgcgtatgatcaacatttaaacatgatacttggagatgttgatcatacgcagtgagctagcctcccgagccctatctatccttttctcggcacctcgcgggtctcccgtccgccccgtcccgcattcgtatcctctcctcactctcgccgccgccgcttcccctgcgccccgagccaagatgaatgttgaaaagctcaagaagatggcaggtgctgtgcgcactggggggaagggtagcatgcgcaggaagaagaaggcagtccacaagactacgaccacagatgataaaaggcttcagagcaccctgaaaagaataggagtgaacaccattcctggtattgaagaggtcaacatctttaaggatgatgttgttattcagtttgtgaatcctaaagtgcaagcttcaattggtgctaatacatgggtggtcagtggaactccacagacaaagaagctgcaagatctgcttccgtccattatcaaccagctcggccctgacaacctagacaacctgcggaggcttgcggagcaattccagaagcaggcccctggtgcttcaggtgcagaggctggcgccagcgctggtgctgctcaggacgatgacgatgacgttcctgagctcgtccctggagagacatttgaggaggctgcggaagagaaaaaggagtcgtcatgattttgccacatgcccgcccttttgaagggcttataagtaaatccttgcgtagaagggacatgttgaactctgacctaccttatttgtgcctgcttacggttatgtcatgaacgagaatttggtagtccagcgctggtccccctttttcacccatatccccgtgcttgtgtggtaaaagtcttgttaatgttaaaggccacacttaaacc

SEQ ID NO: 110603 - protein, 213 aa, Zea mays subsp. mays
  misc_feature (1)..(213): Ceres Seq. ID no. 15180375
  misc_feature (82)..(140): Pfam Name: NAC domain Pfam Description: NAC domain
  misc_feature (49)..(209): Homolog of NCBI NO: 15219413 NR Description: transcription factor BTF3 (RNA polymerase B
  misc_feature (49)..(213): Homolog of NCBI NO: 33945882 NR Description: transcription factor homolog BTF3-like protein
  misc_feature (49)..(210): Homolog of NCBI NO: 29367567 NR Description: putative transcription factor BTF3
  misc_feature (22)..(209): Homolog of NCBI NO: 2851417 NR Description: TRANSCRIPTION FACTOR BTF3 (RNA POLYMERASE B
  misc_feature (49)..(209): Homolog of NCBI NO: 16323127 NR Description: At1g17880/F2H15_10 [Arabidopsis thaliana]
  misc_feature (49)..(209): Homolog of NCBI NO: 15220876 NR Description: transcription factor -related [Arabidopsis
  misc_feature (49)..(209): Homolog of NCBI NO: 21537065 NR Description: putative transcription factor BTF3 (RNA
  misc_feature (49)..(209): Homolog of NCBI NO: 34867805 NR Description: similar to Transcription factor BTF3 (RNA
  misc_feature (49)..(210): Homolog of NCBI NO: 24431603 NR Description: Putative transcription factor
  misc_feature (49)..(212): Homolog of NCBI NO: 37535464 NR Description: putative transcription factor
MLIIRSELASRALSILFSAPRGSPVRPVPHSYPLLTLAAAASPAPRAKMNVEKLKKMAGAVRTGGKGSMRRKKKAVHKTTTTDDKRLQSTLKRIGVNTIPGIEEVNIFKDDVVIQFVNPKVQASIGANTWVVSGTPQTKKLQDLLPSIINQLGPDNLDNLRRLAEQFQKQAPGASGAEAGASAGAAQDDDDDVPELVPGETFEEAAEEKKESS

SEQ ID NO: 110604 - protein, 165 aa, Zea mays subsp. mays
  misc_feature (1)..(165): Ceres Seq. ID no. 15180376
  misc_feature (34)..(92): Pfam Name: NAC domain Pfam Description: NAC domain
  misc_feature (1)..(161): Homolog of NCBI NO: 34867805 NR Description: similar to Transcription factor BTF3 (RNA
  misc_feature (1)..(161): Homolog of NCBI NO: 2851417 NR Description: TRANSCRIPTION FACTOR BTF3 (RNA POLYMERASE B
  misc_feature (1)..(161): Homolog of NCBI NO: 21537065 NR Description: putative transcription factor BTF3 (RNA
  misc_feature (1)..(161): Homolog of NCBI NO: 16323127 NR Description: At1g17880/F2H15_10 [Arabidopsis thaliana]
  misc_feature (1)..(161): Homolog of NCBI NO: 15220876 NR Description: transcription factor -related [Arabidopsis
  misc_feature (1)..(161): Homolog of NCBI NO: 15219413 NR Description: transcription factor BTF3 (RNA polymerase B
  misc_feature (1)..(165): Homolog of NCBI NO: 33945882 NR Description: transcription factor homolog BTF3-like protein
  misc_feature (1)..(162): Homolog of NCBI NO: 29367567 NR Description: putative transcription factor BTF3
  misc_feature (1)..(162): Homolog of NCBI NO: 24431603 NR Description: Putative transcription factor
  misc_feature (1)..(164): Homolog of NCBI NO: 37535464 NR Description: putative transcription factor
MNVEKLKKMAGAVRTGGKGSMRRKKKAVHKTTTTDDKRLQSTLKRIGVNTIPGIEEVNIFKDDVVIQFVNPKVQASIGANTWVVSGTPQTKKLQDLLPSIINQLGPDNLDNLRRLAEQFQKQAPGASGAEAGASAGAAQDDDDDVPELVPGETFEEAAEEKKESS

SEQ ID NO: 110605 - protein, 157 aa, Zea mays subsp. mays
  misc_feature (1)..(157): Ceres Seq. ID no. 15180377
  misc_feature (26)..(84): Pfam Name: NAC domain Pfam Description: NAC domain
  misc_feature (1)..(153): Homolog of NCBI NO: 34867805 NR Description: similar to Transcription factor BTF3 (RNA
  misc_feature (1)..(153): Homolog of NCBI NO: 2851417 NR Description: TRANSCRIPTION FACTOR BTF3 (RNA POLYMERASE B
  misc_feature (1)..(153): Homolog of NCBI NO: 21537065 NR Description: putative transcription factor BTF3 (RNA
  misc_feature (1)..(153): Homolog of NCBI NO: 16323127 NR Description: At1g17880/F2H15_10 [Arabidopsis thaliana]
  misc_feature (1)..(153): Homolog of NCBI NO: 15220876 NR Description: transcription factor -related [Arabidopsis
  misc_feature (1)..(153): Homolog of NCBI NO: 15219413 NR Description: transcription factor BTF3 (RNA polymerase B
  misc_feature (1)..(157): Homolog of NCBI NO: 33945882 NR Description: transcription factor homolog BTF3-like protein
  misc_feature (1)..(154): Homolog of NCBI NO: 29367567 NR Description: putative transcription factor BTF3
  misc_feature (1)..(154): Homolog of NCBI NO: 24431603 NR Description: Putative transcription factor
  misc_feature (1)..(156): Homolog of NCBI NO: 37535464 NR Description: putative transcription factor
MAGAVRTGGKGSMRRKKKAVHKTTTTDDKRLQSTLKRIGVNTIPGIEEVNIFKDDVVIQFVNPKVQASIGANTWVVSGTPQTKKLQDLLPSIINQLGPDNLDNLRRLAEQFQKQAPGASGAEAGASAGAAQDDDDDVPELVPGETFEEAAEEKKESS

SEQ ID NO: 110606 - DNA, 1330 bp, Zea mays subsp. mays
  misc_feature (1)..(1330): Ceres Seq. ID no. 12384296
caaattgtatgaaaggtgtgtgattgcatgtgctagttattcagaattctggatccgctatgtgcaatgtatggaggatagggagtctagacctagcaaacaatgccctggctcgtgctactcatgtgtttgtcaagaagcagccggagatccatctgtttagtgctcgctttaaggagcttaatggggatatttctggagcacgtgcagagtatcagcatctttactcagatttatgtcctggctttctagaggccatcgtgaagcattctaatatggaacaccgactgggagataaagaattatcttgttcagtttatgaaaaggccatcgctgctgagaagggaaaggaacagagccagctcttgccgacgttgcttattcagtactcccgtttcttatttttggccatccgagatttggagaaggcaagagaaatattaactgtgctgcatgagcagttaaatgtaacaaaaacagtgcttgaggctgtcattcatctagagtcaatttttccatgcgaaaagcgtattgattttttagactcacttgtggagaagtttgttacacctgaatcatctcagggagaggtggcaagtctagttgacaaagaggaaatatcttccatatttttagagtttttggatctctttggggatgcaaagtcaatcaagaaggctttaactcggcatacaactcttttttcatgtaagagaagcattctggccatcaaagaaacggaaagcagatgacgctgttgtctcagacagggacaaatttgctaaaactgtggttactcagtcagccacgggaactgatccaaatgcttccaatcctcctgtttggcctgcaacttctgaagcatctgggcaacaatggggagcttcttatgcacagcaggctgcatatcctgcatatggaacttacgactacagccatcaaatgccccagcctgctcctcaagcagctgcctatggtgcttatcctccaacatactctgcacaggcttatacacaacaaagctacccacagcctgcagcaattccagcagcaccagtaccagcacctacagcgccgtcagcttatcctcaacaacctgcggcagctcaaccttattatggcacaacctactactgataagtagagtagtcgtggatggtgatccgatgagcctgttaatctaccttttcgcatgtgtgtggttcctctgtactgccattgtttagctcgcctttagacgaatgctagcgacgagatgatcacttgagaacaaatatgagatttgtacaatcagcatttttgtcgctaggagttgccattgttttcatgc

SEQ ID NO: 110607 - protein, 230 aa, Zea mays subsp. mays
  misc_feature (1)..(230): Ceres Seq. ID no. 12384297
  misc_feature (8)..(215): Homolog of NCBI NO: 34904902 NR Description: similar to pre-mRNA processing protein
  misc_feature (8)..(215): Homolog of NCBI NO: 40253455 NR Description: unknown protein [Oryza sativa (japonica
  misc_feature (8)..(215): Homolog of NCBI NO: 30694946 NR Description: expressed protein [Arabidopsis thaliana]
  misc_feature (8)..(215): Homolog of NCBI NO: 10177721 NR Description: gene_id:MPL12.20~pir||T00964~strong similarity to
  misc_feature (3)..(226): Homolog of NCBI NO: 7485869 NR Description: hypothetical protein F20D22.14 - Arabidopsis
  misc_feature (3)..(226): Homolog of NCBI NO: 18379230 NR Description: expressed protein
MCNVWRIGSLDLANNALARATHVFVKKQPEIHLFSARFKELNGDISGARAEYQHLYSDLCPGFLEAIVKHSNMEHRLGDKELSCSVYEKAIAAEKGKEQSQLLPTLLIQYSRFLFLAIRDLEKAREILTVLHEQLNVTKTVLEAVIHLESIFPCEKRIDFLDSLVEKFVTPESSQGEVASLVDKEEISSIFLEFLDLFGDAKSIKKALTRHTTLFSCKRSILAIKETESR

SEQ ID NO: 110608 - protein, 158 aa, Zea mays subsp. mays
  misc_feature (1)..(158): Ceres Seq. ID no. 12384298
  misc_feature (1)..(143): Homolog of NCBI NO: 34904902 NR Description: similar to pre-mRNA processing protein
  misc_feature (1)..(143): Homolog of NCBI NO: 40253455 NR Description: unknown protein [Oryza sativa (japonica
  misc_feature (1)..(143): Homolog of NCBI NO: 30694946 NR Description: expressed protein [Arabidopsis thaliana]
  misc_feature (1)..(143): Homolog of NCBI NO: 10177721 NR Description: gene_id:MPL12.20~pir||T00964~strong similarity to
  misc_feature (1)..(154): Homolog of NCBI NO: 7485869 NR Description: hypothetical protein F20D22.14 - Arabidopsis
  misc_feature (1)..(154): Homolog of NCBI NO: 18379230 NR Description: expressed protein
MEHRLGDKELSCSVYEKAIAAEKGKEQSQLLPTLLIQYSRFLFLAIRDLEKAREILTVLHEQLNVTKTVLEAVIHLESIFPCEKRIDFLDSLVEKFVTPESSQGEVASLVDKEEISSIFLEFLDLFGDAKSIKKALTRHTTLFSCKRSILAIKETESR

SEQ ID NO: 110609 - protein, 131 aa, Zea mays subsp. mays
  misc_feature (1)..(131): Ceres Seq. ID no. 12384299
MTLLSQTGTNLLKLWLLSQPRELIQMLPILLFGLQLLKHLGNNGELLMHSRLHILHMELTTTAIKCPSLLLKQLPMVLILQHTLHRLIHNKATHSLQQFQQHQYQHLQRRQLILNNLRQLNLIMAQPTTDK

SEQ ID NO: 110610 - DNA, 1038 bp, Zea mays subsp. mays
  misc_feature (1)..(1038): Ceres Seq. ID no. 15180523
atctcccgctccctcgcaccactcgcgctcgacacgcaggcgacggtggcggcgatcaggcccggtatctcagcacggccgacagtcctaggctcgacggcggcgtcagcggctccccttcccgcctctagccagtggcctcgtgccctcggctccggtcctctgcacaccggccggagagcctgcatttctttatacgatgagctggagatttcctctattcggttcccagcatcagcaatcagatccaaatttccaggacattcctatgcagtcttggtaccctacctcggttgtaggtttgtcttcatctccagccacacctacctcttctagctccagtccacatcaaagagcttcaaataatctgcagtcttcatcccgtgggcaaccatctcctgctgaggctgcagagataattgctcatttgaaggacaagagtattgaggagttacagaggctattgaaagagaaagaggcatataatgcattctttaacacattcgatcaagtgaaaacccagaacaatgtgcgtggcgagcttagaaaggagacattgcaacttgcaagggaaaatttagaaaaggagcagcggattttggagcttgggaatcagtgcacaataattagaaccacacaactggctgctgctcacaccggcttactgatttggagaggcaaaaggatgatattatgaggtcctattcccctgctgcactactcgacaaactccaaacgtcgatggcaaagctggacgaggagtctgaggagctgcagcagaagttcctggcgaaggacatcgacttcccacacttcgtacagaagtacaagaagctccgcacggcttatcacaagcaggcgttgctccatctcgccggccagactgacataactccactgacatccggcctgcatcatgtcaactttgctgtattcctctgcttggccctgttttattgctgcagcttcttatagggcttgccaaacactttgcacgatttgttggatgataataaagctttcgtatgcttcatggtc

SEQ ID NO: 110611 - protein, 165 aa, Zea mays subsp. mays
  misc_feature (1)..(165): Ceres Seq. ID no. 15180524
  misc_feature (5)..(139): Homolog of NCBI NO: 25408498 NR Description: hypothetical protein At2g36680 [imported] -
  misc_feature (5)..(139): Homolog of NCBI NO: 30686871 NR Description: expressed protein [Arabidopsis thaliana]
  misc_feature (5)..(139): Homolog of NCBI NO: 30686868 NR Description: expressed protein [Arabidopsis thaliana]
  misc_feature (5)..(165): Homolog of NCBI NO: 15231750 NR Description: expressed protein [Arabidopsis thaliana]
MSWRFPLFGSQHQQSDPNFQDIPMQSWYPTSVVGLSSSPATPTSSSSSPHQRASNNLQSSSRGQPSPAEAAEIIAHLKDKSIEELQRLLKEKEAYNAFFNTFDQVKTQNNVRGELRKETLQLARENLEKEQRILELGNQCTIIRTTQLAAAHTGLLIWRGKRMIL

SEQ ID NO: 110612 - protein, 142 aa, Zea mays subsp. mays
  misc_feature (1)..(142): Ceres Seq. ID no. 15180525
  misc_feature (1)..(116): Homolog of NCBI NO: 25408498 NR Description: hypothetical protein At2g36680 [imported] -
  misc_feature (1)..(116): Homolog of NCBI NO: 30686871 NR Description: expressed protein [Arabidopsis thaliana]
  misc_feature (1)..(116): Homolog of NCBI NO: 30686868 NR Description: expressed protein [Arabidopsis thaliana]
  misc_feature (1)..(142): Homolog of NCBI NO: 15231750 NR Description: expressed protein [Arabidopsis thaliana]
MQSWYPTSVVGLSSSPATPTSSSSSPHQRASNNLQSSSRGQPSPAEAAEIIAHLKDKSIEELQRLLKEKEAYNAFFNTFDQVKTQNNVRGELRKETLQLARENLEKEQRILELGNQCTIIRTTQLAAAHTGLLIWRGKRMIL

SEQ ID NO: 110613 - protein, 111 aa, Zea mays subsp. mays
  misc_feature (1)..(111): Ceres Seq. ID no. 15180526
ISRSLAPLALDTQATVAAIRPGISARPTVLGSTAASAAPLPASSQWPRALGSGPLHTGRRACISLYDELEISSIRFPASAIRSKFPGHSYAVLVPYLGCRFVFISSHTYLF

SEQ ID NO: 110614 - DNA, 1576 bp, Zea mays subsp. mays
  misc_feature (1)..(1576): Ceres Seq. ID no. 15180133
  misc_feature: MA Experiment ID: 108542 Result: Up-regulated in Transcription
  misc_feature: MA Experiment 108542 PARAMETER Experiment Name: Zm_150mM_NaCl_P Parameter: Age (day) Value: 8
  misc_feature: MA Experiment 108542 PARAMETER Experiment Name: Zm_150mM_NaCl_P Parameter: Organism Value: Zea mays
  misc_feature: MA Experiment 108542 PARAMETER Experiment Name: Zm_150mM_NaCl_P Parameter: Plant Line Value: 35A19
  misc_feature: MA Experiment 108542 PARAMETER Experiment Name: Zm_150mM_NaCl_P Parameter: Timepoint (hr) Value: 6
  misc_feature: MA Experiment 108542 PARAMETER Experiment Name: Zm_150mM_NaCl_P Parameter: Tissue Value: Aerial
  misc_feature: MA Experiment 108542 PARAMETER Experiment Name: Zm_150mM_NaCl_P Parameter: Treatment Value: 150mM NaCl vs. No Treatment
  misc_feature: MA Experiment ID: 108544 Result: Down-regulated in Transcription
cgtcatgctctagccaggcatcccatagaagggaaccgtcggtagttagggaaggcaagaagaagattttggagagatggtctatggtatcgtcaacagtcagtagcgaggaggaaatggaaggtcgcagaagtacaggcacgcttggtgacatactcacaataccgaaagtcaaggaccaggaaggaattggggcggaaacactagggagcccagcacctgagctggaacctgaggagcctttctcatgcttgccaagatctcggtctcttccactttctctgtcccgtggagtcgctgagtctaatggaggagtagcctctggtagtactcaggaagctgaaagggagaggatcaggaagtcatcatcgtttaaggaaaaggtttcaagcctgttctctaaaaacaagaaaccagttagggagaaggcagatccatccgcgagcaatagacttaaggtctatggaggggctgaaactactgctgatgtgaagaagggcttgaaccgtcttgcgttagacaatcttcagaaacaaagtactagtcgtgtaaacacagacgagaagaagaacgctgcgcaaggactcgtcactagttcttgtggtactaatgatacagctaataccacccctgccaaggacaacattgcctccattccaagtcttggcgccccaggagtcctgggtgaccctcaggagcagcctagtcctgtatctgtgctagatggaccgtttattatacgtgataacagcaggaggctactgtactcatctccatccccacaggctttgtcgaggtctcccttgatcggatcgtttccacggtccctgtcagtgtcgcgggaggaccccccgctggaagccacgtcgtcactgaattccctgagactctggaggcttttctccaaggccgacgaggatctagactcgctgacgttcatccagaagctggtccgctcctgtggcatggaccgagcaagctgcgtgttggctggccctctggacccggacctgctcgagaaggtttcagagcaggaagacgactgaaccaggttcgggagaaggcggcttcttttcgacgccgtaaacgaagcgctcgccgagctcgcctggacggcggaactggccgcgtacccctggggcggcggcagatcacgcctggactgcaactgcaagaacggttccggtggtgactcggcggccgaggagatctggcgcgttatcaggaactggtcgacacttgacaagtaccctccctgcgtagctatcgaaggaaatgtcttgctggagatgatactcaggcgggaggcggacagcggcgagacggctcggttggaggtgtttggtctcggcgcctcggtctgcgtcgtggtgttggaggagctggttgaagagacggttgtggatctcctgactgactgctagtgagtgatacttgctgctgctgttaacactgctccgttaatccacccctcaagctggaatgggtctcttttgccttgttcacatctttgttttgaccggcatttgctctagccgttgactggtaatggatcatgccatttgtttcgctgttc

SEQ ID NO: 110615 - protein, 347 aa, Zea mays subsp. mays
  misc_feature (1)..(347): Ceres Seq. ID no. 15180134
  misc_feature (1)..(347): Homolog of NCBI NO: 18417262 NR Description: expressed protein [Arabidopsis thaliana]
  misc_feature (1)..(63): Homolog of NCBI NO: 32489512 NR Description: OSJNBa0043L24.3 [Oryza sativa (japonica
  misc_feature (84)..(347): Homolog of NCBI NO: 32489512 NR Description: OSJNBa0043L24.3 [Oryza sativa (japonica
SCSSQASHRREPSVVREGKKKILERWSMVSSTVSSEEEMEGRRSTGTLGDILTIPKVKDQEGIGAETLGSPAPELEPEEPFSCLPRSRSLPLSLSRGVAESNGGVASGSTQEAERERIRKSSSFKEKVSSLFSKNKKPVREKADPSASNRLKVYGGAETTADVKKGLNRLALDNLQKQSTSRVNTDEKKNAAQGLVTSSCGTNDTANTTPAKDNIASIPSLGAPGVLGDPQEQPSPVSVLDGPFIIRDNSRRLLYSSPSPQALSRSPLIGSFPRSLSVSREDPPLEATSSLNSLRLWRLFSKADEDLDSLTFIQKLVRSCGMDRASCVLAGPLDPDLLEKVSEQEDD

SEQ ID NO: 110616 - protein, 320 aa, Zea mays subsp. mays
  misc_feature (1)..(320): Ceres Seq. ID no. 15180135
  misc_feature (1)..(320): Homolog of NCBI NO: 18417262 NR Description: expressed protein [Arabidopsis thaliana]
  misc_feature (1)..(36): Homolog of NCBI NO: 32489512 NR Description: OSJNBa0043L24.3 [Oryza sativa (japonica
  misc_feature (57)..(320): Homolog of NCBI NO: 32489512 NR Description: OSJNBa0043L24.3 [Oryza sativa (japonica
MVSSTVSSEEEMEGRRSTGTLGDILTIPKVKDQEGIGAETLGSPAPELEPEEPFSCLPRSRSLPLSLSRGVAESNGGVASGSTQEAERERIRKSSSFKEKVSSLFSKNKKPVREKADPSASNRLKVYGGAETTADVKKGLNRLALDNLQKQSTSRVNTDEKKNAAQGLVTSSCGTNDTANTTPAKDNIASIPSLGAPGVLGDPQEQPSPVSVLDGPFIIRDNSRRLLYSSPSPQALSRSPLIGSFPRSLSVSREDPPLEATSSLNSLRLWRLFSKADEDLDSLTFIQKLVRSCGMDRASCVLAGPLDPDLLEKVSEQEDD

SEQ ID NO: 110617 - protein, 309 aa, Zea mays subsp. mays
  misc_feature (1)..(309): Ceres Seq. ID no. 15180136
  misc_feature (1)..(309): Homolog of NCBI NO: 18417262 NR Description: expressed protein [Arabidopsis thaliana]
  misc_feature (1)..(25): Homolog of NCBI NO: 32489512 NR Description: OSJNBa0043L24.3 [Oryza sativa (japonica
  misc_feature (46)..(309): Homolog of NCBI NO: 32489512 NR Description: OSJNBa0043L24.3 [Oryza sativa (japonica
MEGRRSTGTLGDILTIPKVKDQEGIGAETLGSPAPELEPEEPFSCLPRSRSLPLSLSRGVAESNGGVASGSTQEAERERIRKSSSFKEKVSSLFSKNKKPVREKADPSASNRLKVYGGAETTADVKKGLNRLALDNLQKQSTSRVNTDEKKNAAQGLVTSSCGTNDTANTTPAKDNIASIPSLGAPGVLGDPQEQPSPVSVLDGPFIIRDNSRRLLYSSPSPQALSRSPLIGSFPRSLSVSREDPPLEATSSLNSLRLWRLFSKADEDLDSLTFIQKLVRSCGMDRASCVLAGPLDPDLLEKVSEQEDD

SEQ ID NO: 110618 - DNA, 915 bp, Zea mays subsp. mays
  misc_feature (1)..(915): Ceres Seq. ID no. 15180533
  misc_feature: MA Experiment ID: 108535 Result: Down-regulated in Transcription
  misc_feature: MA Experiment 108535 PARAMETER Experiment Name: Zm_Meristem_P Parameter: Age (day) Value: 8
  misc_feature: MA Experiment 108535 PARAMETER Experiment Name: Zm_Meristem_P Parameter: Organism Value: Zea mays
  misc_feature: MA Experiment 108535 PARAMETER Experiment Name: Zm_Meristem_P Parameter: Plant Line Value: 35A19
  misc_feature: MA Experiment 108535 PARAMETER Experiment Name: Zm_Meristem_P Parameter: Tissue Value: Root Meristem vs. Above Root Meristem
aaaaacggaggcaaggcgcaggcgcgtgcaaaactccgaactcctccatcgcgtgcgcgcttctctctctcttgagcgtctccttgccatggccgcctcgcgagaccacctcggtggcgacccgccggagtcgacgcagctgcgcctcggagacgacatcgcgtggtcggagatcaacggcgtgtacgaccgcgacgactcgctcaaggagaacaccaaccccaagtgcgtcctcaagagccagcaccccggcgccgccgggtcctcgcagaggttctcgggcaacctgaagcccacggcggcgcccatcatcgggctttccgggaagctcggcgcgtgcgcgcgggggcaccgccaccgcccgcccgccatgtttcctgggaaggccaggcccggcggcgggcgcgcgtccaaggcggccgtcccggaccccgggtcgcccaaggtgtcctgcatcgggaaggtcctctcggaccacgagcgagcgcgcgcgcgcctcggcgtcggccgcggctccggggcgcctgggtgctgcggcttcttcatgcagcgcagccggagccggtccaggcacagcgccgtcgagtgcgtcgaccagtccccgccgccgcccgaggaggctgcagcggcgaggtccgcggaggaggcgacggcgccaccgccggggctgggaggtgtgcggcggtttgcgtcggggaggcgagcggcggagtgggcggccaaggtggaggacgacgggcgcgtggcgagatctgggccgttgtagcaccatgcaggcagaggcagcggtggttgaggtgtggctttcggtttggttgcgcccgtgctttagttgtagttgagcactcgagctgtgtacatacgtgcttctgttcaaatccgtagaaatttaatgcttgggttcacaaattttgc

SEQ ID NO: 110619 - protein, 254 aa, Zea mays subsp. mays
  misc_feature (1)..(254): Ceres Seq. ID no. 15180534
  misc_feature (41)..(163): Homolog of NCBI NO: 21537164 NR Description: unknown [Arabidopsis thaliana]
  misc_feature (41)..(163): Homolog of NCBI NO: 18404079 NR Description: expressed protein [Arabidopsis thaliana]
  misc_feature (41)..(249): Homolog of NCBI NO: 38346320 NR Description: OJ000126_13.2 [Oryza sativa (japonica
  misc_feature (41)..(238): Homolog of NCBI NO: 34908494 NR Description: P0489B03.23 [Oryza sativa (japonica
KTEARRRRVQNSELLHRVRASLSLERLLAMAASRDHLGGDPPESTQLRLGDDIAWSEINGVYDRDDSLKENTNPKCVLKSQHPGAAGSSQRFSGNLKPTAAPIIGLSGKLGACARGHRHRPPAMFPGKARPGGGRASKAAVPDPGSPKVSCIGKVLSDHERARARLGVGRGSGAPGCCGFFMQRSRSRSRHSAVECVDQSPPPPEEAAAARSAEEATAPPPGLGGVRRFASGRRAAEWAAKVEDDGRVARSGPL

SEQ ID NO: 110620 - protein, 225 aa, Zea mays subsp. mays
  misc_feature (1)..(225): Ceres Seq. ID no. 15180535
  misc_feature (12)..(134): Homolog of NCBI NO: 21537164 NR Description: unknown [Arabidopsis thaliana]
  misc_feature (12)..(134): Homolog of NCBI NO: 18404079 NR Description: expressed protein [Arabidopsis thaliana]
  misc_feature (12)..(220): Homolog of NCBI NO: 38346320 NR Description: OJ000126_13.2 [Oryza sativa (japonica
  misc_feature (12)..(209): Homolog of NCBI NO: 34908494 NR Description: P0489B03.23 [Oryza sativa (japonica
MAASRDHLGGDPPESTQLRLGDDIAWSEINGVYDRDDSLKENTNPKCVLKSQHPGAAGSSQRFSGNLKPTAAPIIGLSGKLGACARGHRHRPPAMFPGKARPGGGRASKAAVPDPGSPKVSCIGKVLSDHERARARLGVGRGSGAPGCCGFFMQRSRSRSRHSAVECVDQSPPPPEEAAAARSAEEATAPPPGLGGVRRFASGRRAAEWAAKVEDDGRVARSGPL

SEQ ID NO: 110621 - protein, 131 aa, Zea mays subsp. mays
  misc_feature (1)..(131): Ceres Seq. ID no. 15180536
  misc_feature (1)..(40): Homolog of NCBI NO: 21537164 NR Description: unknown [Arabidopsis thaliana]
  misc_feature (1)..(40): Homolog of NCBI NO: 18404079 NR Description: expressed protein [Arabidopsis thaliana]
  misc_feature (1)..(126): Homolog of NCBI NO: 38346320 NR Description: OJ000126_13.2 [Oryza sativa (japonica
  misc_feature (1)..(115): Homolog of NCBI NO: 34908494 NR Description: P0489B03.23 [Oryza sativa (japonica
MFPGKARPGGGRASKAAVPDPGSPKVSCIGKVLSDHERARARLGVGRGSGAPGCCGFFMQRSRSRSRHSAVECVDQSPPPPEEAAAARSAEEATAPPPGLGGVRRFASGRRAAEWAAKVEDDGRVARSGPL

SEQ ID NO: 110622 - DNA, 1115 bp, Zea mays subsp. mays
  misc_feature (1)..(1115): Ceres Seq. ID no. 14305286
  misc_feature: MA Experiment ID: 108527 Result: Down-regulated in Transcription
  misc_feature: MA Experiment 108527 PARAMETER Experiment Name: Zm_5mM_NO_P Parameter: Age (day) Value: 8
  misc_feature: MA Experiment 108527 PARAMETER Experiment Name: Zm_5mM_NO_P Parameter: Organism Value: Zea mays
  misc_feature: MA Experiment 108527 PARAMETER Experiment Name: Zm_5mM_NO_P Parameter: Plant Line Value: 35A19
  misc_feature: MA Experiment 108527 PARAMETER Experiment Name: Zm_5mM_NO_P Parameter: Timepoint (hr) Value: 6
  misc_feature: MA Experiment 108527 PARAMETER Experiment Name: Zm_5mM_NO_P Parameter: Tissue Value: Aerial
  misc_feature: MA Experiment 108527 PARAMETER Experiment Name: Zm_5mM_NO_P Parameter: Treatment Value: 5mM NO vs. No Treatment
  misc_feature: MA Experiment ID: 108528 Result: Up-regulated in Transcription
  misc_feature: MA Experiment 108528 PARAMETER Experiment Name: Zm_Imbibed_Seeds_P Parameter: Age (day) Value: 5 vs. 2
  misc_feature: MA Experiment 108528 PARAMETER Experiment Name: Zm_Imbibed_Seeds_P Parameter: Organism Value: Zea mays
  misc_feature: MA Experiment 108528 PARAMETER Experiment Name: Zm_Imbibed_Seeds_P Parameter: Plant Line Value: 35A19
  misc_feature: MA Experiment 108528 PARAMETER Experiment Name: Zm_Imbibed_Seeds_P Parameter: Tissue Value: Aerial vs. Embryo
  misc_feature: MA Experiment ID: 108530 Result: Up-regulated in Transcription
  misc_feature: MA Experiment 108530 PARAMETER Experiment Name: Zm_Imbibed_Seeds_P Parameter: Age (day) Value: 6 vs. 2
  misc_feature: MA Experiment 108530 PARAMETER Experiment Name: Zm_Imbibed_Seeds_P Parameter: Organism Value: Zea mays
  misc_feature: MA Experiment 108530 PARAMETER Experiment Name: Zm_Imbibed_Seeds_P Parameter: Plant Line Value: 35A19
  misc_feature: MA Experiment 108530 PARAMETER Experiment Name: Zm_Imbibed_Seeds_P Parameter: Tissue Value: Aerial vs. Embryo
  misc_feature: MA Experiment ID: 108536 Result: Down-regulated in Transcription
  misc_feature: MA Experiment 108536 PARAMETER Experiment Name: Zm_Meristem_P Parameter: Age (day) Value: 8
  misc_feature: MA Experiment 108536 PARAMETER Experiment Name: Zm_Meristem_P Parameter: Organism Value: Zea mays
  misc_feature: MA Experiment 108536 PARAMETER Experiment Name: Zm_Meristem_P Parameter: Plant Line Value: 35A19
  misc_feature: MA Experiment 108536 PARAMETER Experiment Name: Zm_Meristem_P Parameter: Tissue Value: Shoot Meristem vs. Above Shoot Meristem
  misc_feature: MA Experiment ID: 108547 Result: Up-regulated in Transcription
  misc_feature: MA Experiment 108547 PARAMETER Experiment Name: Zm_Imbibed_Seeds_P Parameter: Age (day) Value: 4 vs. 2
  misc_feature: MA Experiment 108547 PARAMETER Experiment Name: Zm_Imbibed_Seeds_P Parameter: Organism Value: Zea mays
  misc_feature: MA Experiment 108547 PARAMETER Experiment Name: Zm_Imbibed_Seeds_P Parameter: Plant Line Value: 35A19
  misc_feature: MA Experiment 108547 PARAMETER Experiment Name: Zm_Imbibed_Seeds_P Parameter: Tissue Value: Aerial vs. Embryo
  misc_feature: MA Experiment ID: 20000626 Result: Down-regulated in Transcription
  misc_feature: MA Experiment 20000626 PARAMETER Experiment Name: Zm_Herbicide-Treatments_P Parameter: Timepoint (hr) Value: 12
  misc_feature: MA Experiment 20000626 PARAMETER Experiment Name: Zm_Herbicide-Treatments_P Parameter: Tissue Value: Aerial
  misc_feature: MA Experiment 20000626 PARAMETER Experiment Name: Zm_Herbicide-Treatments_P Parameter: Treatment Value: Roundup vs. No Treatment
  misc_feature: MA Experiment ID: 20000630 Result: Down-regulated in Transcription
  misc_feature: MA Experiment 20000630 PARAMETER Experiment Name: Zm_Herbicide-Treatments_P Parameter: Timepoint (hr) Value: 4
  misc_feature: MA Experiment 20000630 PARAMETER Experiment Name: Zm_Herbicide-Treatments_P Parameter: Tissue Value: Aerial
  misc_feature: MA Experiment 20000630 PARAMETER Experiment Name: Zm_Herbicide-Treatments_P Parameter: Treatment Value: Roundup vs. No Treatment
aactcctcgctatcctcttccaatccgaaccacccggactcccggagcaagcggccgccggctaagcagacacgaacgcaggtccggcggcaatgcaacgcgccgcgctcgtcgggtcccctctcgtacccgcgggtccccttgctcagcttgccgtgcggcgccgctgccgcttccatggtggtgttcgcgtgaggtcctcaaccgggaaggacgggaccgggaccgggggcggaagcgagggcggcgagggcgccggtgccgcagcgtcttggctgagctcggcggtcggggagaaagtggacgagcttctgcgccgcgaagagaaccgggccctgctcgagggcgtcgaggacgccgagcgccgcgttgagcgcgcgcgcgccgcgctcgccgacatcgagcgccaggaggccgccgcacgcctcgcccgcgaggaggtccgccgcctcgagaagcggcgcgatgagattgcagagtcccagcgggaattgcttcaagcaagagaaatgattgatgaagctcagcgatccctgtcttctagtcttgaggaaggaagctttggagatatgtcaagtggtgatgttgatgaagataacgagagaatagaatccgtaaaagctgctgcagtttcctctgtcgtcggtgttctggctagtttgcccatatctttctatgaagttgaagatcttccacaactattccttcggtcatcaattgttttcataagttgtgctttgtttggagtcacattccggtatgctgttagaagagatctggataatatccaactaaaaactggggctcctgctgcatttgcttttgttagaggccttgctctgctggaatctggtagaaccctcgagctgagtaatgataccttagtatcagttactcttgatgctgcagtcagtgtggttgagaacattttcatatttctgcctgctgctgttgcactggactactgttttaagatgagatttttgagtccctttcctagaagaaaacaatagcttctgtgaagaatatgtatgatcaatagcaatcttgatagctcaaatggtcatatgtaacacaagtgatatcttagattcattaaaaaaacatttcccccc

SEQ ID NO: 110623 - protein, 306 aa, Zea mays subsp. mays
  misc_feature (1)..(306): Ceres Seq. ID no. 14305287
  misc_feature (33)..(302): Homolog of NCBI NO: 7487177 NR Description: hypothetical protein T19F6.80 - Arabidopsis
  misc_feature (33)..(302): Homolog of NCBI NO: 28393641 NR Description: unknown protein [Arabidopsis thaliana]
  misc_feature (33)..(302): Homolog of NCBI NO: 30686406 NR Description: expressed protein [Arabidopsis thaliana]
MQRAALVGSPLVPAGPLAQLAVRRRCRFHGGVRVRSSTGKDGTGTGGGSEGGEGAGAAASWLSSAVGEKVDELLRREENRALLEGVEDAERRVERARAALADIERQEAAARLAREEVRRLEKRRDEIAESQRELLQAREMIDEAQRSLSSSLEEGSFGDMSSGDVDEDNERIESVKAAAVSSVVGVLASLPISFYEVEDLPQLFLRSSIVFISCALFGVTFRYAVRRDLDNIQLKTGAPAAFAFVRGLALLESGRTLELSNDTLVSVTLDAAVSVVENIFIFLPAAVALDYCFKMRFLSPFPRRKQ

SEQ ID NO: 110624 - protein, 167 aa, Zea mays subsp. mays
  misc_feature (1)..(167): Ceres Seq. ID no. 14305288
  misc_feature (1)..(163): Homolog of NCBI NO: 7487177 NR Description: hypothetical protein T19F6.80 - Arabidopsis
  misc_feature (1)..(163): Homolog of NCBI NO: 28393641 NR Description: unknown protein [Arabidopsis thaliana]
  misc_feature (1)..(163): Homolog of NCBI NO: 30686406 NR Description: expressed protein [Arabidopsis thaliana]
MIDEAQRSLSSSLEEGSFGDMSSGDVDEDNERIESVKAAAVSSVVGVLASLPISFYEVEDLPQLFLRSSIVFISCALFGVTFRYAVRRDLDNIQLKTGAPAAFAFVRGLALLESGRTLELSNDTLVSVTLDAAVSVVENIFIFLPAAVALDYCFKMRFLSPFPRRKQ

SEQ ID NO: 110625 - DNA, 1100 bp, Zea mays subsp. mays
  misc_feature (1)..(1100): Ceres Seq. ID no. 13622448
tatgggttggcaactgccgggctcatctctagagggcagtgcaaaagtttcaggttggaaaccaccagtcttatcacttgaagggattgctaatggttcaggttcacaagcatcgtgtccttctacgcaaaggggcacaaaatcttcaggttggcagcgatcaagttcatccccggatgggagcagaaaagcctcaggttggcaacagtcaagtacatcaccagaggggagtggaaaagcgcatggctggcaacgatcaggatcttttacccaggggggtacaaaggctgcaggtcggcaaccctctcgttcctgtacagatcggattgcaaaagttgatggctggcaacgaacaagttcatctccggagggaagcagaaaagcttcaggctggcattcgtcgggtcgtgacagctcaaagatcgcatccagtgccagcgaaaaccgtaaattgtcttctagtcaccaagcgacgacaccaacagggaggcactcgttggcaaagagacagggaagcagcgacaagggtgctgctggttgggacgaggctctggggaactcttcggaagcatcgaagagacaacagggaaacagcgacaagaatgcaggctcgggagtggctctcggaagcaacaggagctggcatccatcgtctggtaaccctagtcggggcggccaggggaatcaccaacatgacagggactctcacagcggtgattcgcggcggggtagctcgaactacccccggaggtccgacaatcgtcatgaccatggcagtggtggttcgtcacgaccctcgtcaagagggcagtcccagagggggctatgtaaacactacgagagtggccactgcgggaagggttcgaaatgccagtacctgcaccggtgatcgccgtggccgtgtggaagcgggacccctgtttgcctggccgtcctcacatttttgtatagcaggatgtggtttcgtcgtagtcagtatagtagaacgcttattaaccgtgtcggcaccactaagttggtagtagtacatatctttcagggcaggagcatgactaaagtaggatttgtaagttttattagagccactgatggccttgggc

SEQ ID NO: 110626 - protein, 309 aa, Zea mays subsp. mays
  misc_feature (1)..(309): Ceres Seq. ID no. 13622449
  misc_feature (157)..(264): Homolog of NCBI NO: 4768970 NR Description: unknown [Oryza sativa]
MVQVHKHRVLLRKGAQNLQVGSDQVHPRMGAEKPQVGNSQVHHQRGVEKRMAGNDQDLLPRGVQRLQVGNPLVPVQIGLQKLMAGNEQVHLRREAEKLQAGIRRVVTAQRSHPVPAKTVNCLLVTKRRHQQGGTRWQRDREAATRVLLVGTRLWGTLRKHRRDNRETATRMQAREWLSEATGAGIHRLVTLVGAARGITNMTGTLTAVIRGGVARTTPGGPTIVMTMAVVVRHDPRQEGSPRGGYVNTTRVATAGRVRNASTCTGDRRGRVEAGPLFAWPSSHFCIAGCGFVVVSIVERLLTVSAPLSW

SEQ ID NO: 110627 - protein, 295 aa, Zea mays subsp. mays
  misc_feature (1)..(295): Ceres Seq. ID no. 13622450
  misc_feature (4)..(273): Pfam Name: High molecular weight glutenin subunit Pfam Description: High molecular weight glutenin subunit
  misc_feature (8)..(271): Homolog of NCBI NO: 28828184 NR Description: similar to Leishmania major. Ppg3 [Dictyostelium
  misc_feature (31)..(289): Homolog of NCBI NO: 37546838 NR Description: similar to hornerin [Homo sapiens]
  misc_feature (5)..(271): Homolog of NCBI NO: 28828184 NR Description: similar to Leishmania major. Ppg3 [Dictyostelium
  misc_feature (31)..(288): Homolog of NCBI NO: 37546838 NR Description: similar to hornerin [Homo sapiens]
  misc_feature (8)..(271): Homolog of NCBI NO: 28828184 NR Description: similar to Leishmania major. Ppg3 [Dictyostelium
  misc_feature (8)..(274): Homolog of NCBI NO: 28828184 NR Description: similar to Leishmania major. Ppg3 [Dictyostelium
  misc_feature (23)..(294): Homolog of NCBI NO: 28828352 NR Description: similar to Dictyostelium discoideum (Slime mold).
  misc_feature (30)..(264): Homolog of NCBI NO: 1710805 NR Description: Protein rtoA (Ratio-A)
  misc_feature (32)..(294): Homolog of NCBI NO: 1710805 NR Description: Protein rtoA (Ratio-A)
  misc_feature (7)..(264): Homolog of NCBI NO: 28828352 NR Description: similar to Dictyostelium discoideum (Slime mold).
MGWQLPGSSLEGSAKVSGWKPPVLSLEGIANGSGSQASCPSTQRGTKSSGWQRSSSSPDGSRKASGWQQSSTSPEGSGKAHGWQRSGSFTQGGTKAAGRQPSRSCTDRIAKVDGWQRTSSSPEGSRKASGWHSSGRDSSKIASSASENRKLSSSHQATTPTGRHSLAKRQGSSDKGAAGWDEALGNSSEASKRQQGNSDKNAGSGVALGSNRSWHPSSGNPSRGGQGNHQHDRDSHSGDSRRGSSNYPRRSDNRHDHGSGGSSRPSSRGQSQRGLCKHYESGHCGKGSKCQYLHR

SEQ ID NO: 110628 - protein, 281 aa, Zea mays subsp. mays
  misc_feature (1)..(281): Ceres Seq. ID no. 13622451
  misc_feature (129)..(236): Homolog of NCBI NO: 4768970 NR Description: unknown [Oryza sativa]
MGAEKPQVGNSQVHHQRGVEKRMAGNDQDLLPRGVQRLQVGNPLVPVQIGLQKLMAGNEQVHLRREAEKLQAGIRRVVTAQRSHPVPAKTVNCLLVTKRRHQQGGTRWQRDREAATRVLLVGTRLWGTLRKHRRDNRETATRMQAREWLSEATGAGIHRLVTLVGAARGITNMTGTLTAVIRGGVARTTPGGPTIVMTMAVVVRHDPRQEGSPRGGYVNTTRVATAGRVRNASTCTGDRRGRVEAGPLFAWPSSHFCIAGCGFVVVSIVERLLTVSAPLSW

SEQ ID NO: 110629 - DNA, 671 bp, Zea mays subsp. mays
  misc_feature (1)..(671): Ceres Seq. ID no. 14305267
  misc_feature: MA Experiment ID: 108523 Result: Down-regulated in Transcription
  misc_feature: MA Experiment 108523 PARAMETER Experiment Name: Zm_42deg_Heat_P Parameter: Age (day) Value: 8
  misc_feature: MA Experiment 108523 PARAMETER Experiment Name: Zm_42deg_Heat_P Parameter: Organism Value: Zea mays
  misc_feature: MA Experiment 108523 PARAMETER Experiment Name: Zm_42deg_Heat_P Parameter: Plant Line Value: 35A19
  misc_feature: MA Experiment 108523 PARAMETER Experiment Name: Zm_42deg_Heat_P Parameter: Temperature (deg C) Value: 42 vs. 22
  misc_feature: MA Experiment 108523 PARAMETER Experiment Name: Zm_42deg_Heat_P Parameter: Timepoint (hr) Value: 6
  misc_feature: MA Experiment 108523 PARAMETER Experiment Name: Zm_42deg_Heat_P Parameter: Tissue Value: Aerial
  misc_feature: MA Experiment ID: 108528 Result: Up-regulated in Transcription
  misc_feature: MA Experiment 108528 PARAMETER Experiment Name: Zm_Imbibed_Seeds_P Parameter: Age (day) Value: 5 vs. 2
  misc_feature: MA Experiment 108528 PARAMETER Experiment Name: Zm_Imbibed_Seeds_P Parameter: Organism Value: Zea mays
  misc_feature: MA Experiment 108528 PARAMETER Experiment Name: Zm_Imbibed_Seeds_P Parameter: Plant Line Value: 35A19
  misc_feature: MA Experiment 108528 PARAMETER Experiment Name: Zm_Imbibed_Seeds_P Parameter: Tissue Value: Aerial vs. Embryo
  misc_feature: MA Experiment ID: 108530 Result: Up-regulated in Transcription
  misc_feature: MA Experiment 108530 PARAMETER Experiment Name: Zm_Imbibed_Seeds_P Parameter: Age (day) Value: 6 vs. 2
  misc_feature: MA Experiment 108530 PARAMETER Experiment Name: Zm_Imbibed_Seeds_P Parameter: Organism Value: Zea mays
  misc_feature: MA Experiment 108530 PARAMETER Experiment Name: Zm_Imbibed_Seeds_P Parameter: Plant Line Value: 35A19
  misc_feature: MA Experiment 108530 PARAMETER Experiment Name: Zm_Imbibed_Seeds_P Parameter: Tissue Value: Aerial vs. Embryo
  misc_feature: MA Experiment ID: 108536 Result: Down-regulated in Transcription
  misc_feature: MA Experiment 108536 PARAMETER Experiment Name: Zm_Meristem_P Parameter: Age (day) Value: 8
  misc_feature: MA Experiment 108536 PARAMETER Experiment Name: Zm_Meristem_P Parameter: Organism Value: Zea mays
  misc_feature: MA Experiment 108536 PARAMETER Experiment Name: Zm_Meristem_P Parameter: Plant Line Value: 35A19
  misc_feature: MA Experiment 108536 PARAMETER Experiment Name: Zm_Meristem_P Parameter: Tissue Value: Shoot Meristem vs. Above Shoot Meristem
  misc_feature: MA Experiment ID: 108544 Result: Up-regulated in Transcription
  misc_feature: MA Experiment ID: 108545 Result: Up-regulated in Transcription
  misc_feature: MA Experiment 108545 PARAMETER Experiment Name: Zm_Imbibed_Seeds_P Parameter: Age (day) Value: 3 vs. 2
  misc_feature: MA Experiment 108545 PARAMETER Experiment Name: Zm_Imbibed_Seeds_P Parameter: Organism Value: Zea mays
  misc_feature: MA Experiment 108545 PARAMETER Experiment Name: Zm_Imbibed_Seeds_P Parameter: Plant Line Value: 35A19
  misc_feature: MA Experiment 108545 PARAMETER Experiment Name: Zm_Imbibed_Seeds_P Parameter: Tissue Value: Aerial vs. Embryo
  misc_feature: MA Experiment ID: 108547 Result: Up-regulated in Transcription
  misc_feature: MA Experiment 108547 PARAMETER Experiment Name: Zm_Imbibed_Seeds_P Parameter: Age (day) Value: 4 vs. 2
  misc_feature: MA Experiment 108547 PARAMETER Experiment Name: Zm_Imbibed_Seeds_P Parameter: Organism Value: Zea mays
  misc_feature: MA Experiment 108547 PARAMETER Experiment Name: Zm_Imbibed_Seeds_P Parameter: Plant Line Value: 35A19
  misc_feature: MA Experiment 108547 PARAMETER Experiment Name: Zm_Imbibed_Seeds_P Parameter: Tissue Value: Aerial vs. Embryo
  misc_feature: MA Experiment ID: 108559 Result: Down-regulated in Transcription
  misc_feature: MA Experiment 108559 PARAMETER Experiment Name: Zm_5mM_NO_P Parameter: Age (day) Value: 8
  misc_feature: MA Experiment 108559 PARAMETER Experiment Name: Zm_5mM_NO_P Parameter: Organism Value: Zea mays
  misc_feature: MA Experiment 108559 PARAMETER Experiment Name: Zm_5mM_NO_P Parameter: Plant Line Value: 35A19
  misc_feature: MA Experiment 108559 PARAMETER Experiment Name: Zm_5mM_NO_P Parameter: Timepoint (hr) Value: 12
  misc_feature: MA Experiment 108559 PARAMETER Experiment Name: Zm_5mM_NO_P Parameter: Tissue Value: Aerial
  misc_feature: MA Experiment 108559 PARAMETER Experiment Name: Zm_5mM_NO_P Parameter: Treatment Value: 5mM NO vs. No Treatment
  misc_feature: MA Experiment ID: 108687 Result: Down-regulated in Transcription
  misc_feature: MA Experiment 108687 PARAMETER Experiment Name: Zm_Embryos-Flowers__P Parameter: Tissue Value: Embryo vs. Aerial+
  misc_feature: MA Experiment ID: 108688 Result: Down-regulated in Transcription
  misc_feature: MA Experiment 108688 PARAMETER Experiment Name: Zm_Embryos-Flowers__P Parameter: Tissue Value: Immature Flowers vs. Aerial+
  misc_feature: MA Experiment ID: 108689 Result: Up-regulated in Transcription
  misc_feature: MA Experiment 108689 PARAMETER Experiment Name: Zm_Drought_Roots_P Parameter: Age (day) Value: 9
  misc_feature: MA Experiment 108689 PARAMETER Experiment Name: Zm_Drought_Roots_P Parameter: Organism Value: Zea mays
  misc_feature: MA Experiment 108689 PARAMETER Experiment Name: Zm_Drought_Roots_P Parameter: Plant Line Value: 35A19
  misc_feature: MA Experiment 108689 PARAMETER Experiment Name: Zm_Drought_Roots_P Parameter: Timepoint (hr) Value: 24
  misc_feature: MA Experiment 108689 PARAMETER Experiment Name: Zm_Drought_Roots_P Parameter: Tissue Value: Roots
  misc_feature: MA Experiment 108689 PARAMETER Experiment Name: Zm_Drought_Roots_P Parameter: Treatment Value: Drought vs. No Drought
  misc_feature: MA Experiment ID: 20000477 Result: Down-regulated in Transcription
  misc_feature: MA Experiment 20000477 PARAMETER Experiment Name: Zm_5mM_SA_P Parameter: Age (day) Value: 10
  misc_feature: MA Experiment 20000477 PARAMETER Experiment Name: Zm_5mM_SA_P Parameter: Organism Value: Zea mays
  misc_feature: MA Experiment 20000477 PARAMETER Experiment Name: Zm_5mM_SA_P Parameter: Plant Line Value: 35A19
  misc_feature: MA Experiment 20000477 PARAMETER Experiment Name: Zm_5mM_SA_P Parameter: Timepoint (hr) Value: 48
  misc_feature: MA Experiment 20000477 PARAMETER Experiment Name: Zm_5mM_SA_P Parameter: Tissue Value: Aerial
  misc_feature: MA Experiment 20000477 PARAMETER Experiment Name: Zm_5mM_SA_P Parameter: Treatment Value: 5mM SA vs. No Treatment
acgttgcttgctcccaagatcaagcgcctcccgcctccagcactctaactcaggggacacgatcgccatggccgccacatcgaccgccgccgccgtgctgtccccgccgtccgtggccgggctccgcctggcgccgtctcccggccgggcgcgcgtgtcgttccgcgcggcgccggcgccggcgcggcggtccgtggcggcgcgcgcggagctgagctcggcgctggtgatcagcctgagcacgggcgtgtcgctcttcctgggccgcttcgtcttcttcaacttccagcgggagaacgtggcgaagcaggtgcccgcgcagaacggcaagacgcacttcgacgccggcgacgagcgcgccaaggagttcgcggccctgctcaagtccaacgaccccgtgggcttcaacctcgtcgacgtcctcgcctggggctcgctcggccacatcgtcgcctactacatcctcgccacctccagcaacggatacgaccccaacttcttctgagcggtcgtcgaggatgtattctacagacagccgtgtgcgtgcgtgtgtgcttgtcatgtatccgatcaaagtttggttaatttggacaagtagtgcaactgcagaataattggtatttgtatagtgcaccatgccaacatgaatttgatctgtctctgtcttcact

SEQ ID NO: 110630 - protein, 167 aa, Zea mays subsp. mays
  misc_feature (1)..(167): Ceres Seq. ID no. 14305268
  misc_feature (70)..(164): Pfam Name: Photosystem I psaG / psaK Pfam Description: Photosystem I psaG / psaK
  misc_feature (27)..(167): Homolog of NCBI NO: 15222757 NR Description: photosystem I subunit V precursor -related
  misc_feature (37)..(167): Homolog of NCBI NO: 131194 NR Description: Photosystem I reaction center subunit V,
  misc_feature (70)..(107): Homolog of NCBI NO: 131193 NR Description: Photosystem I reaction center subunit V (PSI-G)
  misc_feature (72)..(163): Homolog of NCBI NO: 17369611 NR Description: Photosystem I reaction center subunit V,
  misc_feature (43)..(159): Homolog of NCBI NO: 131191 NR Description: Photosystem I reaction center subunit V, precursor (PSI-G) (Light-harvesting complex I 10 kDa protein)
  misc_feature (56)..(155): Homolog of NCBI NO: 12831160 NR Description: PsaG-like protein [Dunaliella salina]
  misc_feature (25)..(167): Homolog of NCBI NO: 131192 NR Description: Photosystem I reaction center subunit V,
RCLLPRSSASRLQHSNSGDTIAMAATSTAAAVLSPPSVAGLRLAPSPGRARVSFRAAPAPARRSVAARAELSSALVISLSTGVSLFLGRFVFFNFQRENVAKQVPAQNGKTHFDAGDERAKEFAALLKSNDPVGFNLVDVLAWGSLGHIVAYYILATSSNGYDPNFF

SEQ ID NO: 110631 - protein, 145 aa, Zea mays subsp. mays
  misc_feature (1)..(145): Ceres Seq. ID no. 14305269
  misc_feature (48)..(142): Pfam Name: Photosystem I psaG / psaK Pfam Description: Photosystem I psaG / psaK
  misc_feature (34)..(133): Homolog of NCBI NO: 12831160 NR Description: PsaG-like protein [Dunaliella salina]
  misc_feature (48)..(85): Homolog of NCBI NO: 131193 NR Description: Photosystem I reaction center subunit V (PSI-G)
  misc_feature (21)..(137): Homolog of NCBI NO: 131191 NR Description: Photosystem I reaction center subunit V, precursor (PSI-G) (Light-harvesting complex I 10 kDa protein)
  misc_feature (50)..(141): Homolog of NCBI NO: 17369611 NR Description: Photosystem I reaction center subunit V,
  misc_feature (5)..(145): Homolog of NCBI NO: 15222757 NR Description: photosystem I subunit V precursor -related
  misc_feature (15)..(145): Homolog of NCBI NO: 131194 NR Description: Photosystem I reaction center subunit V,
  misc_feature (3)..(145): Homolog of NCBI NO: 131192 NR Description: Photosystem I reaction center subunit V,
MAATSTAAAVLSPPSVAGLRLAPSPGRARVSFRAAPAPARRSVAARAELSSALVISLSTGVSLFLGRFVFFNFQRENVAKQVPAQNGKTHFDAGDERAKEFAALLKSNDPVGFNLVDVLAWGSLGHIVAYYILATSSNGYDPNFF

SEQ ID NO: 110632 - DNA, 977 bp, Zea mays subsp. mays
  misc_feature (1)..(977): Ceres Seq. ID no. 14305255
caaacactttgccgcaccgcgaccactccgcttggcgcccggcgccagccagccagccatgttcacggacggcatgtcgaggctggcggtggcggtgagcgtcacggtggccctcagcctggccatcttcctcaccatcctggcgctcctcctcgcggacctaatctgcgcgcacctccggcgccggcggctccgcgccgaggcgccccggtcgaagctgggcctcggcctgtcgctggcggcttcgtcaccggcgcgcgccgacggcgcgtcgtcgtcggccacgacggcgctcgccggtacgccgccctcctactacgcgcacggcgtcctgcacgcgccctgcaccaaggacctcctcctcgccatccccaggctggagggcgccgtgtggcggtggtcgccgccgacgccgtcgtcgggctcgtcggggggcggctcctcggcgggcggcgacgggttcatgtgcatctccaacccggtgtacgaccgggccgcggccgcccccggcggggacacgccgctcgggatcacggaggaggcggacgcgtacgggtacggcgaggaggacgcccgcgggttctcgccgccgctgtcggcgatgaggaagctaccgccgctgggtgtcctggccgcgtaccccccaccgccgcggccgagcttcaccgatgccatgccgacaatggcagcaccggtgaccgacaccaaccgggcctcctcctcttcgtccgcctactttttctcttcgtggtcgtccaagtaagagatcacctgtgacgtacgcggattgtagtgagatggaggtggtcagcagcttcgatttcattcattattttggccgttttttcctcgttctgtcatatcattgtcatctacggagtacggagtagtaccatcgcctcggtcctgctagctcctcctgcacactccatgtcctacgactacgataaccgaagcttttgcttggtgttttatcc

SEQ ID NO: 110633 - protein, 258 aa, Zea mays subsp. mays
  misc_feature (1)..(258): Ceres Seq. ID no. 14305256
QTLCRTATTPLGARRQPASHVHGRHVEAGGGGERHGGPQPGHLPHHPGAPPRGPNLRAPPAPAAPRRGAPVEAGPRPVAGGFVTGARRRRVVVGHDGARRYAALLLRARRPARALHQGPPPRHPQAGGRRVAVVAADAVVGLVGGRLLGGRRRVHVHLQPGVRPGRGRPRRGHAARDHGGGGRVRVRRGGRPRVLAAAVGDEEATAAGCPGRVPPTAAAELHRCHADNGSTGDRHQPGLLLFVRLLFLFVVVQVRDHL

SEQ ID NO: 110634 - protein, 253 aa, Zea mays subsp. mays
  misc_feature (1)..(253): Ceres Seq. ID no. 14305257
  misc_feature (25)..(215): Homolog of NCBI NO: 38345494 NR Description: OSJNBa0010D21.7 [Oryza sativa (japonica
  misc_feature (24)..(253): Homolog of NCBI NO: 38345494 NR Description: OSJNBa0010D21.7 [Oryza sativa (japonica
KHFAAPRPLRLAPGASQPAMFTDGMSRLAVAVSVTVALSLAIFLTILALLLADLICAHLRRRRLRAEAPRSKLGLGLSLAASSPARADGASSSATTALAGTPPSYYAHGVLHAPCTKDLLLAIPRLEGAVWRWSPPTPSSGSSGGGSSAGGDGFMCISNPVYDRAAAAPGGDTPLGITEEADAYGYGEEDARGFSPPLSAMRKLPPLGVLAAYPPPPRPSFTDAMPTMAAPVTDTNRASSSSSAYFFSSWSSK

SEQ ID NO: 110635 - protein, 234 aa, Zea mays subsp. mays
  misc_feature (1)..(234): Ceres Seq. ID no. 14305258
  misc_feature (6)..(196): Homolog of NCBI NO: 38345494 NR Description: OSJNBa0010D21.7 [Oryza sativa (japonica
  misc_feature (5)..(234): Homolog of NCBI NO: 38345494 NR Description: OSJNBa0010D21.7 [Oryza sativa (japonica
MFTDGMSRLAVAVSVTVALSLAIFLTILALLLADLICAHLRRRRLRAEAPRSKLGLGLSLAASSPARADGASSSATTALAGTPPSYYAHGVLHAPCTKDLLLAIPRLEGAVWRWSPPTPSSGSSGGGSSAGGDGFMCISNPVYDRAAAAPGGDTPLGITEEADAYGYGEEDARGFSPPLSAMRKLPPLGVLAAYPPPPRPSFTDAMPTMAAPVTDTNRASSSSSAYFFSSWSSK

SEQ ID NO: 110636 - DNA, 936 bp, Zea mays subsp. mays
  misc_feature (1)..(936): Ceres Seq. ID no. 14305244
cacctgtgaaagcgagcacacgcaacgcagctacgcaagcaagcctgttctctgtcgattgaggccgctacacggcggcaatggagggaagaagggcggccgtgtcgttggtggcagcagtgtcgctgctgctggcgtgctcgcgatccccattcccggtcgtcgccgctgatgagggcgagccggcggtgggggccccggacacgaaccagctgtgcgtgagcaagtgcgggacgtgcccgacgatctgcacggcgtcgccgccgacgatcctgccgatgacagcgccgccgccgccggcccttgcgctgctgccgctgtcgcccccgccgccctacctccagctggtgctgccgccgccgccgcctggggacgtgtacgacctgctgcctccggtgacgcctctcacgagcccgccggagtccccctgcacgaccccgccttcgtcctcatcgtcgtcgacggagcctccgccgtcgccgccctcctcctccccgccgccgccgaagagcggcggcgacggtggcagtggctcgtcctcgcacttctcgtccccgccgtcgtcgtcaaacccgtactactacctgtacctctccggcggcgccagggcccgcggcggcgcgtccagcagcgcttgcgcggcgctcgtcctcgccgcgttcctgcccgccgtcgccctcttcaagtgacgcgcgctctgttggttactagttactactgccatccatcagtcggctactgtccagaccggccggcgttaagactaggacatgcattacgtactctcttcgttttggcatccgattcgatgatgatctgtcgacctttccgatgccagatgattgatcgatgcagacagtacgtagttgtgtttacattttgttcattgtaccttaatgattttgtaaagtggattctgatgatggtttattgtgt

SEQ ID NO: 110637 - protein, 202 aa, Zea mays subsp. mays
  misc_feature (1)..(202): Ceres Seq. ID no. 14305245
  misc_feature (54)..(172): Pfam Name: Extensin-like region Pfam Description: Extensin-like region
  misc_feature (6)..(141): Homolog of NCBI NO: 7441829 NR Description: proline-rich cell wall protein - upland cotton
  misc_feature (6)..(141): Homolog of NCBI NO: 7441828 NR Description: extensin-like cell wall protein - sea-island
  misc_feature (4)..(141): Homolog of NCBI NO: 34894166 NR Description: P0439B06.4 [Oryza sativa (japonica
  misc_feature (42)..(172): Homolog of NCBI NO: 30696750 NR Description: hypothetical protein [Arabidopsis thaliana]
  misc_feature (4)..(164): Homolog of NCBI NO: 15226024 NR Description: arabinogalactan-protein (AGP9) [Arabidopsis
  misc_feature (54)..(172): Homolog of NCBI NO: 28912428 NR Description: serine-proline rich repeat protein [Lupinus
  misc_feature (11)..(164): Homolog of NCBI NO: 13265426 NR Description: At2g14890 [Arabidopsis thaliana]
  misc_feature (54)..(172): Homolog of NCBI NO: 28912428 NR Description: serine-proline rich repeat protein [Lupinus
  misc_feature (45)..(193): Homolog of NCBI NO: 15239833 NR Description: proline-rich protein family [Arabidopsis
  misc_feature (8)..(165): Homolog of NCBI NO: 81286 NR Description: extensin - Volvox carteri (fragment)
MEGRRAAVSLVAAVSLLLACSRSPFPVVAADEGEPAVGAPDTNQLCVSKCGTCPTICTASPPTILPMTAPPPPALALLPLSPPPPYLQLVLPPPPPGDVYDLLPPVTPLTSPPESPCTTPPSSSSSSTEPPPSPPSSSPPPPKSGGDGGSGSSSHFSSPPSSSNPYYYLYLSGGARARGGASSSACAALVLAAFLPAVALFK

SEQ ID NO: 110638 - protein, 136 aa, Zea mays subsp. mays
  misc_feature (1)..(136): Ceres Seq. ID no. 14305246
  misc_feature (1)..(106): Pfam Name: Extensin-like region Pfam Description: Extensin-like region
  misc_feature (1)..(75): Homolog of NCBI NO: 7441829 NR Description: proline-rich cell wall protein - upland cotton
  misc_feature (1)..(75): Homolog of NCBI NO: 7441828 NR Description: extensin-like cell wall protein - sea-island
  misc_feature (1)..(75): Homolog of NCBI NO: 34894166 NR Description: P0439B06.4 [Oryza sativa (japonica
  misc_feature (1)..(106): Homolog of NCBI NO: 30696750 NR Description: hypothetical protein [Arabidopsis thaliana]
  misc_feature (1)..(98): Homolog of NCBI NO: 15226024 NR Description: arabinogalactan-protein (AGP9) [Arabidopsis
  misc_feature (1)..(106): Homolog of NCBI NO: 28912428 NR Description: serine-proline rich repeat protein [Lupinus
  misc_feature (1)..(98): Homolog of NCBI NO: 13265426 NR Description: At2g14890 [Arabidopsis thaliana]
  misc_feature (1)..(106): Homolog of NCBI NO: 28912428 NR Description: serine-proline rich repeat protein [Lupinus
  misc_feature (1)..(127): Homolog of NCBI NO: 15239833 NR Description: proline-rich protein family [Arabidopsis
  misc_feature (1)..(99): Homolog of NCBI NO: 81286 NR Description: extensin - Volvox carteri (fragment)
MTAPPPPALALLPLSPPPPYLQLVLPPPPPGDVYDLLPPVTPLTSPPESPCTTPPSSSSSSTEPPPSPPSSSPPPPKSGGDGGSGSSSHFSSPPSSSNPYYYLYLSGGARARGGASSSACAALVLAAFLPAVALFK

SEQ ID NO: 110639 - DNA, 1395 bp, Zea mays subsp. mays
  misc_feature (1)..(1395): Ceres Seq. ID no. 15180501
aaagcgcgccaaacaattccattccatggatgcggagatggaggacgcaggaagacagaccgagatcgagtggggcggcggcggcggcggcgccgaagcggtcctgggtcttgccggcggcgcctcctctgtgtcgctgtgctaccaccaggcgttcggtccccacgacgacctcgtgctcctcgaggccgctgacgacctcctccctgacctcctgcaaggccgggtgactgtaagagggcgtcctgatgaagatgctgtcctctgcacaccttgtgcaacttactccatgaagtttgttggcacatcaaattctatgtttttgataccacctggggaaccatctgctaaatgcttaagaccagacaacaccagtggcaatgctaatgcgttggctgctaccattaaactggcaccggggagcattgaattggtccgagtcgctccacgactagataaacttaagagccttctccgggagcggccctacatacttgatgaggatattggggatgatgacctccaacataagaataagaaggggctgtacacatggcaagacctctgcaaacttatccaggccagtgatggcgagctgttagatgcgctgaatgccctctcggctgttgacattgatggattctggaggacagttgatgccagttctgtgaacacgattcttgacatgatcctgcacaactctgtgttgcgtgattggccattaaaggcaatgccagaaagtgatgtgctctctgtcatgggatctgatggttttacgcataatatcgtaacccactgcctcaacagatttggcacaaaggtagagcaggaagccagaagcttttggagccttgatgagaagcgtgtatgcttacaatttgctcggagagcacttggcgctggaaagatgaagctcagcaactttatggagaaatggaagagaagcattccttcaggaatgtgttgtccggatcttcagatgcttgaaggggaagtgttgtgtgaaaagcttggggctgagacctgggtgcatgctttcagtgttactgatctgccactggcgcctgctgagaggttcgcagcacttttccgtgagcgggcaaaatgggaatggaaagacctgcagccctacatcagggacttgcatgttccaggtgcatcgtcggaaggattgcttatcaagtataccagaagaagccaaccaaatgctgaagctgaacctatttttactgcaagataataatcaaagtacggccatgtcttggcgacgtggtgcattgcatttgcatgctagatattgtcaatggaacccaggttttgaaaaaaaacatttgtgccttttgctgtaacttttgtttttggtgaagaaagctgaaatgcaagtattgaaatccc

SEQ ID NO: 110640 - protein, 412 aa, Zea mays subsp. mays
  misc_feature (1)..(412): Ceres Seq. ID no. 15180502
  misc_feature (54)..(382): Homolog of NCBI NO: 31746522 NR Description: Hypothetical protein K09H9.2 [Caenorhabditis
  misc_feature (78)..(378): Homolog of NCBI NO: 24656130 NR Description: CG11788-PA [Drosophila melanogaster]
  misc_feature (203)..(402): Homolog of NCBI NO: 34147053 NR Description: RIKEN cDNA 2600005O03 [Mus musculus]
  misc_feature (13)..(89): Homolog of NCBI NO: 8099129 NR Description: similar to a putative RING zinc finger protein of
  misc_feature (55)..(397): Homolog of NCBI NO: 31204943 NR Description: ENSANGP00000000566 [Anopheles gambiae]
  misc_feature (57)..(402): Homolog of NCBI NO: 34866494 NR Description: similar to hypothetical protein MGC5528 [Rattus
  misc_feature (57)..(402): Homolog of NCBI NO: 16306709 NR Description: hypothetical protein MGC5528 [Homo sapiens]
  misc_feature (57)..(402): Homolog of NCBI NO: 13129096 NR Description: hypothetical protein MGC5528 [Homo sapiens]
  misc_feature (245)..(379): Homolog of NCBI NO: 8099129 NR Description: similar to a putative RING zinc finger protein of
  misc_feature (29)..(379): Homolog of NCBI NO: 15224911 NR Description: zinc finger (C3HC4-type RING finger) protein
KRAKQFHSMDAEMEDAGRQTEIEWGGGGGGAEAVLGLAGGASSVSLCYHQAFGPHDDLVLLEAADDLLPDLLQGRVTVRGRPDEDAVLCTPCATYSMKFVGTSNSMFLIPPGEPSAKCLRPDNTSGNANALAATIKLAPGSIELVRVAPRLDKLKSLLRERPYILDEDIGDDDLQHKNKKGLYTWQDLCKLIQASDGELLDALNALSAVDIDGFWRTVDASSVNTILDMILHNSVLRDWPLKAMPESDVLSVMGSDGFTHNIVTHCLNRFGTKVEQEARSFWSLDEKRVCLQFARRALGAGKMKLSNFMEKWKRSIPSGMCCPDLQMLEGEVLCEKLGAETWVHAFSVTDLPLAPAERFAALFRERAKWEWKDLQPYIRDLHVPGASSEGLLIKYTRRSQPNAEAEPIFTAR

SEQ ID NO: 110641 - protein, 404 aa, Zea mays subsp. mays
  misc_feature (1)..(404): Ceres Seq. ID no. 15180503
  misc_feature (46)..(374): Homolog of NCBI NO: 31746522 NR Description: Hypothetical protein K09H9.2 [Caenorhabditis
  misc_feature (70)..(370): Homolog of NCBI NO: 24656130 NR Description: CG11788-PA [Drosophila melanogaster]
  misc_feature (195)..(394): Homolog of NCBI NO: 34147053 NR Description: RIKEN cDNA 2600005O03 [Mus musculus]
  misc_feature (5)..(81): Homolog of NCBI NO: 8099129 NR Description: similar to a putative RING zinc finger protein of
  misc_feature (47)..(389): Homolog of NCBI NO: 31204943 NR Description: ENSANGP00000000566 [Anopheles gambiae]
  misc_feature (49)..(394): Homolog of NCBI NO: 34866494 NR Description: similar to hypothetical protein MGC5528 [Rattus
  misc_feature (49)..(394): Homolog of NCBI NO: 16306709 NR Description: hypothetical protein MGC5528 [Homo sapiens]
  misc_feature (49)..(394): Homolog of NCBI NO: 13129096 NR Description: hypothetical protein MGC5528 [Homo sapiens]
  misc_feature (237)..(371): Homolog of NCBI NO: 8099129 NR Description: similar to a putative RING zinc finger protein of
  misc_feature (21)..(371): Homolog of NCBI NO: 15224911 NR Description: zinc finger (C3HC4-type RING finger) protein
MDAEMEDAGRQTEIEWGGGGGGAEAVLGLAGGASSVSLCYHQAFGPHDDLVLLEAADDLLPDLLQGRVTVRGRPDEDAVLCTPCATYSMKFVGTSNSMFLIPPGEPSAKCLRPDNTSGNANALAATIKLAPGSIELVRVAPRLDKLKSLLRERPYILDEDIGDDDLQHKNKKGLYTWQDLCKLIQASDGELLDALNALSAVDIDGFWRTVDASSVNTILDMILHNSVLRDWPLKAMPESDVLSVMGSDGFTHNIVTHCLNRFGTKVEQEARSFWSLDEKRVCLQFARRALGAGKMKLSNFMEKWKRSIPSGMCCPDLQMLEGEVLCEKLGAETWVHAFSVTDLPLAPAERFAALFRERAKWEWKDLQPYIRDLHVPGASSEGLLIKYTRRSQPNAEAEPIFTAR

SEQ ID NO: 110642 - protein, 400 aa, Zea mays subsp. mays
  misc_feature (1)..(400): Ceres Seq. ID no. 15180504
  misc_feature (42)..(370): Homolog of NCBI NO: 31746522 NR Description: Hypothetical protein K09H9.2 [Caenorhabditis
  misc_feature (66)..(366): Homolog of NCBI NO: 24656130 NR Description: CG11788-PA [Drosophila melanogaster]
  misc_feature (191)..(390): Homolog of NCBI NO: 34147053 NR Description: RIKEN cDNA 2600005O03 [Mus musculus]
  misc_feature (1)..(77): Homolog of NCBI NO: 8099129 NR Description: similar to a putative RING zinc finger protein of
  misc_feature (43)..(385): Homolog of NCBI NO: 31204943 NR Description: ENSANGP00000000566 [Anopheles gambiae]
  misc_feature (45)..(390): Homolog of NCBI NO: 34866494 NR Description: similar to hypothetical protein MGC5528 [Rattus
  misc_feature (45)..(390): Homolog of NCBI NO: 16306709 NR Description: hypothetical protein MGC5528 [Homo sapiens]
  misc_feature (45)..(390): Homolog of NCBI NO: 13129096 NR Description: hypothetical protein MGC5528 [Homo sapiens]
  misc_feature (233)..(367): Homolog of NCBI NO: 8099129 NR Description: similar to a putative RING zinc finger protein of
  misc_feature (17)..(367): Homolog of NCBI NO: 15224911 NR Description: zinc finger (C3HC4-type RING finger) protein
MEDAGRQTEIEWGGGGGGAEAVLGLAGGASSVSLCYHQAFGPHDDLVLLEAADDLLPDLLQGRVTVRGRPDEDAVLCTPCATYSMKFVGTSNSMFLIPPGEPSAKCLRPDNTSGNANALAATIKLAPGSIELVRVAPRLDKLKSLLRERPYILDEDIGDDDLQHKNKKGLYTWQDLCKLIQASDGELLDALNALSAVDIDGFWRTVDASSVNTILDMILHNSVLRDWPLKAMPESDVLSVMGSDGFTHNIVTHCLNRFGTKVEQEARSFWSLDEKRVCLQFARRALGAGKMKLSNFMEKWKRSIPSGMCCPDLQMLEGEVLCEKLGAETWVHAFSVTDLPLAPAERFAALFRERAKWEWKDLQPYIRDLHVPGASSEGLLIKYTRRSQPNAEAEPIFTAR

SEQ ID NO: 110643 - DNA, 1501 bp, Zea mays subsp. mays
  misc_feature (1)..(1501): Ceres Seq. ID no. 15177738
  misc_feature: MA Experiment ID: 108543 Result: Down-regulated in Transcription
ataagttcctgtgagctgtctcccgctcactcggtccctgtccatccgtagcgttccattccattccatcccatccccggaaagtgcaaggacgggagggagagcggccggcgcgtcacaaataccaccagcccaggggccatggccgccgcgatgaccagcttcgtcgccaagaacccgctgctcgcggccgcggcgcggcgcagggcgcctcccctcgcggggcgcgccctgccgttctctccgctcaggctgaggaccgtcacgtgcttcgtgccgcaggacacggcggccccggccgctcccgtgccggcgctggacgaggaggccagggccgcggcggcgcggcgcgtcgcggagaaggaggcgcggaagcggtccgagcggcggacgtacctggtggccgccgtgatgtctagcctcggagtcacgtccatggccgtcgccgccgtgtactatcgcttcagctggcaaatggagggcggcgaggtgccggtgatcgagacgctgggcacgttcgcgctctccgtcggggcggcggtcgggatggagttctgggcgcggtgggcgcaccgggcgctgtggcacgcctccctgtggcacatgcacgagtcgcaccaccggccgcgcgagggccccttcgagctcaacgacgtgttcgccatcgtcaacgccgcgccggccatctccctcctcgcctacggcttcttccaccgcggcatcgtgcccggcctctgcttcggcgcgggcctggggattacgctgttcggcatggcctacatgttcgtccacgacggcctggtccaccgccgctttccggtcggccccatcgccgacgtgccctacttcctccgagtggctgcctcgcacaagatacaccacatggacaagttcggcggcgtcccgtatgggctcttcctgggaccaaaggagctggaggaggttggtggcctggacgagcttgttagcagtccggtgagtgaagctactgatactgaagacgcaggagaagaaaagacgcgtccagttgtatgcgttgtccgaacaagcgtgttcatgggccagagtgtgccaaatgagttctagctttaggcgagtgggccaaatgagtgtgggctgcgtcccagggtagtataagtactatgagtctgtaataatcaggacaagaagaatttagcatccagtagctaacagagctggaaaaggagctcgcgcgaaccagaagggccatctgatggattcgtacatggagctggaggaggttgtgagtccggcgcggcgagctcctccgcgcgctccgtggtttttgttttttgttttggtcgcttttttgttgatttcattgtcttgtttggtactggagggttggcgaatcgattttggatgcactggcgtagatgttggctgtccacttgccctgcatttcgaatggtctgggaaggcacggttcgtacatggaaaatgtccggtgccgtggaattactattgttttgtttgctgc

SEQ ID NO: 110644 - protein, 314 aa, Zea mays subsp. mays
  misc_feature (1)..(314): Ceres Seq. ID no. 15177739
  misc_feature (124)..(274): Pfam Name: Carotene hydroxylase Pfam Description: Carotene hydroxylase
  misc_feature (7)..(288): Homolog of NCBI NO: 21734857 NR Description: beta-carotene hydroxylase [Vitis vinifera]
  misc_feature (61)..(274): Homolog of NCBI NO: 9968545 NR Description: beta-carotene hydroxylase [Narcissus
  misc_feature (1)..(274): Homolog of NCBI NO: 5870598 NR Description: beta-carotene hydroxylase [Lycopersicon
  misc_feature (2)..(274): Homolog of NCBI NO: 2956717 NR Description: beta-carotene hydroxylase 2 [Capsicum annuum]
  misc_feature (62)..(274): Homolog of NCBI NO: 5870600 NR Description: beta-carotene hydroxylase [Lycopersicon
  misc_feature (60)..(274): Homolog of NCBI NO: 9988836 NR Description: beta-carotene hydroxylase [Citrus unshiu]
  misc_feature (37)..(274): Homolog of NCBI NO: 11245486 NR Description: beta-carotene hydroxylase [Citrus unshiu]
  misc_feature (1)..(293): Homolog of NCBI NO: 33145986 NR Description: beta-carotene hydroxylase [Crocus sativus]
  misc_feature (1)..(58): Homolog of NCBI NO: 32488500 NR Description: OSJNBa0011J08.7 [Oryza sativa (japonica
  misc_feature (38)..(274): Homolog of NCBI NO: 32488500 NR Description: OSJNBa0011J08.7 [Oryza sativa (japonica
MAAAMTSFVAKNPLLAAAARRRAPPLAGRALPFSPLRLRTVTCFVPQDTAAPAAPVPALDEEARAAAARRVAEKEARKRSERRTYLVAAVMSSLGVTSMAVAAVYYRFSWQMEGGEVPVIETLGTFALSVGAAVGMEFWARWAHRALWHASLWHMHESHHRPREGPFELNDVFAIVNAAPAISLLAYGFFHRGIVPGLCFGAGLGITLFGMAYMFVHDGLVHRRFPVGPIADVPYFLRVAASHKIHHMDKFGGVPYGLFLGPKELEEVGGLDELVSSPVSEATDTEDAGEEKTRPVVCVVRTSVFMGQSVPNEF

SEQ ID NO: 110645 - protein, 310 aa, Zea mays subsp. mays
  misc_feature (1)..(310): Ceres Seq. ID no. 15177740
  misc_feature (120)..(270): Pfam Name: Carotene hydroxylase Pfam Description: Carotene hydroxylase
  misc_feature (3)..(284): Homolog of NCBI NO: 21734857 NR Description: beta-carotene hydroxylase [Vitis vinifera]
  misc_feature (57)..(270): Homolog of NCBI NO: 9968545 NR Description: beta-carotene hydroxylase [Narcissus
  misc_feature (1)..(270): Homolog of NCBI NO: 5870598 NR Description: beta-carotene hydroxylase [Lycopersicon
  misc_feature (1)..(270): Homolog of NCBI NO: 2956717 NR Description: beta-carotene hydroxylase 2 [Capsicum annuum]
  misc_feature (58)..(270): Homolog of NCBI NO: 5870600 NR Description: beta-carotene hydroxylase [Lycopersicon
  misc_feature (56)..(270): Homolog of NCBI NO: 9988836 NR Description: beta-carotene hydroxylase [Citrus unshiu]
  misc_feature (33)..(270): Homolog of NCBI NO: 11245486 NR Description: beta-carotene hydroxylase [Citrus unshiu]
  misc_feature (1)..(289): Homolog of NCBI NO: 33145986 NR Description: beta-carotene hydroxylase [Crocus sativus]
  misc_feature (1)..(54): Homolog of NCBI NO: 32488500 NR Description: OSJNBa0011J08.7 [Oryza sativa (japonica
  misc_feature (34)..(270): Homolog of NCBI NO: 32488500 NR Description: OSJNBa0011J08.7 [Oryza sativa (japonica
MTSFVAKNPLLAAAARRRAPPLAGRALPFSPLRLRTVTCFVPQDTAAPAAPVPALDEEARAAAARRVAEKEARKRSERRTYLVAAVMSSLGVTSMAVAAVYYRFSWQMEGGEVPVIETLGTFALSVGAAVGMEFWARWAHRALWHASLWHMHESHHRPREGPFELNDVFAIVNAAPAISLLAYGFFHRGIVPGLCFGAGLGITLFGMAYMFVHDGLVHRRFPVGPIADVPYFLRVAASHKIHHMDKFGGVPYGLFLGPKELEEVGGLDELVSSPVSEATDTEDAGEEKTRPVVCVVRTSVFMGQSVPNEF

SEQ ID NO: 110646 - protein, 224 aa, Zea mays subsp. mays
  misc_feature (1)..(224): Ceres Seq. ID no. 15177741
  misc_feature (34)..(184): Pfam Name: Carotene hydroxylase Pfam Description: Carotene hydroxylase
  misc_feature (1)..(184): Homolog of NCBI NO: 9971820 NR Description: beta hydroxylase [Tagetes erecta]
  misc_feature (1)..(198): Homolog of NCBI NO: 21734857 NR Description: beta-carotene hydroxylase [Vitis vinifera]
  misc_feature (1)..(184): Homolog of NCBI NO: 9968545 NR Description: beta-carotene hydroxylase [Narcissus
  misc_feature (1)..(184): Homolog of NCBI NO: 5870598 NR Description: beta-carotene hydroxylase [Lycopersicon
  misc_feature (1)..(184): Homolog of NCBI NO: 2956717 NR Description: beta-carotene hydroxylase 2 [Capsicum annuum]
  misc_feature (1)..(184): Homolog of NCBI NO: 5870600 NR Description: beta-carotene hydroxylase [Lycopersicon
  misc_feature (1)..(184): Homolog of NCBI NO: 9988836 NR Description: beta-carotene hydroxylase [Citrus unshiu]
  misc_feature (1)..(184): Homolog of NCBI NO: 11245486 NR Description: beta-carotene hydroxylase [Citrus unshiu]
  misc_feature (1)..(203): Homolog of NCBI NO: 33145986 NR Description: beta-carotene hydroxylase [Crocus sativus]
  misc_feature (1)..(184): Homolog of NCBI NO: 32488500 NR Description: OSJNBa0011J08.7 [Oryza sativa (japonica
MSSLGVTSMAVAAVYYRFSWQMEGGEVPVIETLGTFALSVGAAVGMEFWARWAHRALWHASLWHMHESHHRPREGPFELNDVFAIVNAAPAISLLAYGFFHRGIVPGLCFGAGLGITLFGMAYMFVHDGLVHRRFPVGPIADVPYFLRVAASHKIHHMDKFGGVPYGLFLGPKELEEVGGLDELVSSPVSEATDTEDAGEEKTRPVVCVVRTSVFMGQSVPNEF

SEQ ID NO: 110647 - DNA, 434 bp, Zea mays subsp. mays
  misc_feature (1)..(434): Ceres Seq. ID no. 13598894
  misc_feature: MA Experiment ID: 108504 Result: Down-regulated in Transcription
  misc_feature: MA Experiment 108504 PARAMETER Experiment Name: Zm_Drought_P Parameter: Age (day) Value: 8
  misc_feature: MA Experiment 108504 PARAMETER Experiment Name: Zm_Drought_P Parameter: Organism Value: Zea mays
  misc_feature: MA Experiment 108504 PARAMETER Experiment Name: Zm_Drought_P Parameter: Plant Line Value: 35A19
  misc_feature: MA Experiment 108504 PARAMETER Experiment Name: Zm_Drought_P Parameter: Timepoint (hr) Value: 12
  misc_feature: MA Experiment 108504 PARAMETER Experiment Name: Zm_Drought_P Parameter: Tissue Value: Aerial
  misc_feature: MA Experiment 108504 PARAMETER Experiment Name: Zm_Drought_P Parameter: Treatment Value: Drought vs. No Drought
  misc_feature: MA Experiment ID: 108528 Result: Up-regulated in Transcription
  misc_feature: MA Experiment 108528 PARAMETER Experiment Name: Zm_Imbibed_Seeds_P Parameter: Age (day) Value: 5 vs. 2
  misc_feature: MA Experiment 108528 PARAMETER Experiment Name: Zm_Imbibed_Seeds_P Parameter: Organism Value: Zea mays
  misc_feature: MA Experiment 108528 PARAMETER Experiment Name: Zm_Imbibed_Seeds_P Parameter: Plant Line Value: 35A19
  misc_feature: MA Experiment 108528 PARAMETER Experiment Name: Zm_Imbibed_Seeds_P Parameter: Tissue Value: Aerial vs. Embryo
  misc_feature: MA Experiment ID: 108529 Result: Down-regulated in Transcription
  misc_feature: MA Experiment 108529 PARAMETER Experiment Name: Zm_Imbibed_Seeds_P Parameter: Age (day) Value: 5 vs. 2
  misc_feature: MA Experiment 108529 PARAMETER Experiment Name: Zm_Imbibed_Seeds_P Parameter: Organism Value: Zea mays
  misc_feature: MA Experiment 108529 PARAMETER Experiment Name: Zm_Imbibed_Seeds_P Parameter: Plant Line Value: 35A19
  misc_feature: MA Experiment 108529 PARAMETER Experiment Name: Zm_Imbibed_Seeds_P Parameter: Tissue Value: Roots vs. Embryo
  misc_feature: MA Experiment ID: 108545 Result: Up-regulated in Transcription
  misc_feature: MA Experiment 108545 PARAMETER Experiment Name: Zm_Imbibed_Seeds_P Parameter: Age (day) Value: 3 vs. 2
  misc_feature: MA Experiment 108545 PARAMETER Experiment Name: Zm_Imbibed_Seeds_P Parameter: Organism Value: Zea mays
  misc_feature: MA Experiment 108545 PARAMETER Experiment Name: Zm_Imbibed_Seeds_P Parameter: Plant Line Value: 35A19
  misc_feature: MA Experiment 108545 PARAMETER Experiment Name: Zm_Imbibed_Seeds_P Parameter: Tissue Value: Aerial vs. Embryo
  misc_feature: MA Experiment ID: 108546 Result: Down-regulated in Transcription
  misc_feature: MA Experiment 108546 PARAMETER Experiment Name: Zm_Imbibed_Seeds_P Parameter: Age (day) Value: 3 vs. 2
  misc_feature: MA Experiment 108546 PARAMETER Experiment Name: Zm_Imbibed_Seeds_P Parameter: Organism Value: Zea mays
  misc_feature: MA Experiment 108546 PARAMETER Experiment Name: Zm_Imbibed_Seeds_P Parameter: Plant Line Value: 35A19
  misc_feature: MA Experiment 108546 PARAMETER Experiment Name: Zm_Imbibed_Seeds_P Parameter: Tissue Value: Roots vs. Embryo
  misc_feature: MA Experiment ID: 108547 Result: Up-regulated in Transcription
  misc_feature: MA Experiment 108547 PARAMETER Experiment Name: Zm_Imbibed_Seeds_P Parameter: Age (day) Value: 4 vs. 2
  misc_feature: MA Experiment 108547 PARAMETER Experiment Name: Zm_Imbibed_Seeds_P Parameter: Organism Value: Zea mays
  misc_feature: MA Experiment 108547 PARAMETER Experiment Name: Zm_Imbibed_Seeds_P Parameter: Plant Line Value: 35A19
  misc_feature: MA Experiment 108547 PARAMETER Experiment Name: Zm_Imbibed_Seeds_P Parameter: Tissue Value: Aerial vs. Embryo
  misc_feature: MA Experiment ID: 108556 Result: Down-regulated in Transcription
  misc_feature: MA Experiment 108556 PARAMETER Experiment Name: Zm_Drought_P Parameter: Age (day) Value: 9
  misc_feature: MA Experiment 108556 PARAMETER Experiment Name: Zm_Drought_P Parameter: Organism Value: Zea mays
  misc_feature: MA Experiment 108556 PARAMETER Experiment Name: Zm_Drought_P Parameter: Plant Line Value: 35A19
  misc_feature: MA Experiment 108556 PARAMETER Experiment Name: Zm_Drought_P Parameter: Timepoint (hr) Value: 24
  misc_feature: MA Experiment 108556 PARAMETER Experiment Name: Zm_Drought_P Parameter: Tissue Value: Aerial
  misc_feature: MA Experiment 108556 PARAMETER Experiment Name: Zm_Drought_P Parameter: Treatment Value: Drought vs. No Drought
  misc_feature: MA Experiment ID: 108597 Result: Down-regulated in Transcription
  misc_feature: MA Experiment 108597 PARAMETER Experiment Name: Zm_100uM_ABA_P Parameter: Age (day) Value: 9
  misc_feature: MA Experiment 108597 PARAMETER Experiment Name: Zm_100uM_ABA_P Parameter: Organism Value: Zea mays
  misc_feature: MA Experiment 108597 PARAMETER Experiment Name: Zm_100uM_ABA_P Parameter: Plant Line Value: 35A19
  misc_feature: MA Experiment 108597 PARAMETER Experiment Name: Zm_100uM_ABA_P Parameter: Timepoint (hr) Value: 24
  misc_feature: MA Experiment 108597 PARAMETER Experiment Name: Zm_100uM_ABA_P Parameter: Tissue Value: Aerial
  misc_feature: MA Experiment 108597 PARAMETER Experiment Name: Zm_100uM_ABA_P Parameter: Treatment Value: 100uM ABA vs. No Treatment
  misc_feature: MA Experiment ID: 20000479 Result: Down-regulated in Transcription
  misc_feature: MA Experiment 20000479 PARAMETER Experiment Name: Zm_Drought_P Parameter: Age (day) Value: 10
  misc_feature: MA Experiment 20000479 PARAMETER Experiment Name: Zm_Drought_P Parameter: Organism Value: Zea mays
  misc_feature: MA Experiment 20000479 PARAMETER Experiment Name: Zm_Drought_P Parameter: Plant Line Value: 35A19
  misc_feature: MA Experiment 20000479 PARAMETER Experiment Name: Zm_Drought_P Parameter: Timepoint (hr) Value: 48
  misc_feature: MA Experiment 20000479 PARAMETER Experiment Name: Zm_Drought_P Parameter: Tissue Value: Aerial
  misc_feature: MA Experiment 20000479 PARAMETER Experiment Name: Zm_Drought_P Parameter: Treatment Value: Drought vs. No Drought
  misc_feature: MA Experiment ID: 20000480 Result: Down-regulated in Transcription
  misc_feature: MA Experiment 20000480 PARAMETER Experiment Name: Zm_Drought_P Parameter: Age (day) Value: 11
  misc_feature: MA Experiment 20000480 PARAMETER Experiment Name: Zm_Drought_P Parameter: Organism Value: Zea mays
  misc_feature: MA Experiment 20000480 PARAMETER Experiment Name: Zm_Drought_P Parameter: Plant Line Value: 35A19
  misc_feature: MA Experiment 20000480 PARAMETER Experiment Name: Zm_Drought_P Parameter: Timepoint (hr) Value: 72
  misc_feature: MA Experiment 20000480 PARAMETER Experiment Name: Zm_Drought_P Parameter: Tissue Value: Aerial
  misc_feature: MA Experiment 20000480 PARAMETER Experiment Name: Zm_Drought_P Parameter: Treatment Value: Drought vs. No Drought
  misc_feature: MA Experiment ID: 20000534 Result: Down-regulated in Transcription
  misc_feature: MA Experiment 20000534 PARAMETER Experiment Name: Zm_Hybrid_Pollen_P Parameter: Age (day) Value: 8
  misc_feature: MA Experiment 20000534 PARAMETER Experiment Name: Zm_Hybrid_Pollen_P Parameter: Organism Value: Zea mays
  misc_feature: MA Experiment 20000534 PARAMETER Experiment Name: Zm_Hybrid_Pollen_P Parameter: Plant Line Value: 35A19
  misc_feature: MA Experiment 20000534 PARAMETER Experiment Name: Zm_Hybrid_Pollen_P Parameter: Tissue Value: Pollen vs. Aerial
acgacgcttgcattgacaagctagagattccacgctagcgacasstgccatggtcagtgcatgcatgcacgcatgcatgtgggcacattaagacacctcaccaaatactacaactgcaaactgtccgtgtgcgtgcgtcttgtcttgaaccgccggggccgggggtccggcatgctgcatacagtatactactatgcgctgaccaacgccgtgccactagtcagtgatcccgctgtggaaggaggtggagtactacgaggagttccagcggcggctgcgcgcgcgcgtgggccggtcccgcgccgccgccatcgtccgcggcgcctccacgtggtgagcatcggcaccaacgacttcctggagaactacttcctgctggccacggggcggttcgcgcagttcacggtgcccgagttcgaggacttcctggtggc

SEQ ID NO: 110648 - protein, 124 aa, Zea mays subsp. mays
  misc_feature (1)..(124): Ceres Seq. ID no. 13598895
  misc_feature (89)..(123): Homolog of NCBI NO: 15228157 NR Description: GDSL-motif lipase/hydrolase protein [Arabidopsis
  misc_feature (89)..(123): Homolog of NCBI NO: 7485330 NR Description: hypothetical protein F10M23.130 - Arabidopsis
  misc_feature (89)..(123): Homolog of NCBI NO: 18416824 NR Description: GDSL-motif lipase/hydrolase protein [Arabidopsis
  misc_feature (89)..(123): Homolog of NCBI NO: 21593518 NR Description: putative GDSL-motif lipase/hydrolase [Arabidopsis
  misc_feature (89)..(123): Homolog of NCBI NO: 15224201 NR Description: GDSL-motif lipase/hydrolase protein [Arabidopsis
MHARMHVGTLRHLTKYYNCKLSVCVRLVLNRRGRGSGMLHTVYYYALTNAVPLVSDPAVEGGGVLRGVPAAAARARGPVPRRRHRPRRLHVVSIGTNDFLENYFLLATGRFAQFTVPEFEDFLV

SEQ ID NO: 110649 - protein, 120 aa, Zea mays subsp. mays
  misc_feature (1)..(120): Ceres Seq. ID no. 13598896
  misc_feature (85)..(119): Homolog of NCBI NO: 21593518 NR Description: putative GDSL-motif lipase/hydrolase [Arabidopsis
  misc_feature (85)..(119): Homolog of NCBI NO: 15224201 NR Description: GDSL-motif lipase/hydrolase protein [Arabidopsis
  misc_feature (85)..(119): Homolog of NCBI NO: 15228157 NR Description: GDSL-motif lipase/hydrolase protein [Arabidopsis
  misc_feature (85)..(119): Homolog of NCBI NO: 7485330 NR Description: hypothetical protein F10M23.130 - Arabidopsis
  misc_feature (85)..(119): Homolog of NCBI NO: 18416824 NR Description: GDSL-motif lipase/hydrolase protein [Arabidopsis
MHVGTLRHLTKYYNCKLSVCVRLVLNRRGRGSGMLHTVYYYALTNAVPLVSDPAVEGGGVLRGVPAAAARARGPVPRRRHRPRRLHVVSIGTNDFLENYFLLATGRFAQFTVPEFEDFLV

SEQ ID NO: 110650 - protein, 87 aa, Zea mays subsp. mays
  misc_feature (1)..(87): Ceres Seq. ID no. 13598897
  misc_feature (52)..(86): Homolog of NCBI NO: 15228157 NR Description: GDSL-motif lipase/hydrolase protein [Arabidopsis
  misc_feature (52)..(86): Homolog of NCBI NO: 7485330 NR Description: hypothetical protein F10M23.130 - Arabidopsis
  misc_feature (52)..(86): Homolog of NCBI NO: 18416824 NR Description: GDSL-motif lipase/hydrolase protein [Arabidopsis
  misc_feature (52)..(86): Homolog of NCBI NO: 21593518 NR Description: putative GDSL-motif lipase/hydrolase [Arabidopsis
  misc_feature (52)..(86): Homolog of NCBI NO: 15224201 NR Description: GDSL-motif lipase/hydrolase protein [Arabidopsis
MLHTVYYYALTNAVPLVSDPAVEGGGVLRGVPAAAARARGPVPRRRHRPRRLHVVSIGTNDFLENYFLLATGRFAQFTVPEFEDFLV

SEQ ID NO: 110651 - DNA, 1339 bp, Zea mays subsp. mays
  misc_feature (1)..(1339): Ceres Seq. ID no. 15180690
  misc_feature: MA Experiment ID: 108532 Result: Down-regulated in Transcription
  misc_feature: MA Experiment 108532 PARAMETER Experiment Name: Zm_20uM_KNO3_H-to-L_P Parameter: Age (day) Value: 11
  misc_feature: MA Experiment 108532 PARAMETER Experiment Name: Zm_20uM_KNO3_H-to-L_P Parameter: Organism Value: Zea mays
  misc_feature: MA Experiment 108532 PARAMETER Experiment Name: Zm_20uM_KNO3_H-to-L_P Parameter: Plant Line Value: 35A19
  misc_feature: MA Experiment 108532 PARAMETER Experiment Name: Zm_20uM_KNO3_H-to-L_P Parameter: Timepoint (hr) Value: 16
  misc_feature: MA Experiment 108532 PARAMETER Experiment Name: Zm_20uM_KNO3_H-to-L_P Parameter: Tissue Value: Roots
  misc_feature: MA Experiment 108532 PARAMETER Experiment Name: Zm_20uM_KNO3_H-to-L_P Parameter: Treatment Value: 20uM KNO3 vs. 60mM KNO3
  misc_feature: MA Experiment ID: 108534 Result: Down-regulated in Transcription
  misc_feature: MA Experiment 108534 PARAMETER Experiment Name: Zm_4deg_Cold_P Parameter: Age (hr) Value: 8
  misc_feature: MA Experiment 108534 PARAMETER Experiment Name: Zm_4deg_Cold_P Parameter: Organism Value: Zea mays
  misc_feature: MA Experiment 108534 PARAMETER Experiment Name: Zm_4deg_Cold_P Parameter: Plant Line Value: 35A19
  misc_feature: MA Experiment 108534 PARAMETER Experiment Name: Zm_4deg_Cold_P Parameter: Temperature (deg C) Value: 4 vs. 22
  misc_feature: MA Experiment 108534 PARAMETER Experiment Name: Zm_4deg_Cold_P Parameter: Timepoint (hr) Value: 6
  misc_feature: MA Experiment 108534 PARAMETER Experiment Name: Zm_4deg_Cold_P Parameter: Tissue Value: Aerial
  misc_feature: MA Experiment ID: 20000488 Result: Down-regulated in Transcription
  misc_feature: MA Experiment 20000488 PARAMETER Experiment Name: Zm_50mM_NH4NO3_L_to_H_P Parameter: Organism Value: Zea mays
  misc_feature: MA Experiment 20000488 PARAMETER Experiment Name: Zm_50mM_NH4NO3_L_to_H_P Parameter: Timepoint (hr) Value: 8
  misc_feature: MA Experiment 20000488 PARAMETER Experiment Name: Zm_50mM_NH4NO3_L_to_H_P Parameter: Tissue Value: Leaves
  misc_feature: MA Experiment 20000488 PARAMETER Experiment Name: Zm_50mM_NH4NO3_L_to_H_P Parameter: Treatment Value: 50mM NH4NO3 vs. 100mM Mannitol
atacgctgctcaaagtttaaatcggtcaagtggaaaccacacaccaggccgcccctctgttcctcgccgagatggccccgccgcggtggcgcggctccctgaccgcgggctaccagttcttcctcgcgctcggggtgctgatcgccaacctcgtgaactacgcgacggcgcacgcctcctgggggtggcgcgtctcgctgggcctggcgggcgcgccggccgtcgccatcttcgtcggcgcgctcttcctcaccgacacccccagcagcctcgtgatgcgggggcgcgccgacggggcccgggcggcgctgctccgggtgcgcgggcccgacgccgacgtggaggccgagctcagggacatcgccaaggccgtggaggccgcgcgccgcggcgaggacggcgcgttccgccggatggccacgcggcgcgagtaccgcccgcacctggtgctcgccgtggccgtgcccatgttcttccagctcacgggcgtcatcgtgctcgccttcttcgcgccgctcgtgttccggaccgtcggcttcgggagcagcgccgcgctcatgggcgccgtcgtactcggcgccgtcaacctgggctccctcgtgctctccaccttcgtcatcgaccggtacggacggaaggtgctcttcatggccggcggcgtacagatggtcgtctgccaggtcgcgattgcttggatcatgggggcgaagatcggcaagggcggcgaggcggcaatggcgcacccgtacgccgtggcggtgctggtgttcacctgcctgcacaccgccgggttcgggtggtcgtggggcccgctggggtgggtgatcccgagcgagatattcccggtggacatccggtcggcagggcaggccatgaacgtctccatcggcctctgtctcaccttcgtgcagacgcagtcgttcctcgccatgctctgccgcttcaagtacgccaccttcgcctactacgccgcctgggtcgccgtcatgaccgtcttcatcgcgctcttcctgccggagaccaagggcatcccgctcgagtccatgggcaccatctgggtgaaacactggtattggaagaggttcgtccacgacagaaagcagagcaacgtggcactgacctaaggacgaacctgtgtgaaatgtggacctgtaagatttttgtgactgacatgccaacgtgtatttatatactcgtcgttgagatttgtgaatttgtggttatgaaagcactcattttctaatatttactatgtactcttttaaagagcgaaggtttgtttctctccgcttctcactccagacaccagtggatcgttatcctatagactttatttcgg

SEQ ID NO: 110652 - protein, 413 aa, Zea mays subsp. mays
  misc_feature (1)..(413): Ceres Seq. ID no. 15180691
YAAQSLNRSSGNHTPGRPSVPRRDGPAAVARLPDRGLPVLPRARGADRQPRELRDGARLLGVARLAGPGGRAGRRHLRRRALPHRHPQQPRDAGARRRGPGGAAPGARARRRRGGRAQGHRQGRGGRAPRRGRRVPPDGHAARVPPAPGARRGRAHVLPAHGRHRARLLRAARVPDRRLREQRRAHGRRRTRRRQPGLPRALHLRHRPVRTEGALHGRRRTDGRLPGRDCLDHGGEDRQGRRGGNGAPVRRGGAGVHLPAHRRVRVVVGPAGVGDPERDIPGGHPVGRAGHERLHRPLSHLRADAVVPRHALPLQVRHLRLLRRLGRRHDRLHRALPAGDQGHPARVHGHHLGETLVLEEVRPRQKAEQRGTDLRTNLCEMWTCKIFVTDMPTCIYILVVEICEFVVMKALIF

SEQ ID NO: 110653 - protein, 350 aa, Zea mays subsp. mays
  misc_feature (1)..(350): Ceres Seq. ID no. 15180692
  misc_feature (1)..(329): Pfam Name: Sugar (and other) transporter Pfam Description: Sugar (and other) transporter
  misc_feature (1)..(341): Homolog of NCBI NO: 34394019 NR Description: putative monosaccharide transporter 3
  misc_feature (1)..(339): Homolog of NCBI NO: 30349813 NR Description: putative monosaccharide-H+ symporter [Medicago
  misc_feature (1)..(338): Homolog of NCBI NO: 15218693 NR Description: monosaccharide transporter, putative [Arabidopsis
  misc_feature (1)..(341): Homolog of NCBI NO: 32489186 NR Description: OSJNBa0027G07.7 [Oryza sativa (japonica
  misc_feature (1)..(343): Homolog of NCBI NO: 21741620 NR Description: OSJNBa0027G07.5 [Oryza sativa (japonica
  misc_feature (1)..(348): Homolog of NCBI NO: 32489187 NR Description: OSJNBa0027G07.8 [Oryza sativa (japonica
  misc_feature (1)..(339): Homolog of NCBI NO: 32489200 NR Description: OSJNBa0027G07.27 [Oryza sativa (japonica
  misc_feature (1)..(339): Homolog of NCBI NO: 21740734 NR Description: OSJNBa0086B14.27 [Oryza sativa (japonica
  misc_feature (1)..(346): Homolog of NCBI NO: 11991110 NR Description: monosaccharide transporter 1 [Oryza sativa]
  misc_feature (1)..(346): Homolog of NCBI NO: 32489184 NR Description: OSJNBa0027G07.4 [Oryza sativa (japonica
MAPPRWRGSLTAGYQFFLALGVLIANLVNYATAHASWGWRVSLGLAGAPAVAIFVGALFLTDTPSSLVMRGRADGARAALLRVRGPDADVEAELRDIAKAVEAARRGEDGAFRRMATRREYRPHLVLAVAVPMFFQLTGVIVLAFFAPLVFRTVGFGSSAALMGAVVLGAVNLGSLVLSTFVIDRYGRKVLFMAGGVQMVVCQVAIAWIMGAKIGKGGEAAMAHPYAVAVLVFTCLHTAGFGWSWGPLGWVIPSEIFPVDIRSAGQAMNVSIGLCLTFVQTQSFLAMLCRFKYATFAYYAAWVAVMTVFIALFLPETKGIPLESMGTIWVKHWYWKRFVHDRKQSNVALT

SEQ ID NO: 110654 - protein, 282 aa, Zea mays subsp. mays
  misc_feature (1)..(282): Ceres Seq. ID no. 15180693
  misc_feature (1)..(261): Pfam Name: Sugar (and other) transporter Pfam Description: Sugar (and other) transporter
  misc_feature (1)..(273): Homolog of NCBI NO: 34394019 NR Description: putative monosaccharide transporter 3
  misc_feature (1)..(271): Homolog of NCBI NO: 30349813 NR Description: putative monosaccharide-H+ symporter [Medicago
  misc_feature (1)..(270): Homolog of NCBI NO: 15218693 NR Description: monosaccharide transporter, putative [Arabidopsis
  misc_feature (1)..(273): Homolog of NCBI NO: 32489186 NR Description: OSJNBa0027G07.7 [Oryza sativa (japonica
  misc_feature (1)..(275): Homolog of NCBI NO: 21741620 NR Description: OSJNBa0027G07.5 [Oryza sativa (japonica
  misc_feature (1)..(280): Homolog of NCBI NO: 32489187 NR Description: OSJNBa0027G07.8 [Oryza sativa (japonica
  misc_feature (1)..(271): Homolog of NCBI NO: 32489200 NR Description: OSJNBa0027G07.27 [Oryza sativa (japonica
  misc_feature (1)..(271): Homolog of NCBI NO: 21740734 NR Description: OSJNBa0086B14.27 [Oryza sativa (japonica
  misc_feature (1)..(278): Homolog of NCBI NO: 11991110 NR Description: monosaccharide transporter 1 [Oryza sativa]
  misc_feature (1)..(278): Homolog of NCBI NO: 32489184 NR Description: OSJNBa0027G07.4 [Oryza sativa (japonica
MRGRADGARAALLRVRGPDADVEAELRDIAKAVEAARRGEDGAFRRMATRREYRPHLVLAVAVPMFFQLTGVIVLAFFAPLVFRTVGFGSSAALMGAVVLGAVNLGSLVLSTFVIDRYGRKVLFMAGGVQMVVCQVAIAWIMGAKIGKGGEAAMAHPYAVAVLVFTCLHTAGFGWSWGPLGWVIPSEIFPVDIRSAGQAMNVSIGLCLTFVQTQSFLAMLCRFKYATFAYYAAWVAVMTVFIALFLPETKGIPLESMGTIWVKHWYWKRFVHDRKQSNVALT

SEQ ID NO: 110655 - DNA, 1062 bp, Zea mays subsp. mays
  misc_feature (1)..(1062): Ceres Seq. ID no. 15225075
gggtcgtcctgaccaattgatggttctgcttctgctttaccactcaatctggttgagagtcgccggcgccggcgattcctcctccaccgattcgcccggcgggagtctccgcagggctcaccgggaccgcgggtccacgatggccgccaacttctggacgtcgtcgcactgcaagcagctgctggaccccgaggacgtggacctggtgccggcggcggaccgggagcgaggcatcacgccggaagagttccgcctcatcaagatccatatgtcgttccatatctggaggctagcacagcaggttaaagttaggcaaagagttgtagctacagcaatatcttacttcaggcgtgtgtatacaaggaagagcatgtcagactatgatcctcgtttggttgcacctacttgtttgtatttggcatctaaggtggaggagagtacagtgcaagcccgacttcttgtattttatataaaaaagatgtgtggttccgatgataagtatcggtttgaaattaaggatattcttgaaatggaaatgaagctcctggaagctctcgactattatttggttgttttccatccatatcgtcctctcttacagttgttgcaggatgctggcataacagacctgacacaatttgcctggggccttgttaatgatacatacaagatggaccttatcctcatataccctccctacatgattgcactggcctgcatatacatagcgagtgttttgaaagataaggacaccacagcatggtttgaagagctccgtgttgacatgaacatagttaagaatatctctatggaaatattagacttctatgacacctacaagattgatcctcaaaggggcatccctgaggataagataagccccgtgatgaacaagttgccggcaaaggcttaactcagatttggcgagcttaggagttgtaaactagtagtaaactacatcatacttccaccatgtgtgtactcagcctgcactgtcgcttgtgacgtgttgatgaactacttgatagattcaatgcaagaaccccatggaattgtttgtac

SEQ ID NO: 110656 - protein, 303 aa, Zea mays subsp. mays
  misc_feature (1)..(303): Ceres Seq. ID no. 15225076
  misc_feature (50)..(190): Pfam Name: Cyclin, N-terminal domain Pfam Description: Cyclin, N-terminal domain
  misc_feature (47)..(300): Homolog of NCBI NO: 11042056 NR Description: dJ199J3.4 (cyclin C) [Homo sapiens]
  misc_feature (47)..(300): Homolog of NCBI NO: 1705767 NR Description: Cyclin C
  misc_feature (46)..(300): Homolog of NCBI NO: 38382739 NR Description: Unknown (protein for IMAGE:6391891) [Mus musculus]
  misc_feature (46)..(300): Homolog of NCBI NO: 4885119 NR Description: cyclin C [Homo sapiens]
  misc_feature (34)..(300): Homolog of NCBI NO: 34783612 NR Description: Unknown (protein for IMAGE:6165083) [Homo sapiens]
  misc_feature (47)..(300): Homolog of NCBI NO: 37681751 NR Description: cyclin C [Danio rerio]
  misc_feature (47)..(302): Homolog of NCBI NO: 28828497 NR Description: similar to Mus musculus (Mouse). 16 days neonate cDNA, RIKEN full-length enriched library, clone:A130067E11
  misc_feature (47)..(299): Homolog of NCBI NO: 15239664 NR Description: cyclin family [Arabidopsis thaliana]
  misc_feature (47)..(302): Homolog of NCBI NO: 15239665 NR Description: cyclin family [Arabidopsis thaliana]
  misc_feature (47)..(303): Homolog of NCBI NO: 3334144 NR Description: G1/S-SPECIFIC CYCLIN C-TYPE
GRPDQLMVLLLLYHSIWLRVAGAGDSSSTDSPGGSLRRAHRDRGSTMAANFWTSSHCKQLLDPEDVDLVPAADRERGITPEEFRLIKIHMSFHIWRLAQQVKVRQRVVATAISYFRRVYTRKSMSDYDPRLVAPTCLYLASKVEESTVQARLLVFYIKKMCGSDDKYRFEIKDILEMEMKLLEALDYYLVVFHPYRPLLQLLQDAGITDLTQFAWGLVNDTYKMDLILIYPPYMIALACIYIASVLKDKDTTAWFEELRVDMNIVKNISMEILDFYDTYKIDPQRGIPEDKISPVMNKLPAKA

SEQ ID NO: 110657 - protein, 297 aa, Zea mays subsp. mays
  misc_feature (1)..(297): Ceres Seq. ID no. 15225077
  misc_feature (44)..(184): Pfam Name: Cyclin, N-terminal domain Pfam Description: Cyclin, N-terminal domain
  misc_feature (41)..(294): Homolog of NCBI NO: 11042056 NR Description: dJ199J3.4 (cyclin C) [Homo sapiens]
  misc_feature (41)..(294): Homolog of NCBI NO: 1705767 NR Description: Cyclin C
  misc_feature (40)..(294): Homolog of NCBI NO: 38382739 NR Description: Unknown (protein for IMAGE:6391891) [Mus musculus]
  misc_feature (40)..(294): Homolog of NCBI NO: 4885119 NR Description: cyclin C [Homo sapiens]
  misc_feature (28)..(294): Homolog of NCBI NO: 34783612 NR Description: Unknown (protein for IMAGE:6165083) [Homo sapiens]
  misc_feature (41)..(294): Homolog of NCBI NO: 37681751 NR Description: cyclin C [Danio rerio]
  misc_feature (41)..(296): Homolog of NCBI NO: 28828497 NR Description: similar to Mus musculus (Mouse). 16 days neonate cDNA, RIKEN full-length enriched library, clone:A130067E11
  misc_feature (41)..(293): Homolog of NCBI NO: 15239664 NR Description: cyclin family [Arabidopsis thaliana]
  misc_feature (41)..(296): Homolog of NCBI NO: 15239665 NR Description: cyclin family [Arabidopsis thaliana]
  misc_feature (41)..(297): Homolog of NCBI NO: 3334144 NR Description: G1/S-SPECIFIC CYCLIN C-TYPE
MVLLLLYHSIWLRVAGAGDSSSTDSPGGSLRRAHRDRGSTMAANFWTSSHCKQLLDPEDVDLVPAADRERGITPEEFRLIKIHMSFHIWRLAQQVKVRQRVVATAISYFRRVYTRKSMSDYDPRLVAPTCLYLASKVEESTVQARLLVFYIKKMCGSDDKYRFEIKDILEMEMKLLEALDYYLVVFHPYRPLLQLLQDAGITDLTQFAWGLVNDTYKMDLILIYPPYMIALACIYIASVLKDKDTTAWFEELRVDMNIVKNISMEILDFYDTYKIDPQRGIPEDKISPVMNKLPAKA

SEQ ID NO: 110658 - protein, 257 aa, Zea mays subsp. mays
  misc_feature (1)..(257): Ceres Seq. ID no. 15225078
  misc_feature (4)..(144): Pfam Name: Cyclin, N-terminal domain Pfam Description: Cyclin, N-terminal domain
  misc_feature (1)..(254): Homolog of NCBI NO: 11042056 NR Description: dJ199J3.4 (cyclin C) [Homo sapiens]
  misc_feature (1)..(254): Homolog of NCBI NO: 1705767 NR Description: Cyclin C
  misc_feature (1)..(254): Homolog of NCBI NO: 38382739 NR Description: Unknown (protein for IMAGE:6391891) [Mus musculus]
  misc_feature (1)..(254): Homolog of NCBI NO: 4885119 NR Description: cyclin C [Homo sapiens]
  misc_feature (1)..(254): Homolog of NCBI NO: 34783612 NR Description: Unknown (protein for IMAGE:6165083) [Homo sapiens]
  misc_feature (1)..(254): Homolog of NCBI NO: 37681751 NR Description: cyclin C [Danio rerio]
  misc_feature (1)..(256): Homolog of NCBI NO: 28828497 NR Description: similar to Mus musculus (Mouse). 16 days neonate cDNA, RIKEN full-length enriched library, clone:A130067E11
  misc_feature (1)..(253): Homolog of NCBI NO: 15239664 NR Description: cyclin family [Arabidopsis thaliana]
  misc_feature (1)..(256): Homolog of NCBI NO: 15239665 NR Description: cyclin family [Arabidopsis thaliana]
  misc_feature (1)..(257): Homolog of NCBI NO: 3334144 NR Description: G1/S-SPECIFIC CYCLIN C-TYPE
MAANFWTSSHCKQLLDPEDVDLVPAADRERGITPEEFRLIKIHMSFHIWRLAQQVKVRQRVVATAISYFRRVYTRKSMSDYDPRLVAPTCLYLASKVEESTVQARLLVFYIKKMCGSDDKYRFEIKDILEMEMKLLEALDYYLVVFHPYRPLLQLLQDAGITDLTQFAWGLVNDTYKMDLILIYPPYMIALACIYIASVLKDKDTTAWFEELRVDMNIVKNISMEILDFYDTYKIDPQRGIPEDKISPVMNKLPAKA

SEQ ID NO: 110659 - DNA, 714 bp, Zea mays subsp. mays
  misc_feature (1)..(714): Ceres Seq. ID no. 15177734
gatcacaggaattcacgtcgatcgcttgagttagtttgcagccaagatgaacgacgccgatgtcgggaagcaggtgcagcagatggtccggttcatcctgcaggaggccgacgagaaagccagcgagatcagtgttgccgccgaggaggagttcagcatcgagaagctgcagctggtggagtcggaaaaacggagggtgcggcaggagtacgagcgccgcacagcctccacagcccgaaaccctcgccgccgatcggtttcggagaagagaagcaaatcaagatgtttctcggctcgctcccgcggcgcccgagcaaggaggctgcttacaagcagctgcggtcgcacatcatcatcatggcctcctgcgccgccgtcatccgcgccaccccttacatcctccatttcctcgcccgcgacggcgacatccaggaactcaagctagatctgtaggcccgtccgttgcttccccacctccagaggtgctacaaaggcaaccgttagttcgagcccactgcaaggtactatggagttagtggctatagtgcctgcttaagtttttttgttgttccaagtttagtgacaaactgacaatggtgtagcaactggcctgtgctgcgacaagtatttcgtttttgcctatctgtatggtctagtctttgtttgcactggtggatttgcagagatgttatcattcaacaatgttctgtggcc

SEQ ID NO: 110660 - protein, 158 aa, Zea mays subsp. mays
  misc_feature (1)..(158): Ceres Seq. ID no. 15177735
MSGSRCSRWSGSSCRRPTRKPARSVLPPRRSSASRSCSWWSRKNGGCGRSTSAAQPPQPETLAADRFRRREANQDVSRLAPAAPEQGGCLQAAAVAHHHHGLLRRRHPRHPLHPPFPRPRRRHPGTQARSVGPSVASPPPEVLQRQPLVRAHCKVLWS

SEQ ID NO: 110661 - protein, 150 aa, Zea mays subsp. mays
  misc_feature (1)..(150): Ceres Seq. ID no. 15177736
DHRNSRRSLELVCSQDERRRCREAGAADGPVHPAGGRRESQRDQCCRRGGVQHREAAAGGVGKTEGAAGVRAPHSLHSPKPSPPIGFGEEKQIKMFLGSLPRRPSKEAAYKQLRSHIIIMASCAAVIRATPYILHFLARDGDIQELKLDL

SEQ ID NO: 110662 - protein, 132 aa, Zea mays subsp. mays
  misc_feature (1)..(132): Ceres Seq. ID no. 15177737
  misc_feature (1)..(58): Homolog of NCBI NO: 20340245 NR Description: vacuolar ATPase subunit E-like protein
  misc_feature (1)..(58): Homolog of NCBI NO: 15237054 NR Description: H+-transporting ATPase chain E, vacuolar
  misc_feature (1)..(58): Homolog of NCBI NO: 3334411 NR Description: Vacuolar ATP synthase subunit E (V-ATPase E
  misc_feature (1)..(58): Homolog of NCBI NO: 4099150 NR Description: YLP [Hordeum vulgare]
  misc_feature (1)..(58): Homolog of NCBI NO: 4099148 NR Description: YLP [Hordeum vulgare]
  misc_feature (1)..(58): Homolog of NCBI NO: 3334405 NR Description: Vacuolar ATP synthase subunit E (V-ATPase E
  misc_feature (1)..(58): Homolog of NCBI NO: 12585492 NR Description: Vacuolar ATP synthase subunit E (V-ATPase E
  misc_feature (1)..(58): Homolog of NCBI NO: 12585474 NR Description: Vacuolar ATP synthase subunit E (V-ATPase E
  misc_feature (1)..(58): Homolog of NCBI NO: 34912000 NR Description: putative YLP [Oryza sativa (japonica
  misc_feature (1)..(58): Homolog of NCBI NO: 5565981 NR Description: unknown [Zea mays]
MNDADVGKQVQQMVRFILQEADEKASEISVAAEEEFSIEKLQLVESEKRRVRQEYERRTASTARNPRRRSVSEKRSKSRCFSARSRGARARRLLTSSCGRTSSSWPPAPPSSAPPLTSSISSPATATSRNSS

SEQ ID NO: 110663 - DNA, 1613 bp, Zea mays subsp. mays
  misc_feature (1)..(1613): Ceres Seq. ID no. 15179290
  misc_feature: MA Experiment ID: 108523 Result: Down-regulated in Transcription
  misc_feature: MA Experiment 108523 PARAMETER Experiment Name: Zm_42deg_Heat_P Parameter: Age (day) Value: 8
  misc_feature: MA Experiment 108523 PARAMETER Experiment Name: Zm_42deg_Heat_P Parameter: Organism Value: Zea mays
  misc_feature: MA Experiment 108523 PARAMETER Experiment Name: Zm_42deg_Heat_P Parameter: Plant Line Value: 35A19
  misc_feature: MA Experiment 108523 PARAMETER Experiment Name: Zm_42deg_Heat_P Parameter: Temperature (deg C) Value: 42 vs. 22
  misc_feature: MA Experiment 108523 PARAMETER Experiment Name: Zm_42deg_Heat_P Parameter: Timepoint (hr) Value: 6
  misc_feature: MA Experiment 108523 PARAMETER Experiment Name: Zm_42deg_Heat_P Parameter: Tissue Value: Aerial
  misc_feature: MA Experiment ID: 108527 Result: Down-regulated in Transcription
  misc_feature: MA Experiment 108527 PARAMETER Experiment Name: Zm_5mM_NO_P Parameter: Age (day) Value: 8
  misc_feature: MA Experiment 108527 PARAMETER Experiment Name: Zm_5mM_NO_P Parameter: Organism Value: Zea mays
  misc_feature: MA Experiment 108527 PARAMETER Experiment Name: Zm_5mM_NO_P Parameter: Plant Line Value: 35A19
  misc_feature: MA Experiment 108527 PARAMETER Experiment Name: Zm_5mM_NO_P Parameter: Timepoint (hr) Value: 6
  misc_feature: MA Experiment 108527 PARAMETER Experiment Name: Zm_5mM_NO_P Parameter: Tissue Value: Aerial
  misc_feature: MA Experiment 108527 PARAMETER Experiment Name: Zm_5mM_NO_P Parameter: Treatment Value: 5mM NO vs. No Treatment
  misc_feature: MA Experiment ID: 108528 Result: Up-regulated in Transcription
  misc_feature: MA Experiment 108528 PARAMETER Experiment Name: Zm_Imbibed_Seeds_P Parameter: Age (day) Value: 5 vs. 2
  misc_feature: MA Experiment 108528 PARAMETER Experiment Name: Zm_Imbibed_Seeds_P Parameter: Organism Value: Zea mays
  misc_feature: MA Experiment 108528 PARAMETER Experiment Name: Zm_Imbibed_Seeds_P Parameter: Plant Line Value: 35A19
  misc_feature: MA Experiment 108528 PARAMETER Experiment Name: Zm_Imbibed_Seeds_P Parameter: Tissue Value: Aerial vs. Embryo
  misc_feature: MA Experiment ID: 108530 Result: Up-regulated in Transcription
  misc_feature: MA Experiment 108530 PARAMETER Experiment Name: Zm_Imbibed_Seeds_P Parameter: Age (day) Value: 6 vs. 2
  misc_feature: MA Experiment 108530 PARAMETER Experiment Name: Zm_Imbibed_Seeds_P Parameter: Organism Value: Zea mays
  misc_feature: MA Experiment 108530 PARAMETER Experiment Name: Zm_Imbibed_Seeds_P Parameter: Plant Line Value: 35A19
  misc_feature: MA Experiment 108530 PARAMETER Experiment Name: Zm_Imbibed_Seeds_P Parameter: Tissue Value: Aerial vs. Embryo
  misc_feature: MA Experiment ID: 108545 Result: Up-regulated in Transcription
  misc_feature: MA Experiment 108545 PARAMETER Experiment Name: Zm_Imbibed_Seeds_P Parameter: Age (day) Value: 3 vs. 2
  misc_feature: MA Experiment 108545 PARAMETER Experiment Name: Zm_Imbibed_Seeds_P Parameter: Organism Value: Zea mays
  misc_feature: MA Experiment 108545 PARAMETER Experiment Name: Zm_Imbibed_Seeds_P Parameter: Plant Line Value: 35A19
  misc_feature: MA Experiment 108545 PARAMETER Experiment Name: Zm_Imbibed_Seeds_P Parameter: Tissue Value: Aerial vs. Embryo
  misc_feature: MA Experiment ID: 108547 Result: Up-regulated in Transcription
  misc_feature: MA Experiment 108547 PARAMETER Experiment Name: Zm_Imbibed_Seeds_P Parameter: Age (day) Value: 4 vs. 2
  misc_feature: MA Experiment 108547 PARAMETER Experiment Name: Zm_Imbibed_Seeds_P Parameter: Organism Value: Zea mays
  misc_feature: MA Experiment 108547 PARAMETER Experiment Name: Zm_Imbibed_Seeds_P Parameter: Plant Line Value: 35A19
  misc_feature: MA Experiment 108547 PARAMETER Experiment Name: Zm_Imbibed_Seeds_P Parameter: Tissue Value: Aerial vs. Embryo
  misc_feature: MA Experiment ID: 108559 Result: Down-regulated in Transcription
  misc_feature: MA Experiment 108559 PARAMETER Experiment Name: Zm_5mM_NO_P Parameter: Age (day) Value: 8
  misc_feature: MA Experiment 108559 PARAMETER Experiment Name: Zm_5mM_NO_P Parameter: Organism Value: Zea mays
  misc_feature: MA Experiment 108559 PARAMETER Experiment Name: Zm_5mM_NO_P Parameter: Plant Line Value: 35A19
  misc_feature: MA Experiment 108559 PARAMETER Experiment Name: Zm_5mM_NO_P Parameter: Timepoint (hr) Value: 12
  misc_feature: MA Experiment 108559 PARAMETER Experiment Name: Zm_5mM_NO_P Parameter: Tissue Value: Aerial
  misc_feature: MA Experiment 108559 PARAMETER Experiment Name: Zm_5mM_NO_P Parameter: Treatment Value: 5mM NO vs. No Treatment
aacgaccgccgatctctcccacacagacacaggtcacacgcacactgcagcgtggcgcggctactccccgccatggccaccacctccgtcgccgcctcctctccccatccccatctgtcccgcccccgccggcggaactccagcgccacctccagagcctcgatccggggctgcctcctgcccatccgatgctcgtccgcctcgtcgtcgcaaccgccggcaaccggcggtgaggagggagagtcggggcgccggcggctgtcgaagtagtcgtcgtgggaggacagagatgtggagggggacgactacctctaccgcctcgggaaggaggctgacaacttgaacatcaccgtcggcgcacggtccggcatcgtcgacgaactcttcgtcggaaacttcctcgggaaagactcggatatcgtgttcgactaccggcagaaggcaactagaacgttcgagtacctgcagggggattactacatcgcacctgccttcctcgataaagttgcatgccacattgtaaagaactacattgcgcatcttcttaataatatcaaggttcccctaatacttgggatctggggcggaaaaggccaagggaaaacattccagactgaacttatatttagagcaatgggtgtggagccagtaattatgtctgcaggcgaactagaatctgaaaaagcaggtgaacccgggaggctaatacgtgatagatacagaactgcctcccaagtaatccaaaaccaagggaaaatgagttgcttgatgatcaacgatctagatgctggtgttggaagatttggaaacacacagatgacggtcaataatcaaatagctgttggaactttgatgaatttggcagataatcctactagggtgagcatcggccagaaatggagagaatctgatgttacacacagggtgccaataatagttactggaaatgatttttcaactctatatgcacccttaattcgtgatgggagaatggaaaaattctactggcagcccaaccgtgaagatataattagtattgttcatggcatgtatataaaggatggattatctgttgaagaagtatcaagaattgtagacgcatttccaaaccaagctctggacttctatggagctttgagatccaggacatatgatcaggctatcttggagtgggtcgaagaaatcggtgggcatgaacagctaactgagaagcttcttaagcgaaagaaaggcgaggagcttccaacgtttatacccccaaagccaacactggaagcattgattgagtcagggtactcgctggtgaaggagcaggaactaataatgagctccaagctttcaagagagtatatgaagaacttagaatagtttgtgatacacgagaggggtaacttgttgttttcagtttatttggagcaataatacaccatccaatttgtcccagctgcattttttttgggggggggggagggggatttgcctccgatccaacatccaaccaccagagtggaatcggtgcttcgattctcccagaaatcgtggtgggttcagatatgaactgctgaaaggaacgcatatcgtcattgtccttaattactctcatcgtgcattgc

SEQ ID NO: 110664 - protein, 244 aa, Zea mays subsp. mays
  misc_feature (1)..(244): Ceres Seq. ID no. 15179291
  misc_feature (1)..(150): Pfam Name: ATPase family associated with various cellular Pfam Description: ATPase family associated with various cellular
  misc_feature (1)..(240): Homolog of NCBI NO: 3914603 NR Description: Ribulose bisphosphate carboxylase/oxygenase
  misc_feature (1)..(240): Homolog of NCBI NO: 29429152 NR Description: Ribulose bisphosphate carboxylase/oxygenase
  misc_feature (1)..(241): Homolog of NCBI NO: 10720247 NR Description: Ribulose bisphosphate carboxylase/oxygenase
  misc_feature (1)..(240): Homolog of NCBI NO: 32481067 NR Description: Rubisco activase beta form precursor [Larrea
  misc_feature (1)..(240): Homolog of NCBI NO: 8918361 NR Description: RuBisCO activase small isoform precursor [Oryza
  misc_feature (1)..(240): Homolog of NCBI NO: 8918359 NR Description: RuBisCO activase large isoform precursor
  misc_feature (1)..(244): Homolog of NCBI NO: 25535799 NR Description: ribulose-bisphosphate carboxylase activase (EC
  misc_feature (1)..(244): Homolog of NCBI NO: 15219376 NR Description: rubisco activase -related [Arabidopsis thaliana]
  misc_feature (1)..(244): Homolog of NCBI NO: 19387266 NR Description: putative rubisco activase
  misc_feature (1)..(244): Homolog of NCBI NO: 38346401 NR Description: OSJNBa0011F23.7 [Oryza sativa (japonica
MGVEPVIMSAGELESEKAGEPGRLIRDRYRTASQVIQNQGKMSCLMINDLDAGVGRFGNTQMTVNNQIAVGTLMNLADNPTRVSIGQKWRESDVTHRVPIIVTGNDFSTLYAPLIRDGRMEKFYWQPNREDIISIVHGMYIKDGLSVEEVSRIVDAFPNQALDFYGALRSRTYDQAILEWVEEIGGHEQLTEKLLKRKKGEELPTFIPPKPTLEALIESGYSLVKEQELIMSSKLSREYMKNLE

SEQ ID NO: 110665 - protein, 237 aa, Zea mays subsp. mays
  misc_feature (1)..(237): Ceres Seq. ID no. 15179292
  misc_feature (1)..(143): Pfam Name: ATPase family associated with various cellular Pfam Description: ATPase family associated with various cellular
  misc_feature (1)..(237): Homolog of NCBI NO: 15219376 NR Description: rubisco activase -related [Arabidopsis thaliana]
  misc_feature (1)..(237): Homolog of NCBI NO: 19387266 NR Description: putative rubisco activase
  misc_feature (1)..(233): Homolog of NCBI NO: 29429152 NR Description: Ribulose bisphosphate carboxylase/oxygenase
  misc_feature (1)..(233): Homolog of NCBI NO: 32481067 NR Description: Rubisco activase beta form precursor [Larrea
  misc_feature (1)..(233): Homolog of NCBI NO: 8918359 NR Description: RuBisCO activase large isoform precursor
  misc_feature (1)..(237): Homolog of NCBI NO: 25535799 NR Description: ribulose-bisphosphate carboxylase activase (EC
  misc_feature (1)..(233): Homolog of NCBI NO: 8918361 NR Description: RuBisCO activase small isoform precursor [Oryza
  misc_feature (1)..(234): Homolog of NCBI NO: 10720247 NR Description: Ribulose bisphosphate carboxylase/oxygenase
  misc_feature (1)..(233): Homolog of NCBI NO: 3914603 NR Description: Ribulose bisphosphate carboxylase/oxygenase
  misc_feature (1)..(237): Homolog of NCBI NO: 38346401 NR Description: OSJNBa0011F23.7 [Oryza sativa (japonica
MSAGELESEKAGEPGRLIRDRYRTASQVIQNQGKMSCLMINDLDAGVGRFGNTQMTVNNQIAVGTLMNLADNPTRVSIGQKWRESDVTHRVPIIVTGNDFSTLYAPLIRDGRMEKFYWQPNREDIISIVHGMYIKDGLSVEEVSRIVDAFPNQALDFYGALRSRTYDQAILEWVEEIGGHEQLTEKLLKRKKGEELPTFIPPKPTLEALIESGYSLVKEQELIMSSKLSREYMKNLE

SEQ ID NO: 110666 - protein, 203 aa, Zea mays subsp. mays
  misc_feature (1)..(203): Ceres Seq. ID no. 15179293
  misc_feature (1)..(109): Pfam Name: ATPase family associated with various cellular Pfam Description: ATPase family associated with various cellular
  misc_feature (1)..(199): Homolog of NCBI NO: 3914603 NR Description: Ribulose bisphosphate carboxylase/oxygenase
  misc_feature (1)..(199): Homolog of NCBI NO: 29429152 NR Description: Ribulose bisphosphate carboxylase/oxygenase
  misc_feature (1)..(200): Homolog of NCBI NO: 10720247 NR Description: Ribulose bisphosphate carboxylase/oxygenase
  misc_feature (1)..(199): Homolog of NCBI NO: 32481067 NR Description: Rubisco activase beta form precursor [Larrea
  misc_feature (1)..(199): Homolog of NCBI NO: 8918361 NR Description: RuBisCO activase small isoform precursor [Oryza
  misc_feature (1)..(199): Homolog of NCBI NO: 8918359 NR Description: RuBisCO activase large isoform precursor
  misc_feature (1)..(203): Homolog of NCBI NO: 25535799 NR Description: ribulose-bisphosphate carboxylase activase (EC
  misc_feature (1)..(203): Homolog of NCBI NO: 15219376 NR Description: rubisco activase -related [Arabidopsis thaliana]
  misc_feature (1)..(203): Homolog of NCBI NO: 19387266 NR Description: putative rubisco activase
  misc_feature (1)..(203): Homolog of NCBI NO: 38346401 NR Description: OSJNBa0011F23.7 [Oryza sativa (japonica
MSCLMINDLDAGVGRFGNTQMTVNNQIAVGTLMNLADNPTRVSIGQKWRESDVTHRVPIIVTGNDFSTLYAPLIRDGRMEKFYWQPNREDIISIVHGMYIKDGLSVEEVSRIVDAFPNQALDFYGALRSRTYDQAILEWVEEIGGHEQLTEKLLKRKKGEELPTFIPPKPTLEALIESGYSLVKEQELIMSSKLSREYMKNLE

SEQ ID NO: 110667 - DNA, 908 bp, Zea mays subsp. mays
  misc_feature (1)..(908): Ceres Seq. ID no. 15179256
cggctccctgtggcccgcggcgtgagcgtgtcgtgtcccgcagggccacctttgctctctaaccccttccaccacacgcgaccgccgtccccgcgcgagttgccgaacccacgtctcccctcgccccgcgccgaccctaccaaccctcgggcccgcccatggagatctccgcctccgctgcgccggccgcctcctccccgcccgccaggccgctggtcctgcgcccgttcgcctcgtcatcgccccacccggctacgtcctcctcgaccaccatccgccgccgcccatcctcatcggccactgccacggtccgccgccgcgcgcgcacccgtccccgtacagggcggtccaagccccccgccgacgcgggcgactacttctccggcaacgacggccccggtctcggtggttccggcggcggtgacggaggaggaccggtggagctggaacagcgggttcggctctggatcagacggccccgacgactgggagcccgatgtgccggcgccccggaggtcagcggcggatgcggcgctcggggtcgtctacgagctcatgtgcctcatcgcgctctccaactgcacccagttcgccgtccgcaggctcgcgggcctcctctccgcccgcgtcgccgcattgcgattcgtccccaccgtctgctgatcatccgtgggggtttgttttacttcctcttcctcctgcccgtctacctgaaatcgcttctgtacatatatcagcctgcaactgcggttttaggggattggggccttgggggaatcaggacctctgcctgttgttcctgcggtgcgtgcctcaacgcattataccgttgaacagtagcaaaattcgtcgaatccaattggagaaacacaaaaataagatcaacttgtttatcctttgttgtaccc

SEQ ID NO: 110668 - protein, 224 aa, Zea mays subsp. mays
  misc_feature (1)..(224): Ceres Seq. ID no. 15179257
MEISASAAPAASSPPARPLVLRPFASSSPHPATSSSTTIRRRPSSSATATVRRRARTRPRTGRSKPPADAGDYFSGNDGPGLGGSGGGDGGGPVELEQRVRLWIRRPRRLGARCAGAPEVSGGCGARGRLRAHVPHRALQLHPVRRPQARGPPLRPRRRIAIRPHRLLIIRGGLFYFLFLLPVYLKSLLYIYQPATAVLGDWGLGGIRTSACCSCGACLNALYR

SEQ ID NO: 110669 - protein, 220 aa, Zea mays subsp. mays
  misc_feature (1)..(220): Ceres Seq. ID no. 15179258
  misc_feature (28)..(140): Pfam Name: Formin Homology 2 Domain Pfam Description: Formin Homology 2 Domain
  misc_feature (1)..(133): Homolog of NCBI NO: 81286 NR Description: extensin - Volvox carteri (fragment)
  misc_feature (9)..(142): Homolog of NCBI NO: 7441828 NR Description: extensin-like cell wall protein - sea-island
  misc_feature (8)..(128): Homolog of NCBI NO: 81286 NR Description: extensin - Volvox carteri (fragment)
  misc_feature (10)..(145): Homolog of NCBI NO: 81286 NR Description: extensin - Volvox carteri (fragment)
  misc_feature (13)..(140): Homolog of NCBI NO: 27375632 NR Description: blr0521 [Bradyrhizobium japonicum]
  misc_feature (13)..(183): Homolog of NCBI NO: 20138131 NR Description: Vegetative cell wall protein gp1 precursor
  misc_feature (11)..(138): Homolog of NCBI NO: 6523547 NR Description: hydroxyproline-rich glycoprotein DZ-HRGP
  misc_feature (13)..(133): Homolog of NCBI NO: 6523547 NR Description: hydroxyproline-rich glycoprotein DZ-HRGP
  misc_feature (13)..(143): Homolog of NCBI NO: 2129478 NR Description: chitinase (EC 3.2.1.14) precursor - beet
  misc_feature (12)..(143): Homolog of NCBI NO: 2129478 NR Description: chitinase (EC 3.2.1.14) precursor - beet
RLPVARGVSVSCPAGPPLLSNPFHHTRPPSPRELPNPRLPSPRADPTNPRARPWRSPPPLRRPPPPRPPGRWSCARSPRHRPTRLRPPRPPSAAAHPHRPLPRSAAARAPVPVQGGPSPPPTRATTSPATTAPVSVVPAAVTEEDRWSWNSGFGSGSDGPDDWEPDVPAPRRSAADAALGVVYELMCLIALSNCTQFAVRRLAGLLSARVAALRFVPTVC

SEQ ID NO: 110670 - protein, 137 aa, Zea mays subsp. mays
  misc_feature (1)..(137): Ceres Seq. ID no. 15179259
  misc_feature (19)..(72): Pfam Name: Formin Homology 2 Domain Pfam Description: Formin Homology 2 Domain
MCRRPGGQRRMRRSGSSTSSCASSRSPTAPSSPSAGSRASSPPASPHCDSSPPSADHPWGFVLLPLPPARLPEIASVHISACNCGFRGLGPWGNQDLCLLFLRCVPQRIIPLNSSKIRRIQLEKHKNKINLFILCCT

SEQ ID NO: 110671 - DNA, 1319 bp, Zea mays subsp. mays
  misc_feature (1)..(1319): Ceres Seq. ID no. 15226642
gtagaacacagcatctccggtagcgtcaccgtaggcctcgcaagtaaactgacctgccttctccgctttcccctccgtctccgtcgggagtcgagacaaagggagccagagttagtcccggcgccgtgtcgcgagcggaaggagaaggactgaaggaggcgacgatgcaggtgaagcagaaggtctacgagttctacaaaggcacggtggagcgggtcacggccccgcgcaccgtctccgcgttcctcgagaagggcgtcctctccgtccccgagttcattctcgccggcgacaacctcgtcgccaagtgccccacctggtcctgggaagcgggcgatccaagcaagaggaagccgtatctccccgccaataagcagttcctcgtcacccgtaatgtgccctgtttaagacgtgccatctcggttgaggaagagtatgatgcagcaggagcagaggtggttctcgatgaggatggcgaaggctggcttgcaacacatggagtgcaagcatcaaagacagaagaggaggaagacattccctctatggacaccttggacatagggagatctgatggaataaagtctatcccctcttactttagcggtggcaaggatgaagaggaggaagatatacctgacatggatacttatgaagacacaggggataatttggctgctgctgaaccatcatactttatcgcagaagaaccacaagatgacaacattcttcataccagaacatatgatgttagcataacgtatgacaagtactaccaaactccacgtgtctggctaactggatatgacgagtcaagaatgccattaatgcctgaacttgtgtttgaagacatcagccaagaccacgcacgaaaaacggtgactattgaggaccatcctcacttattggctgggaagcatgcatcagtgcacccatgcaaacatgcagctgtgatgaaaaagatcatcgacgttccaatgtcggggggagtggaaccagaagttgacaagtaccttttcatatttttgaaattcatagcgacagtcataccgactattgagtacgattatacaatggacgtcgaccttggcagtacaagctgattattggttggcttgaagcttgtcacttgtctcgggaaaaggaagcaccctaccagaaggcgcaggaagaaggctgaattgcgtgtttgtggttgaacatttgtgcatatgtgcttgttccttggatcggtttgcatttgtgaacaaactctgaaaagctcaaaggcaagacccatcttgtacattctgtgacgctgtcagcttgtgaatccattcgtc

SEQ ID NO: 110672 - protein, 311 aa, Zea mays subsp. mays
  misc_feature (1)..(311): Ceres Seq. ID no. 15226643
  misc_feature (6)..(158): Pfam Name: Autophagocytosis associated protein, N-terminal domain Pfam Description: Autophagocytosis associated protein, N-terminal
  misc_feature (5)..(302): Homolog of NCBI NO: 19705511 NR Description: preconditioning-inducible gene 1 protein [Rattus
  misc_feature (5)..(302): Homolog of NCBI NO: 13385890 NR Description: autophagy Apg3p/Aut1p-like [Mus musculus]
  misc_feature (13)..(302): Homolog of NCBI NO: 34785406 NR Description: Unknown (protein for MGC:64156) [Danio rerio]
  misc_feature (184)..(306): Homolog of NCBI NO: 28828597 NR Description: hypothetical protein [Dictyostelium discoideum]
  misc_feature (4)..(173): Homolog of NCBI NO: 28828597 NR Description: hypothetical protein [Dictyostelium discoideum]
  misc_feature (1)..(231): Homolog of NCBI NO: 37536838 NR Description: autophagocytosis protein AUT1-like
  misc_feature (1)..(311): Homolog of NCBI NO: 9758466 NR Description: autophagocytosis protein AUT1-like [Arabidopsis
  misc_feature (1)..(311): Homolog of NCBI NO: 21595613 NR Description: autophagocytosis protein-like [Arabidopsis
  misc_feature (1)..(311): Homolog of NCBI NO: 18424474 NR Description: autophagocytosis protein - like [Arabidopsis
  misc_feature (1)..(311): Homolog of NCBI NO: 34903638 NR Description: B1015E06.2 [Oryza sativa (japonica
MQVKQKVYEFYKGTVERVTAPRTVSAFLEKGVLSVPEFILAGDNLVAKCPTWSWEAGDPSKRKPYLPANKQFLVTRNVPCLRRAISVEEEYDAAGAEVVLDEDGEGWLATHGVQASKTEEEEDIPSMDTLDIGRSDGIKSIPSYFSGGKDEEEEDIPDMDTYEDTGDNLAAAEPSYFIAEEPQDDNILHTRTYDVSITYDKYYQTPRVWLTGYDESRMPLMPELVFEDISQDHARKTVTIEDHPHLLAGKHASVHPCKHAAVMKKIIDVPMSGGVEPEVDKYLFIFLKFIATVIPTIEYDYTMDVDLGSTS

SEQ ID NO: 110673 - protein, 185 aa, Zea mays subsp. mays
  misc_feature (1)..(185): Ceres Seq. ID no. 15226644
  misc_feature (59)..(177): Pfam Name: Autophagocytosis associated protein, C-terminal domain Pfam Description: Autophagocytosis associated protein, C-terminal
  misc_feature (1)..(176): Homolog of NCBI NO: 19705511 NR Description: preconditioning-inducible gene 1 protein [Rattus
  misc_feature (1)..(176): Homolog of NCBI NO: 13385890 NR Description: autophagy Apg3p/Aut1p-like [Mus musculus]
  misc_feature (1)..(176): Homolog of NCBI NO: 34785406 NR Description: Unknown (protein for MGC:64156) [Danio rerio]
  misc_feature (58)..(180): Homolog of NCBI NO: 28828597 NR Description: hypothetical protein [Dictyostelium discoideum]
  misc_feature (1)..(47): Homolog of NCBI NO: 28828597 NR Description: hypothetical protein [Dictyostelium discoideum]
  misc_feature (1)..(105): Homolog of NCBI NO: 37536838 NR Description: autophagocytosis protein AUT1-like
  misc_feature (1)..(185): Homolog of NCBI NO: 9758466 NR Description: autophagocytosis protein AUT1-like [Arabidopsis
  misc_feature (1)..(185): Homolog of NCBI NO: 21595613 NR Description: autophagocytosis protein-like [Arabidopsis
  misc_feature (1)..(185): Homolog of NCBI NO: 18424474 NR Description: autophagocytosis protein - like [Arabidopsis
  misc_feature (1)..(185): Homolog of NCBI NO: 34903638 NR Description: B1015E06.2 [Oryza sativa (japonica
MDTLDIGRSDGIKSIPSYFSGGKDEEEEDIPDMDTYEDTGDNLAAAEPSYFIAEEPQDDNILHTRTYDVSITYDKYYQTPRVWLTGYDESRMPLMPELVFEDISQDHARKTVTIEDHPHLLAGKHASVHPCKHAAVMKKIIDVPMSGGVEPEVDKYLFIFLKFIATVIPTIEYDYTMDVDLGSTS

SEQ ID NO: 110674 - DNA, 1526 bp, Zea mays subsp. mays
  misc_feature (1)..(1526): Ceres Seq. ID no. 15226209
caaagatataatttcagatctaaaagatggccaggcttccttagtttgtgatggtctgtttttttcatgtaagatgtgcatgtcatatactaaatttagttgctagagatggcctgaaagtaatttcgaaaacaattgacaagatcaaagctcttgtactagctgtgaagggatctccattgcagtggaaggaacttatgaagtgtgctagcgagtcagaattagatacaaagaggggcatctcacttgatgtttcagcaagatggaattcaacttatttaatgctgcgggatgccttgtactacaaggatgcttttgcaaggcttaagtcttcaaatcgtcatatgtatgtaaaaaattatccatctccggatgagtgggacatggcactaaaaatctttcaatgcttgaaaaaagtttatagtctcgctgaaattctctctggcacttcatatccaacagcaaacttgttctatagaggtttttgtgacataaaagtattgctagatgactggtgttctagtgatgatgccaccatcagtgaaatggcaattgccatgagtcaaaaaattgagaaatattgggaacattctaacttggctcttgctgtggcatgctttcttgatcctcgatacaagaaaaaagttatagagtattacatgaagaaattccacggtgatgggtaccatgtggaacttgaaaaaattgttaatgtggtaagagggctctattgtttttattctagctctacacctgcaccagcaaagagtacatcaccggaaccagctaatagtgcatcagatattttaatggcaagtgtatctgatgaactggacagttttctgtatggtacaaatgaacctactctagttcggtccaatgagttggaaaagtacatggcagatccacttttgcgtcttggtggtccatttgatggcccatttgatattttagcgtggtggaagagcaagagggaagtgtatcctattctttcacaaattgttcgagatgtgatggccatacaagtatcaacggttgcatctgaatctgtttttaatgctgctggccgttttgttgatccttatcgtaatcgtcttgagccggagatggtagaggcattgatatgcaccaaagattggatagctgcagaaagaaaagattctaagattgttggttcaattgtgagtgaccttgaaattgagactttatctaccgtcatggctaacaaaataagagctgttgatgacaaggacatagaatggaaggaccaggagcatgatggtgagaacgaatatattgatagtgatcttgatgttatggatgaccacaatgaactttgagctatagctgtaggcttctagtttcagcttaatgtctactgcctttgagttactatgttatgtgtcttgggacttttataaactattatcgtgattgtgcatttgtgggtgtctgcttaattaattagacattgatgttgacttgttatatactccgtccgtcccaaaatatagctgtttctagtc

SEQ ID NO: 110675 - protein, 429 aa, Zea mays subsp. mays
  misc_feature (1)..(429): Ceres Seq. ID no. 15226210
  misc_feature (278)..(364): Pfam Name: hAT family dimerisation domain Pfam Description: hAT family dimerisation domain
  misc_feature (1)..(363): Homolog of NCBI NO: 4580990 NR Description: putative transposase [Arabidopsis thaliana]
  misc_feature (166)..(369): Homolog of NCBI NO: 7489762 NR Description: hypothetical protein - maize transposable element
  misc_feature (4)..(245): Homolog of NCBI NO: 29788816 NR Description: putative transposase [Oryza sativa (japonica
  misc_feature (4)..(384): Homolog of NCBI NO: 37532082 NR Description: putative transposase [Oryza sativa (japonica
  misc_feature (1)..(410): Homolog of NCBI NO: 38344876 NR Description: OSJNBa0020P07.19 [Oryza sativa (japonica
  misc_feature (1)..(403): Homolog of NCBI NO: 37532356 NR Description: putative activator-like transposable element
  misc_feature (1)..(101): Homolog of NCBI NO: 136140 NR Description: PUTATIVE AC9 TRANSPOSASE
  misc_feature (105)..(390): Homolog of NCBI NO: 136140 NR Description: PUTATIVE AC9 TRANSPOSASE
  misc_feature (4)..(392): Homolog of NCBI NO: 1091678 NR Description: activator-like transposable element
  misc_feature (1)..(410): Homolog of NCBI NO: 136125 NR Description: PUTATIVE AC TRANSPOSASE (ORFA)
MVCFFHVRCACHILNLVARDGLKVISKTIDKIKALVLAVKGSPLQWKELMKCASESELDTKRGISLDVSARWNSTYLMLRDALYYKDAFARLKSSNRHMYVKNYPSPDEWDMALKIFQCLKKVYSLAEILSGTSYPTANLFYRGFCDIKVLLDDWCSSDDATISEMAIAMSQKIEKYWEHSNLALAVACFLDPRYKKKVIEYYMKKFHGDGYHVELEKIVNVVRGLYCFYSSSTPAPAKSTSPEPANSASDILMASVSDELDSFLYGTNEPTLVRSNELEKYMADPLLRLGGPFDGPFDILAWWKSKREVYPILSQIVRDVMAIQVSTVASESVFNAAGRFVDPYRNRLEPEMVEALICTKDWIAAERKDSKIVGSIVSDLEIETLSTVMANKIRAVDDKDIEWKDQEHDGENEYIDSDLDVMDDHNEL

SEQ ID NO: 110676 - protein, 380 aa, Zea mays subsp. mays
  misc_feature (1)..(380): Ceres Seq. ID no. 15226211
  misc_feature (229)..(315): Pfam Name: hAT family dimerisation domain Pfam Description: hAT family dimerisation domain
  misc_feature (1)..(314): Homolog of NCBI NO: 4580990 NR Description: putative transposase [Arabidopsis thaliana]
  misc_feature (117)..(320): Homolog of NCBI NO: 7489762 NR Description: hypothetical protein - maize transposable element
  misc_feature (1)..(196): Homolog of NCBI NO: 29788816 NR Description: putative transposase [Oryza sativa (japonica
  misc_feature (1)..(335): Homolog of NCBI NO: 37532082 NR Description: putative transposase [Oryza sativa (japonica
  misc_feature (1)..(361): Homolog of NCBI NO: 38344876 NR Description: OSJNBa0020P07.19 [Oryza sativa (japonica
  misc_feature (1)..(354): Homolog of NCBI NO: 37532356 NR Description: putative activator-like transposable element
  misc_feature (1)..(52): Homolog of NCBI NO: 136140 NR Description: PUTATIVE AC9 TRANSPOSASE
  misc_feature (56)..(341): Homolog of NCBI NO: 136140 NR Description: PUTATIVE AC9 TRANSPOSASE
  misc_feature (1)..(343): Homolog of NCBI NO: 1091678 NR Description: activator-like transposable element
  misc_feature (1)..(361): Homolog of NCBI NO: 136125 NR Description: PUTATIVE AC TRANSPOSASE (ORFA)
MKCASESELDTKRGISLDVSARWNSTYLMLRDALYYKDAFARLKSSNRHMYVKNYPSPDEWDMALKIFQCLKKVYSLAEILSGTSYPTANLFYRGFCDIKVLLDDWCSSDDATISEMAIAMSQKIEKYWEHSNLALAVACFLDPRYKKKVIEYYMKKFHGDGYHVELEKIVNVVRGLYCFYSSSTPAPAKSTSPEPANSASDILMASVSDELDSFLYGTNEPTLVRSNELEKYMADPLLRLGGPFDGPFDILAWWKSKREVYPILSQIVRDVMAIQVSTVASESVFNAAGRFVDPYRNRLEPEMVEALICTKDWIAAERKDSKIVGSIVSDLEIETLSTVMANKIRAVDDKDIEWKDQEHDGENEYIDSDLDVMDDHNEL

SEQ ID NO: 110677 - protein, 352 aa, Zea mays subsp. mays
  misc_feature (1)..(352): Ceres Seq. ID no. 15226212
  misc_feature (201)..(287): Pfam Name: hAT family dimerisation domain Pfam Description: hAT family dimerisation domain
  misc_feature (1)..(286): Homolog of NCBI NO: 4580990 NR Description: putative transposase [Arabidopsis thaliana]
  misc_feature (89)..(292): Homolog of NCBI NO: 7489762 NR Description: hypothetical protein - maize transposable element
  misc_feature (1)..(168): Homolog of NCBI NO: 29788816 NR Description: putative transposase [Oryza sativa (japonica
  misc_feature (1)..(307): Homolog of NCBI NO: 37532082 NR Description: putative transposase [Oryza sativa (japonica
  misc_feature (1)..(333): Homolog of NCBI NO: 38344876 NR Description: OSJNBa0020P07.19 [Oryza sativa (japonica
  misc_feature (1)..(326): Homolog of NCBI NO: 37532356 NR Description: putative activator-like transposable element
  misc_feature (1)..(24): Homolog of NCBI NO: 136140 NR Description: PUTATIVE AC9 TRANSPOSASE
  misc_feature (28)..(313): Homolog of NCBI NO: 136140 NR Description: PUTATIVE AC9 TRANSPOSASE
  misc_feature (1)..(315): Homolog of NCBI NO: 1091678 NR Description: activator-like transposable element
  misc_feature (1)..(333): Homolog of NCBI NO: 136125 NR Description: PUTATIVE AC TRANSPOSASE (ORFA)
MLRDALYYKDAFARLKSSNRHMYVKNYPSPDEWDMALKIFQCLKKVYSLAEILSGTSYPTANLFYRGFCDIKVLLDDWCSSDDATISEMAIAMSQKIEKYWEHSNLALAVACFLDPRYKKKVIEYYMKKFHGDGYHVELEKIVNVVRGLYCFYSSSTPAPAKSTSPEPANSASDILMASVSDELDSFLYGTNEPTLVRSNELEKYMADPLLRLGGPFDGPFDILAWWKSKREVYPILSQIVRDVMAIQVSTVASESVFNAAGRFVDPYRNRLEPEMVEALICTKDWIAAERKDSKIVGSIVSDLEIETLSTVMANKIRAVDDKDIEWKDQEHDGENEYIDSDLDVMDDHNEL

SEQ ID NO: 110678 - DNA, 1788 bp, Zea mays subsp. mays
  misc_feature (1)..(1788): Ceres Seq. ID no. 15180094
acctcctctgtcgacgcaccaccccgaagcccccccgccgcgctcgcagggtgttcgacccttcgcccgcgcgccctcacgacatggcctcctccgtctccgccgccgccaaggccgccgcggcgttcgcgcacaaggtccagaaggagctggccgcgccggcgcagcgccgcgcgggcttgacccgccggaccaagccgtgcagcgtgcgcgccgtcgcttcgcccgcgcgcgccctgtcgtccaccggctcggtgaagagcgcgatgacgatgacggagaagatactggcgcgggcgtcggagcgcgcggcgttggagcctggggagaacgtgtgggtcgacgtcgacgtgctcatgacgcacgacgtctgcgggcccggcgccttcgacatcttcaagaaggagttcggggaggacgccagggtctgggaccgcgagaagctcgtcgtcatcccggaccactacatcttcaccagcgacgaccgcgccaaccgcaacgtcgacatcctcagggacttctgtgcggagcagaacatcaagtacttctatgacatcaaggacctcagcgatttcagggctaatccggactacaaaggcgtctgccacatcgcacttgctcaggaaggccactgccgaccaggcgaggttctcttgggcactgattctcacacatgcaatgctggagcttttggtcagtttgcaactggaatcggaaacactgacgcaggttttgtgttgggcactggaaaggctcttctcaaggtgccacctactatcaggtttatattagatggagagatgccgccttatttacttgcaaaggatctgattttgcaaattattggtgagatttcagtatctggtgcaacctacaaatcaatggagtttgttggatcaactgtagaaagtctaaccatggaagagcgtatgacactgtgcaacatggttattgaagctggtggaaagaacggtgttgtgcctgctgatgaaactacatttaaataccttgagggtaagacatcagtcgattatgaacctgtctacagtgatgctcaagccagattttttagcgactaccggtttgatgtatcaaaactggagccagtagttgccaagccacattcgcctgacaaccgtgctccagcaagagaatgcaaagatgtgaagatcgaccgagtctatattggttcttgcactggtggtaagaccgaggatttccttgctgctgcaaagttgttcttagcctcgggaaagaaggttaaagttcccacatttcttgtccctgccacgcaaaaggtgtggttggacgtatatagcctccctgtaccaggatctggtggcaaaacttgctcccagatatttgaggaggctggttgtgacacaccagcaagtcctaattgtggtgcttgtttgggtggccctcgtgatacatatgcacggatgaatgaacctactgtctgcgtgtccaccacgaacaggaactttccgggcaggatggggcacaaggaagggcaaatctacctggcgtctccctacactgcggctgcctcagccctgacggggtacgttacggacccaagggacttcctcatgtaacgtcttgaaacaacaacagatttcatgatgtaacagagtggctgtactgctgtttttcgtgctgaacttttgtctaggcatgtccttcgttgagaaataaactgcactagaataagcagcgacttctcgggcgccatagcagatgtgacctcatatttatttgtgcaactttttttgtttttggctctgt

SEQ ID NO: 110679 - protein, 531 aa, Zea mays subsp. mays
  misc_feature (1)..(531): Ceres Seq. ID no. 15180095
  misc_feature (90)..(521): Pfam Name: Aconitase family (aconitate hydratase) Pfam Description: Aconitase family (aconitate hydratase)
  misc_feature (90)..(530): Homolog of NCBI NO: 20094876 NR Description: 3-isopropylmalate dehydratase large subunit
  misc_feature (88)..(530): Homolog of NCBI NO: 21673449 NR Description: 3-isopropylmalate dehydratase, large subunit,
  misc_feature (89)..(530): Homolog of NCBI NO: 23043646 NR Description: hypothetical protein [Trichodesmium erythraeum
  misc_feature (89)..(528): Homolog of NCBI NO: 18977310 NR Description: 3-isopropylmalate dehydratase large subunit
  misc_feature (88)..(526): Homolog of NCBI NO: 15679385 NR Description: 3-isopropylmalate dehydratase, LeuD subunit
  misc_feature (89)..(528): Homolog of NCBI NO: 15668676 NR Description: 3-isopropylmalate dehydratase (leuC)
  misc_feature (89)..(526): Homolog of NCBI NO: 15606262 NR Description: large subunit of isopropylmalate isomerase
  misc_feature (90)..(527): Homolog of NCBI NO: 20091903 NR Description: 3-isopropylmalate dehydratase, large subunit
  misc_feature (77)..(530): Homolog of NCBI NO: 7450363 NR Description: hypothetical protein T9E8.170 - Arabidopsis
  misc_feature (77)..(530): Homolog of NCBI NO: 18414006 NR Description: aconitase family [Arabidopsis thaliana]
LLCRRTTPKPPRRARRVFDPSPARPHDMASSVSAAAKAAAAFAHKVQKELAAPAQRRAGLTRRTKPCSVRAVASPARALSSTGSVKSAMTMTEKILARASERAALEPGENVWVDVDVLMTHDVCGPGAFDIFKKEFGEDARVWDREKLVVIPDHYIFTSDDRANRNVDILRDFCAEQNIKYFYDIKDLSDFRANPDYKGVCHIALAQEGHCRPGEVLLGTDSHTCNAGAFGQFATGIGNTDAGFVLGTGKALLKVPPTIRFILDGEMPPYLLAKDLILQIIGEISVSGATYKSMEFVGSTVESLTMEERMTLCNMVIEAGGKNGVVPADETTFKYLEGKTSVDYEPVYSDAQARFFSDYRFDVSKLEPVVAKPHSPDNRAPARECKDVKIDRVYIGSCTGGKTEDFLAAAKLFLASGKKVKVPTFLVPATQKVWLDVYSLPVPGSGGKTCSQIFEEAGCDTPASPNCGACLGGPRDTYARMNEPTVCVSTTNRNFPGRMGHKEGQIYLASPYTAAASALTGYVTDPRDFLM

SEQ ID NO: 110680 - protein, 504 aa, Zea mays subsp. mays
  misc_feature (1)..(504): Ceres Seq. ID no. 15180096
  misc_feature (63)..(494): Pfam Name: Aconitase family (aconitate hydratase) Pfam Description: Aconitase family (aconitate hydratase)
  misc_feature (63)..(500): Homolog of NCBI NO: 20091903 NR Description: 3-isopropylmalate dehydratase, large subunit
  misc_feature (62)..(501): Homolog of NCBI NO: 18977310 NR Description: 3-isopropylmalate dehydratase large subunit
  misc_feature (62)..(499): Homolog of NCBI NO: 15606262 NR Description: large subunit of isopropylmalate isomerase
  misc_feature (61)..(499): Homolog of NCBI NO: 15679385 NR Description: 3-isopropylmalate dehydratase, LeuD subunit
  misc_feature (62)..(501): Homolog of NCBI NO: 15668676 NR Description: 3-isopropylmalate dehydratase (leuC)
  misc_feature (63)..(503): Homolog of NCBI NO: 20094876 NR Description: 3-isopropylmalate dehydratase large subunit
  misc_feature (61)..(503): Homolog of NCBI NO: 21673449 NR Description: 3-isopropylmalate dehydratase, large subunit,
  misc_feature (62)..(503): Homolog of NCBI NO: 23043646 NR Description: hypothetical protein [Trichodesmium erythraeum
  misc_feature (50)..(503): Homolog of NCBI NO: 7450363 NR Description: hypothetical protein T9E8.170 - Arabidopsis
  misc_feature (50)..(503): Homolog of NCBI NO: 18414006 NR Description: aconitase family [Arabidopsis thaliana]
MASSVSAAAKAAAAFAHKVQKELAAPAQRRAGLTRRTKPCSVRAVASPARALSSTGSVKSAMTMTEKILARASERAALEPGENVWVDVDVLMTHDVCGPGAFDIFKKEFGEDARVWDREKLVVIPDHYIFTSDDRANRNVDILRDFCAEQNIKYFYDIKDLSDFRANPDYKGVCHIALAQEGHCRPGEVLLGTDSHTCNAGAFGQFATGIGNTDAGFVLGTGKALLKVPPTIRFILDGEMPPYLLAKDLILQIIGEISVSGATYKSMEFVGSTVESLTMEERMTLCNMVIEAGGKNGVVPADETTFKYLEGKTSVDYEPVYSDAQARFFSDYRFDVSKLEPVVAKPHSPDNRAPARECKDVKIDRVYIGSCTGGKTEDFLAAAKLFLASGKKVKVPTFLVPATQKVWLDVYSLPVPGSGGKTCSQIFEEAGCDTPASPNCGACLGGPRDTYARMNEPTVCVSTTNRNFPGRMGHKEGQIYLASPYTAAASALTGYVTDPRDFLM

SEQ ID NO: 110681 - protein, 443 aa, Zea mays subsp. mays
  misc_feature (1)..(443): Ceres Seq. ID no. 15180097
  misc_feature (2)..(433): Pfam Name: Aconitase family (aconitate hydratase) Pfam Description: Aconitase family (aconitate hydratase)
  misc_feature (2)..(439): Homolog of NCBI NO: 20091903 NR Description: 3-isopropylmalate dehydratase, large subunit
  misc_feature (1)..(440): Homolog of NCBI NO: 18977310 NR Description: 3-isopropylmalate dehydratase large subunit
  misc_feature (1)..(438): Homolog of NCBI NO: 15606262 NR Description: large subunit of isopropylmalate isomerase
  misc_feature (1)..(438): Homolog of NCBI NO: 15679385 NR Description: 3-isopropylmalate dehydratase, LeuD subunit
  misc_feature (1)..(440): Homolog of NCBI NO: 15668676 NR Description: 3-isopropylmalate dehydratase (leuC)
  misc_feature (2)..(442): Homolog of NCBI NO: 20094876 NR Description: 3-isopropylmalate dehydratase large subunit
  misc_feature (1)..(442): Homolog of NCBI NO: 21673449 NR Description: 3-isopropylmalate dehydratase, large subunit,
  misc_feature (1)..(442): Homolog of NCBI NO: 23043646 NR Description: hypothetical protein [Trichodesmium erythraeum
  misc_feature (1)..(442): Homolog of NCBI NO: 7450363 NR Description: hypothetical protein T9E8.170 - Arabidopsis
  misc_feature (1)..(442): Homolog of NCBI NO: 18414006 NR Description: aconitase family [Arabidopsis thaliana]
MTMTEKILARASERAALEPGENVWVDVDVLMTHDVCGPGAFDIFKKEFGEDARVWDREKLVVIPDHYIFTSDDRANRNVDILRDFCAEQNIKYFYDIKDLSDFRANPDYKGVCHIALAQEGHCRPGEVLLGTDSHTCNAGAFGQFATGIGNTDAGFVLGTGKALLKVPPTIRFILDGEMPPYLLAKDLILQIIGEISVSGATYKSMEFVGSTVESLTMEERMTLCNMVIEAGGKNGVVPADETTFKYLEGKTSVDYEPVYSDAQARFFSDYRFDVSKLEPVVAKPHSPDNRAPARECKDVKIDRVYIGSCTGGKTEDFLAAAKLFLASGKKVKVPTFLVPATQKVWLDVYSLPVPGSGGKTCSQIFEEAGCDTPASPNCGACLGGPRDTYARMNEPTVCVSTTNRNFPGRMGHKEGQIYLASPYTAAASALTGYVTDPRDFLM

SEQ ID NO: 110682 - DNA, 1486 bp, Zea mays subsp. mays
  misc_feature (1)..(1486): Ceres Seq. ID no. 14303255
tagaacatcctaatcgaaaatcttttgatttgattttgcaggatccatccgagaacgagcagccacttctccgatgccgtcctcaatggccaaatccctcctcctccctccccagttcgtctccgtctcaccccgccacccccaccgcgccggattccccgtcctcaagccccgccgcgcctcgctgctggccttcaccggcggagacgtcacgcccccgccggacgccgacagcggctccaacaccaaccctctcgtcgatgtgccccgcgcgctctggcgccgcaccctgcagcctctcggcgactatggcttcggcaagcgcagcgtctgggagggcggcgtcggtctcttcatggtctccggggccgccctcctcgccctcgccctcgcatggcttaggggattccagctccgctcccgcttccgcaagtacaacaccgtcttcgagttcacgcaggcgtgtggcatctgcgtcggcacgcccgtccggatacgaggggtcaccgtcggctccgtcgtccgcgtcgactcctccctcaggagcatcgatgccaccgttgaggttggagatgataagatcatcataccacggaattcagtggtcgaggtgaatcagtcgggtcttctaatggagacgctcattgatatcacacccaaggatccactccctgcaccttcagtagggccacttgacccaaactgcatcaaagaaggtttgattctctgtgacaaagagaggatgaaaggacagcaaggtgtaagcttagatgcattggtgggaatatttacccgactaggtagagacatggaggagattggcgttagcaaaagctataagttggctgaaaaagttgcatctataatggaagaggcacaacctcttcttacacggattgaggatttagctgaagaaatgcaacctttgctctctgaagtcggtgatagtgatctgctgaaggatgtggagactatagctaaaggcctggccgacgcgtctgttgacctaagaaggctgaagtcgtccatgctcaccccagagaacacggatcttattaagcagtctattttcacccttatatttaccctgaagaacattgagagtatcagctcggacatctctgggttcacgggggatgagacgacaaggcagaacatcaagcttctgatcaagtctctcagcaggctattatgattgtttttcaatgtgcagaacagaatgatggattgctttgctttgctttgtttgagacaggaaatgatgctggtagagtagggtgactgtgtgtgtgtctcggtggcacagaggtgtaggaagagtagcagttaattaatgttccacaaggttttggttattctggtaataagtttctttttttttcttttttctttttaaaaaaactcagatcagtattgagctgttgtaggtcatatagtaggcccatttttcatcagttgatggatcgcccttgttggctgcctgaac

SEQ ID NO: 110683 - protein, 373 aa, Zea mays subsp. mays
  misc_feature (1)..(373): Ceres Seq. ID no. 14303256
  misc_feature (91)..(226): Pfam Name: mce related protein Pfam Description: mce related protein
  misc_feature (83)..(319): Homolog of NCBI NO: 37523684 NR Description: hypothetical protein glr4115 [Gloeobacter
  misc_feature (84)..(356): Homolog of NCBI NO: 16329641 NR Description: hypothetical protein [Synechocystis sp. PCC 6803]
  misc_feature (91)..(248): Homolog of NCBI NO: 11465838 NR Description: ORF22 [Porphyra purpurea]
  misc_feature (84)..(368): Homolog of NCBI NO: 22299950 NR Description: ORF_ID:tll2407~hypothetical protein
  misc_feature (84)..(363): Homolog of NCBI NO: 23043318 NR Description: hypothetical protein [Trichodesmium erythraeum
  misc_feature (83)..(370): Homolog of NCBI NO: 17227677 NR Description: hypothetical protein [Nostoc sp. PCC 7120]
  misc_feature (84)..(370): Homolog of NCBI NO: 23128989 NR Description: hypothetical protein [Nostoc punctiforme]
  misc_feature (27)..(373): Homolog of NCBI NO: 21553847 NR Description: unknown [Arabidopsis thaliana]
  misc_feature (2)..(373): Homolog of NCBI NO: 18402572 NR Description: expressed protein [Arabidopsis thaliana]
  misc_feature (11)..(373): Homolog of NCBI NO: 34906054 NR Description: P0698H10.22 [Oryza sativa (japonica
MPSSMAKSLLLPPQFVSVSPRHPHRAGFPVLKPRRASLLAFTGGDVTPPPDADSGSNTNPLVDVPRALWRRTLQPLGDYGFGKRSVWEGGVGLFMVSGAALLALALAWLRGFQLRSRFRKYNTVFEFTQACGICVGTPVRIRGVTVGSVVRVDSSLRSIDATVEVGDDKIIIPRNSVVEVNQSGLLMETLIDITPKDPLPAPSVGPLDPNCIKEGLILCDKERMKGQQGVSLDALVGIFTRLGRDMEEIGVSKSYKLAEKVASIMEEAQPLLTRIEDLAEEMQPLLSEVGDSDLLKDVETIAKGLADASVDLRRLKSSMLTPENTDLIKQSIFTLIFTLKNIESISSDISGFTGDETTRQNIKLLIKSLSRLL

SEQ ID NO: 110684 - protein, 369 aa, Zea mays subsp. mays
  misc_feature (1)..(369): Ceres Seq. ID no. 14303257
  misc_feature (87)..(222): Pfam Name: mce related protein Pfam Description: mce related protein
  misc_feature (79)..(315): Homolog of NCBI NO: 37523684 NR Description: hypothetical protein glr4115 [Gloeobacter
  misc_feature (80)..(352): Homolog of NCBI NO: 16329641 NR Description: hypothetical protein [Synechocystis sp. PCC 6803]
  misc_feature (87)..(244): Homolog of NCBI NO: 11465838 NR Description: ORF22 [Porphyra purpurea]
  misc_feature (80)..(364): Homolog of NCBI NO: 22299950 NR Description: ORF_ID:tll2407~hypothetical protein
  misc_feature (80)..(359): Homolog of NCBI NO: 23043318 NR Description: hypothetical protein [Trichodesmium erythraeum
  misc_feature (79)..(366): Homolog of NCBI NO: 17227677 NR Description: hypothetical protein [Nostoc sp. PCC 7120]
  misc_feature (80)..(366): Homolog of NCBI NO: 23128989 NR Description: hypothetical protein [Nostoc punctiforme]
  misc_feature (23)..(369): Homolog of NCBI NO: 21553847 NR Description: unknown [Arabidopsis thaliana]
  misc_feature (1)..(369): Homolog of NCBI NO: 18402572 NR Description: expressed protein [Arabidopsis thaliana]
  misc_feature (7)..(369): Homolog of NCBI NO: 34906054 NR Description: P0698H10.22 [Oryza sativa (japonica
MAKSLLLPPQFVSVSPRHPHRAGFPVLKPRRASLLAFTGGDVTPPPDADSGSNTNPLVDVPRALWRRTLQPLGDYGFGKRSVWEGGVGLFMVSGAALLALALAWLRGFQLRSRFRKYNTVFEFTQACGICVGTPVRIRGVTVGSVVRVDSSLRSIDATVEVGDDKIIIPRNSVVEVNQSGLLMETLIDITPKDPLPAPSVGPLDPNCIKEGLILCDKERMKGQQGVSLDALVGIFTRLGRDMEEIGVSKSYKLAEKVASIMEEAQPLLTRIEDLAEEMQPLLSEVGDSDLLKDVETIAKGLADASVDLRRLKSSMLTPENTDLIKQSIFTLIFTLKNIESISSDISGFTGDETTRQNIKLLIKSLSRLL

SEQ ID NO: 110685 - protein, 279 aa, Zea mays subsp. mays
  misc_feature (1)..(279): Ceres Seq. ID no. 14303258
  misc_feature (1)..(132): Pfam Name: mce related protein Pfam Description: mce related protein
  misc_feature (1)..(225): Homolog of NCBI NO: 37523684 NR Description: hypothetical protein glr4115 [Gloeobacter
  misc_feature (1)..(262): Homolog of NCBI NO: 16329641 NR Description: hypothetical protein [Synechocystis sp. PCC 6803]
  misc_feature (1)..(154): Homolog of NCBI NO: 11465838 NR Description: ORF22 [Porphyra purpurea]
  misc_feature (1)..(274): Homolog of NCBI NO: 22299950 NR Description: ORF_ID:tll2407~hypothetical protein
  misc_feature (1)..(269): Homolog of NCBI NO: 23043318 NR Description: hypothetical protein [Trichodesmium erythraeum
  misc_feature (1)..(276): Homolog of NCBI NO: 17227677 NR Description: hypothetical protein [Nostoc sp. PCC 7120]
  misc_feature (1)..(276): Homolog of NCBI NO: 23128989 NR Description: hypothetical protein [Nostoc punctiforme]
  misc_feature (1)..(279): Homolog of NCBI NO: 21553847 NR Description: unknown [Arabidopsis thaliana]
  misc_feature (1)..(279): Homolog of NCBI NO: 18402572 NR Description: expressed protein [Arabidopsis thaliana]
  misc_feature (1)..(279): Homolog of NCBI NO: 34906054 NR Description: P0698H10.22 [Oryza sativa (japonica
MVSGAALLALALAWLRGFQLRSRFRKYNTVFEFTQACGICVGTPVRIRGVTVGSVVRVDSSLRSIDATVEVGDDKIIIPRNSVVEVNQSGLLMETLIDITPKDPLPAPSVGPLDPNCIKEGLILCDKERMKGQQGVSLDALVGIFTRLGRDMEEIGVSKSYKLAEKVASIMEEAQPLLTRIEDLAEEMQPLLSEVGDSDLLKDVETIAKGLADASVDLRRLKSSMLTPENTDLIKQSIFTLIFTLKNIESISSDISGFTGDETTRQNIKLLIKSLSRLL

SEQ ID NO: 110686 - DNA, 985 bp, Zea mays subsp. mays
  misc_feature (1)..(985): Ceres Seq. ID no. 14312486
agcagcataacaagaagacacaccaaaacctagctagcttgccgcacctgcttggggctgccaagtaaaagtagtaagctagagaagcaaagcaaagctccgatccaatccaatccaccgcgaggattatgtctctggtaaggctcctggacacgctggccctggactcgtgggtgcggaacccgttcaccatcttcggcacggcggtggccgccgacgcgtggctggccagcgacacgtcggcgttcgccaacacgcacatcgagagccgggacacggcggccgcctacgtgttcagcgccgcgctcccgccgggcgtcaagaaggaggaggtcacggtggagctggacgagggcaacgtgctggtcatcgccggcgagcgcagcgtgtgccgccaggagcgcagcgacgggtgccaccacatcgagcgcagccgcgccaccttcctcgccaggttccacctgcccgaggacgccgccgtcgacggcgtcagggccgccttggacgccggcaggctcaccgtcaccgtgcccaaggtcggggccgccgccgccgccatcgtgcccgagaagcccgccgccgacgcgccggcgctggcgcccgtgcccgtcgaggccggcccctgctgagcttctgacgatgccgacgccgacgccgaccgagacggccggccggctccctgttcctccacgtacacgcccccttgccggtgaacggatagtagcgtcccacgtcgtcgcgcgactgtgaggttgtcgctcgctcgcccgtgctgtctcaaagtttgtttccgtggtttggtcatggctttgcgtactacgtgatggactcagctgcctgtactgtactgcgtgcatgcatgtaaccatgaaaacaaaagggtggtattcctgcattgcacggctgcaacgtgtaattccgtctttaatcaatgttttttctgtgcttagtaaatgaaaaggcaagctaagctggaatcctatat

SEQ ID NO: 110687 - protein, 166 aa, Zea mays subsp. mays
  misc_feature (1)..(166): Ceres Seq. ID no. 14312487
  misc_feature (1)..(136): Homolog of NCBI NO: 445136 NR Description: heat shock protein 16.9
  misc_feature (1)..(136): Homolog of NCBI NO: 7441297 NR Description: heat shock protein 16.9 - pearl millet
  misc_feature (6)..(137): Homolog of NCBI NO: 123548 NR Description: 17.8 KD CLASS I HEAT SHOCK PROTEIN (CLONE
  misc_feature (1)..(136): Homolog of NCBI NO: 123545 NR Description: 16.9 KD CLASS I HEAT SHOCK PROTEIN (LOW MOLECULAR
  misc_feature (1)..(136): Homolog of NCBI NO: 100883 NR Description: heat shock protein 17.2 - maize
  misc_feature (6)..(137): Homolog of NCBI NO: 71495 NR Description: heat shock protein (clone DChsp17.7) - carrot
  misc_feature (1)..(136): Homolog of NCBI NO: 169799 NR Description: 16.9 kDa heat shock protein
  misc_feature (1)..(136): Homolog of NCBI NO: 123543 NR Description: 16.9 KD CLASS I HEAT SHOCK PROTEIN
  misc_feature (6)..(136): Homolog of NCBI NO: 2911276 NR Description: LMW heat shock protein [Fragaria x ananassa]
  misc_feature (1)..(165): Homolog of NCBI NO: 15408720 NR Description: P0443D08.1 [Oryza sativa (japonica
MSLVRLLDTLALDSWVRNPFTIFGTAVAADAWLASDTSAFANTHIESRDTAAAYVFSAALPPGVKKEEVTVELDEGNVLVIAGERSVCRQERSDGCHHIERSRATFLARFHLPEDAAVDGVRAALDAGRLTVTVPKVGAAAAAIVPEKPAADAPALAPVPVEAGPC

SEQ ID NO: 110688 - DNA, 867 bp, Zea mays subsp. mays
  misc_feature (1)..(867): Ceres Seq. ID no. 14312480
aatcccgttcgggccgaagcaatccctctctgcattaacagcaaggagcgctgcaactcgccacttgcagtttcgacttttcgagatctgcgccgctgttgctgtccccactcggcctcccctctctctccccttcttccagacccttcccttcttccgctcacccacgcggacgccggctgcccccttccctgactgaccccctcgaggcccctcgatacgatacttcgggtgtaggggagcatgcggaagaaagggcgggcggtgccggagtggctcaacagcccaatttggtccgctaccccgcccgcgcccgcccagccggacccctacggcgccgacctcgctccgccgccacccccaaagccgccgccgccgccagctactgcctctcccgtaccgccgccgccgtcgtacgagcaggccgtaggggtgggtggtggccggagggaggaggaggacgacgagggcgccggggcggtgatacgggcacacctgctctccgacttcaaggccgcgctatcgaagaaggtggtgaacatgggagagctgcggcgcttagcctgcctcggcgtccccgacggcggtactggtgtccgacccgtcgtctggaaggtccccactcgcattctcttctgattctatagcgaattttggttgagagttcggagttttgcacttcctacttgccctgcaagggtttagtgttgatatttcactgggatagttggtcatttttccattctttctagctgacttatgtctgtcctcatttttttttctggttgtattgactattgagacatggagataaaagttacggagtgtataatttcttatatctgcagcgctggtggtttgtttggt

SEQ ID NO: 110689 - protein, 131 aa, Zea mays subsp. mays
  misc_feature (1)..(131): Ceres Seq. ID no. 14312481
  misc_feature (20)..(82): Pfam Name: Glycoprotein GG/GX Pfam Description: Glycoprotein GG/GX
  misc_feature (5)..(65): Homolog of NCBI NO: 32406482 NR Description: predicted protein [Neurospora crassa]
  misc_feature (1)..(125): Homolog of NCBI NO: 15236337 NR Description: expressed protein [Arabidopsis thaliana]
MRKKGRAVPEWLNSPIWSATPPAPAQPDPYGADLAPPPPPKPPPPPATASPVPPPPSYEQAVGVGGGRREEEDDEGAGAVIRAHLLSDFKAALSKKVVNMGELRRLACLGVPDGGTGVRPVVWKVPTRILF

SEQ ID NO: 110690 - protein, 65 aa, Zea mays subsp. mays
  misc_feature (1)..(65): Ceres Seq. ID no. 14312482
IPFGPKQSLSALTARSAATRHLQFRLFEICAAVAVPTRPPLSLPFFQTLPFFRSPTRTPAAPFPD

SEQ ID NO: 110691 - DNA, 1201 bp, Zea mays subsp. mays
  misc_feature (1)..(1201): Ceres Seq. ID no. 15177545
aatcaggataaatatactatccttttgcgagacacatggacacgcggtgcgcgtcgtcgtctagctggagctggcggaccccataaatagtgctttagaccaagctgcgccctcgtgctcgtcgtcgtcatcttcttcctcctcctcctccaagcagcacggagcgattagctgctgctgctgccgctgcagcgggcagagatggcaggagcagaggttgccaacggcgtgcacgagggcgccctggatttggaggaaggcagaggaggcggagtcgatggagcggggtgtgagagctcggagcaggacggagccggtcgccgccccatgttctccgtgccgttcgtgcagaagatcctggcggaggcgttggggacctacttcctgatcttcgccgggtgcgcggcggtggcggtgaacctgcggacgggcggcacggtgacgttcccgggcatctgcgccgtgtggggcctggccgtgatggtgatggtgtactccgtgggccacatctccggcgcgcacctcaacccggccgtctccctcgccttcgccacctgcggccgcttcccctggaggcaggtgccggcgtacgcggcggcgcaggtcacgggggccacggcggccagcctgacgctgcgcctcctgttcgggagcgcgcgggagcacttcttcggcacggtgcccgccggctcggacgcgcagtcgctcgtcgtcgagttcatcatctccttcaacctcatgttcgtcgtctccggcgtcgccacggacaacagagccatcggcgaactcgccggcctcgccgttggagccaccgtcctgctaaacgtgctctttgccgggcctatatccggagcgtccatgaacccggcgaggaccctgggcccggcgctcgtcgtgggccgctacgccggcatctgggtgtacttcgcggggcccatctgcgggacggtggccggcgcctgggcctacaatctcatacgcttcaccgacaagcccctgcgagagatcacccagacctcctccttcttgcggagtgtcaggaggagctcgagctgaactactatatatatacacctcgtagctgcctgccacccaaacgactctcacgatctaaagatagcagttagcagtgttgtttctttaattttgtagccaaacaactcctctttttaattcttactgtcatttgtttacatgttgc

SEQ ID NO: 110692 - protein, 284 aa, Zea mays subsp. mays
  misc_feature (1)..(284): Ceres Seq. ID no. 15177546
  misc_feature (44)..(256): Pfam Name: Major intrinsic protein Pfam Description: Major intrinsic protein
  misc_feature (52)..(282): Homolog of NCBI NO: 34903716 NR Description: putative major intrinsic protein
  misc_feature (8)..(284): Homolog of NCBI NO: 13447785 NR Description: NOD26-like membrane integral protein ZmNIP1-1
  misc_feature (49)..(280): Homolog of NCBI NO: 5139541 NR Description: nodulin26-like major intrinsic protein [Pisum
  misc_feature (45)..(284): Homolog of NCBI NO: 18415224 NR Description: major intrinsic protein (MIP) family [Arabidopsis
  misc_feature (45)..(284): Homolog of NCBI NO: 21536953 NR Description: major intrinsic protein (MIP)- like [Arabidopsis
  misc_feature (45)..(284): Homolog of NCBI NO: 15234059 NR Description: major intrinsic protein (MIP) family [Arabidopsis
  misc_feature (45)..(284): Homolog of NCBI NO: 2677614 NR Description: NLM1 protein (NodLikeMip1) [Arabidopsis thaliana]
  misc_feature (16)..(284): Homolog of NCBI NO: 15240348 NR Description: major intrinsic protein (MIP) family [Arabidopsis
  misc_feature (42)..(264): Homolog of NCBI NO: 15220826 NR Description: major intrinsic protein (MIP) family [Arabidopsis
  misc_feature (26)..(284): Homolog of NCBI NO: 1076748 NR Description: major intrinsic protein - rice
MAGAEVANGVHEGALDLEEGRGGGVDGAGCESSEQDGAGRRPMFSVPFVQKILAEALGTYFLIFAGCAAVAVNLRTGGTVTFPGICAVWGLAVMVMVYSVGHISGAHLNPAVSLAFATCGRFPWRQVPAYAAAQVTGATAASLTLRLLFGSAREHFFGTVPAGSDAQSLVVEFIISFNLMFVVSGVATDNRAIGELAGLAVGATVLLNVLFAGPISGASMNPARTLGPALVVGRYAGIWVYFAGPICGTVAGAWAYNLIRFTDKPLREITQTSSFLRSVRRSSS

SEQ ID NO: 110693 - protein, 242 aa, Zea mays subsp. mays
  misc_feature (1)..(242): Ceres Seq. ID no. 15177547
  misc_feature (2)..(214): Pfam Name: Major intrinsic protein Pfam Description: Major intrinsic protein
  misc_feature (1)..(222): Homolog of NCBI NO: 15220826 NR Description: major intrinsic protein (MIP) family [Arabidopsis
  misc_feature (7)..(238): Homolog of NCBI NO: 5139541 NR Description: nodulin26-like major intrinsic protein [Pisum
  misc_feature (1)..(242): Homolog of NCBI NO: 15240348 NR Description: major intrinsic protein (MIP) family [Arabidopsis
  misc_feature (3)..(242): Homolog of NCBI NO: 18415224 NR Description: major intrinsic protein (MIP) family [Arabidopsis
  misc_feature (3)..(242): Homolog of NCBI NO: 2677614 NR Description: NLM1 protein (NodLikeMip1) [Arabidopsis thaliana]
  misc_feature (3)..(242): Homolog of NCBI NO: 21536953 NR Description: major intrinsic protein (MIP)- like [Arabidopsis
  misc_feature (3)..(242): Homolog of NCBI NO: 15234059 NR Description: major intrinsic protein (MIP) family [Arabidopsis
  misc_feature (10)..(240): Homolog of NCBI NO: 34903716 NR Description: putative major intrinsic protein
  misc_feature (1)..(242): Homolog of NCBI NO: 13447785 NR Description: NOD26-like membrane integral protein ZmNIP1-1
  misc_feature (1)..(242): Homolog of NCBI NO: 1076748 NR Description: major intrinsic protein - rice
MFSVPFVQKILAEALGTYFLIFAGCAAVAVNLRTGGTVTFPGICAVWGLAVMVMVYSVGHISGAHLNPAVSLAFATCGRFPWRQVPAYAAAQVTGATAASLTLRLLFGSAREHFFGTVPAGSDAQSLVVEFIISFNLMFVVSGVATDNRAIGELAGLAVGATVLLNVLFAGPISGASMNPARTLGPALVVGRYAGIWVYFAGPICGTVAGAWAYNLIRFTDKPLREITQTSSFLRSVRRSSS

SEQ ID NO: 110694 - protein, 191 aa, Zea mays subsp. mays
  misc_feature (1)..(191): Ceres Seq. ID no. 15177548
  misc_feature (1)..(163): Pfam Name: Major intrinsic protein Pfam Description: Major intrinsic protein
  misc_feature (1)..(171): Homolog of NCBI NO: 15220826 NR Description: major intrinsic protein (MIP) family [Arabidopsis
  misc_feature (1)..(187): Homolog of NCBI NO: 5139541 NR Description: nodulin26-like major intrinsic protein [Pisum
  misc_feature (1)..(191): Homolog of NCBI NO: 15240348 NR Description: major intrinsic protein (MIP) family [Arabidopsis
  misc_feature (1)..(191): Homolog of NCBI NO: 18415224 NR Description: major intrinsic protein (MIP) family [Arabidopsis
  misc_feature (1)..(191): Homolog of NCBI NO: 2677614 NR Description: NLM1 protein (NodLikeMip1) [Arabidopsis thaliana]
  misc_feature (1)..(191): Homolog of NCBI NO: 21536953 NR Description: major intrinsic protein (MIP)- like [Arabidopsis
  misc_feature (1)..(191): Homolog of NCBI NO: 15234059 NR Description: major intrinsic protein (MIP) family [Arabidopsis
  misc_feature (1)..(189): Homolog of NCBI NO: 34903716 NR Description: putative major intrinsic protein
  misc_feature (1)..(191): Homolog of NCBI NO: 13447785 NR Description: NOD26-like membrane integral protein ZmNIP1-1
  misc_feature (1)..(191): Homolog of NCBI NO: 1076748 NR Description: major intrinsic protein - rice
MVMVYSVGHISGAHLNPAVSLAFATCGRFPWRQVPAYAAAQVTGATAASLTLRLLFGSAREHFFGTVPAGSDAQSLVVEFIISFNLMFVVSGVATDNRAIGELAGLAVGATVLLNVLFAGPISGASMNPARTLGPALVVGRYAGIWVYFAGPICGTVAGAWAYNLIRFTDKPLREITQTSSFLRSVRRSSS

SEQ ID NO: 110695 - DNA, 1896 bp, Zea mays subsp. mays
  misc_feature (1)..(1896): Ceres Seq. ID no. 15180647
aatccgcagcaattccattccccatcccaccgcttccccacctctcccccacccgcgcgtccggccgggtgcaccaatccgatggcttgactggcccccacaacgcaccgacggcgccgacaagctcccgtcacgccgccgccgccgctggcggcggcggcgcccgtcgcgctagctgctacggcggcagcatggacaccgcgctctgcgacgacctgctgcaggtggtgttcggtcttctcccgccctccgctgcaccggccgtgtccctcgtctcccgccgctggctcgcgctcctcagggccgcgacgtcgtccctcagcctccgcttgcctgcctcctcggcggcgaccctcgccgccctgctgtctcactatcccttcctcgccgccctgaccgtggtctccgctggtacgccggtccacgacgccgacgccgtgctgctcgctgtcgcggccgcgccggccgcttcccggctctccacgctgcggctcttgcccgattgggcggtctcccccgccgcgctgcttacggtctgccctgcactcgccggtctgacgtcgctccacctcaccgctgtccgccccctatctttccgctggctcaagctgttgccgcgcctcaagtcgttcgccctcgtcaactccgccgccgccgttgactccgcgggctcgagctcggatgacgccgacggcgaggccgaggacgtcgcagggacattgccgctggagaagctgtcactttgcggcatccgctccggcgaccgcgggcttgggtggctgtggcggcggtgcgggagcctcaagtggttgcagctgcgcgcctgcgacggtaccggggacgggcccgcgtcgctggccttcgcgggttgccttgctggcttgctcgcgcttgagcttcgtgcttgccgtgctgtcgccgaccgtgtactactccttgcagccgaccattgccgcacgctaacgtccctcctggtctatgacggcggcggcagcgaggcccttcaccggttcatccagcagcgtgctgctggtctgcacaccttggaccttcgcctcccgcttgacctgcacaacgatcatctcctcgccattggagctgactcagttcacaatgctacacatggcctagcttcacttcgcctccagagctgcgtccttatcacaggggacggcctccggtccctggcacgcacagccgccggagccggcatagaagagctcgccttggtgagttgcgacgtggtggagtgggagcccgggttgctgacattcctcagtcagagcatgccgcggctccgtcgacttaacctgtcttacaatgagacactgaacgacaaggtgatcggcgccatgctttcatcctgccggaatctcatcgacatcagactcagggggtgccggggcctgacgggaggctcgctcctctcgctgcttaggcactgtgggcagtcactggagatccttgacatctcccgctgtccgggcattgctataggtaacgttgagctctttgcccagcgcgccgctaggttgaatcatgtgatcatcgaggagagcgcgatgtcggaggaattgaaggcaatcgctcagaagaaaggcatgaaggttggctcattgccgtgcgaaggaggaccattctgaagtaaggttgtatctccttcagaatgcagttccatgttctgtgcaactcgatttgtgaatgtaaccttcactggaatgttaataaagtattgctgcttagtacttgtgtatgcagctttgtatctgccttgtaagcttattatgactagcctcttggtgcctgcttgacatgtaaattgagcgccaaaggtgtgctgtactgctgttgtatatgttcaacaattgccatggaataatacagaaaattcaaacc

SEQ ID NO: 110696 - protein, 546 aa, Zea mays subsp. mays
  misc_feature (1)..(546): Ceres Seq. ID no. 15180648
  misc_feature (242)..(525): Homolog of NCBI NO: 24652783 NR Description: CG9003-PA [Drosophila melanogaster]
  misc_feature (242)..(494): Homolog of NCBI NO: 630513 NR Description: hypothetical protein C02F5.7 - Caenorhabditis
  misc_feature (242)..(494): Homolog of NCBI NO: 25151696 NR Description: rad-51 (Fifty one) like, Short RFS-1, f-box
  misc_feature (242)..(494): Homolog of NCBI NO: 25151694 NR Description: rad-51 (Fifty one) like, Short RFS-1, f-box
  misc_feature (242)..(496): Homolog of NCBI NO: 21536497 NR Description: F-box protein family, AtFBL4 [Arabidopsis
  misc_feature (242)..(496): Homolog of NCBI NO: 18414458 NR Description: F-box protein family (FBL4) [Arabidopsis
  misc_feature (242)..(493): Homolog of NCBI NO: 38503178 NR Description: F-box/LRR-repeat protein 2-like
  misc_feature (242)..(493): Homolog of NCBI NO: 27734755 NR Description: F-box protein FBL2 [Homo sapiens]
  misc_feature (242)..(493): Homolog of NCBI NO: 12848653 NR Description: unnamed protein product [Mus musculus]
  misc_feature (64)..(532): Homolog of NCBI NO: 15242713 NR Description: expressed protein [Arabidopsis thaliana]
SAAIPFPIPPLPHLSPTRASGRVHQSDGLTGPHNAPTAPTSSRHAAAAAGGGGARRASCYGGSMDTALCDDLLQVVFGLLPPSAAPAVSLVSRRWLALLRAATSSLSLRLPASSAATLAALLSHYPFLAALTVVSAGTPVHDADAVLLAVAAAPAASRLSTLRLLPDWAVSPAALLTVCPALAGLTSLHLTAVRPLSFRWLKLLPRLKSFALVNSAAAVDSAGSSSDDADGEAEDVAGTLPLEKLSLCGIRSGDRGLGWLWRRCGSLKWLQLRACDGTGDGPASLAFAGCLAGLLALELRACRAVADRVLLLAADHCRTLTSLLVYDGGGSEALHRFIQQRAAGLHTLDLRLPLDLHNDHLLAIGADSVHNATHGLASLRLQSCVLITGDGLRSLARTAAGAGIEELALVSCDVVEWEPGLLTFLSQSMPRLRRLNLSYNETLNDKVIGAMLSSCRNLIDIRLRGCRGLTGGSLLSLLRHCGQSLEILDISRCPGIAIGNVELFAQRAARLNHVIIEESAMSEELKAIAQKKGMKVGSLPCEGGPF

SEQ ID NO: 110697 - protein, 483 aa, Zea mays subsp. mays
  misc_feature (1)..(483): Ceres Seq. ID no. 15180649
  misc_feature (179)..(462): Homolog of NCBI NO: 24652783 NR Description: CG9003-PA [Drosophila melanogaster]
  misc_feature (179)..(431): Homolog of NCBI NO: 630513 NR Description: hypothetical protein C02F5.7 - Caenorhabditis
  misc_feature (179)..(431): Homolog of NCBI NO: 25151696 NR Description: rad-51 (Fifty one) like, Short RFS-1, f-box
  misc_feature (179)..(431): Homolog of NCBI NO: 25151694 NR Description: rad-51 (Fifty one) like, Short RFS-1, f-box
  misc_feature (179)..(433): Homolog of NCBI NO: 21536497 NR Description: F-box protein family, AtFBL4 [Arabidopsis
  misc_feature (179)..(433): Homolog of NCBI NO: 18414458 NR Description: F-box protein family (FBL4) [Arabidopsis
  misc_feature (179)..(430): Homolog of NCBI NO: 38503178 NR Description: F-box/LRR-repeat protein 2-like
  misc_feature (179)..(430): Homolog of NCBI NO: 27734755 NR Description: F-box protein FBL2 [Homo sapiens]
  misc_feature (179)..(430): Homolog of NCBI NO: 12848653 NR Description: unnamed protein product [Mus musculus]
  misc_feature (1)..(469): Homolog of NCBI NO: 15242713 NR Description: expressed protein [Arabidopsis thaliana]
MDTALCDDLLQVVFGLLPPSAAPAVSLVSRRWLALLRAATSSLSLRLPASSAATLAALLSHYPFLAALTVVSAGTPVHDADAVLLAVAAAPAASRLSTLRLLPDWAVSPAALLTVCPALAGLTSLHLTAVRPLSFRWLKLLPRLKSFALVNSAAAVDSAGSSSDDADGEAEDVAGTLPLEKLSLCGIRSGDRGLGWLWRRCGSLKWLQLRACDGTGDGPASLAFAGCLAGLLALELRACRAVADRVLLLAADHCRTLTSLLVYDGGGSEALHRFIQQRAAGLHTLDLRLPLDLHNDHLLAIGADSVHNATHGLASLRLQSCVLITGDGLRSLARTAAGAGIEELALVSCDVVEWEPGLLTFLSQSMPRLRRLNLSYNETLNDKVIGAMLSSCRNLIDIRLRGCRGLTGGSLLSLLRHCGQSLEILDISRCPGIAIGNVELFAQRAARLNHVIIEESAMSEELKAIAQKKGMKVGSLPCEGGPF

SEQ ID NO: 110698 - DNA, 1714 bp, Zea mays subsp. mays
  misc_feature (1)..(1714): Ceres Seq. ID no. 15224334
acgtaaggscaaacgcgaacggaaccctccccagcagatgagcggagtaggtgggcggggttctcttccactcccgctccagctttctctggcccgatcgatgctacattcccgcggcgagccgctcgccttcctccgcgggccttgggctacccaacccatcgccgagccgcctcgcgcggtcccccctccatctttgcccggctctctcgcctcggaggacggacagagaaagagaggatgagaagggactcctcgaaccgcgtcccgcgctcgggctattggaccgaggggttgcggtggatttggagcgcggggtggactcgtcgctgatggtattctccgatgcaagaggcagggagagagcgggacagggcggcggcggcggcggatctcggaggcgtcgccgctagcgtcaggccaacggatacagcagctgtaagcacaaagccggcaaagcgatacccactggccttatggataggcatattgggcctgataataaaaggaaagggagaagccttgtcatgatcccagtattccagacacagaaatcccttacttgcactacccgatgccaaatacttatgataggaaagaatgtgcgtgcacaggggttaggttctttgctatcttgtcaatgcagaggtccgggagtggatgggttgagacgttgttgaatagccatcctaatattagctccaatggagagatcttctctgtcaaagaaagacgcagcaatatcaccgcgatcacgaaaacactggacagattgtacaatctggattggtatagcagtgctgctaagaacgaatgtacggctgccgtggggctgaaatggatgctcaatcagtgaaaattatagggtctaatgaagcaccatcaagagatagttgaatacttcaaccgaaggggtgtttccgcaatttttctactaagaagaaatcttcttcggcgttacgtctctatattagcaaatgctcatgatagtgccatgaaacagttgaatggaactcataaagctcatgtgcactccaaacatgaggctgaaatccttgctcaatataagccaaccattgacaaaaaaacattgattactgaactaaaacggtctgataagttggcagctgatgctctggtgaatttcaagaacaccaggcacgttgtcctgtactacgaggatgttgtcagcaatcgcacgatgctcatggatgttctggattttctcagattgccaaagaggaagctgttcagtcgacatgtgaaaatccacacaaaacgattgtgcgatcatatagataactgggcagatgttactgattttttgaagggcacaccgttcgagagctttttgaatggctcaagaagatgacatggctagctgatgtatatagtgctatagtgagttgtccttctggcgcctcgtaggttttttttttttttgataccatgatgaaataagtatgggccactgagagaaatagttaggtagagatgcttgatccaggctattagagctgtagaataaagattaaaaacaatacctttgtgattatcagatatctaatgcaagaacttgcaaaactgtctggagtcattcgtgtatacatcaaagtttacacttacacttgaaaatgaataggccaagctccgtggcagaggaactgaggaaaaaggcagagtagcctatacaaaactgatgatttttactagc

SEQ ID NO: 110699 - protein, 166 aa, Zea mays subsp. mays
  misc_feature (1)..(166): Ceres Seq. ID no. 15224335
  misc_feature (1)..(164): Homolog of NCBI NO: 34904786 NR Description: contains ESTs
  misc_feature (57)..(161): Homolog of NCBI NO: 30679514 NR Description: expressed protein [Arabidopsis thaliana]
  misc_feature (57)..(161): Homolog of NCBI NO: 25411661 NR Description: hypothetical protein At2g15730 [imported] -
  misc_feature (1)..(133): Homolog of NCBI NO: 15229813 NR Description: expressed protein [Arabidopsis thaliana]
  misc_feature (112)..(166): Homolog of NCBI NO: 14029013 NR Description: Unknown protein [Oryza sativa]
  misc_feature (1)..(58): Homolog of NCBI NO: 14029013 NR Description: Unknown protein [Oryza sativa]
  misc_feature (1)..(164): Homolog of NCBI NO: 33146729 NR Description: unknown protein [Oryza sativa (japonica
  misc_feature (1)..(162): Homolog of NCBI NO: 22329158 NR Description: hypothetical protein [Arabidopsis thaliana]
  misc_feature (1)..(161): Homolog of NCBI NO: 40823013 NR Description: At2g15730 [Arabidopsis thaliana]
  misc_feature (1)..(166): Homolog of NCBI NO: 29824462 NR Description: unknown protein [Oryza sativa (japonica
MKHHQEIVEYFNRRGVSAIFLLRRNLLRRYVSILANAHDSAMKQLNGTHKAHVHSKHEAEILAQYKPTIDKKTLITELKRSDKLAADALVNFKNTRHVVLYYEDVVSNRTMLMDVLDFLRLPKRKLFSRHVKIHTKRLCDHIDNWADVTDFLKGTPFESFLNGSRR

SEQ ID NO: 110700 - protein, 125 aa, Zea mays subsp. mays
  misc_feature (1)..(125): Ceres Seq. ID no. 15224336
  misc_feature (1)..(123): Homolog of NCBI NO: 34904786 NR Description: contains ESTs
  misc_feature (16)..(120): Homolog of NCBI NO: 30679514 NR Description: expressed protein [Arabidopsis thaliana]
  misc_feature (16)..(120): Homolog of NCBI NO: 25411661 NR Description: hypothetical protein At2g15730 [imported] -
  misc_feature (1)..(92): Homolog of NCBI NO: 15229813 NR Description: expressed protein [Arabidopsis thaliana]
  misc_feature (71)..(125): Homolog of NCBI NO: 14029013 NR Description: Unknown protein [Oryza sativa]
  misc_feature (1)..(17): Homolog of NCBI NO: 14029013 NR Description: Unknown protein [Oryza sativa]
  misc_feature (1)..(123): Homolog of NCBI NO: 33146729 NR Description: unknown protein [Oryza sativa (japonica
  misc_feature (1)..(121): Homolog of NCBI NO: 22329158 NR Description: hypothetical protein [Arabidopsis thaliana]
  misc_feature (1)..(120): Homolog of NCBI NO: 40823013 NR Description: At2g15730 [Arabidopsis thaliana]
  misc_feature (1)..(125): Homolog of NCBI NO: 29824462 NR Description: unknown protein [Oryza sativa (japonica
MKQLNGTHKAHVHSKHEAEILAQYKPTIDKKTLITELKRSDKLAADALVNFKNTRHVVLYYEDVVSNRTMLMDVLDFLRLPKRKLFSRHVKIHTKRLCDHIDNWADVTDFLKGTPFESFLNGSRR

SEQ ID NO: 110701 - protein, 93 aa, Zea mays subsp. mays
  misc_feature (1)..(93): Ceres Seq. ID no. 15224337
  misc_feature (1)..(93): Homolog of NCBI NO: 34904786 NR Description: contains ESTs
  misc_feature (26)..(93): Homolog of NCBI NO: 34904786 NR Description: contains ESTs
  misc_feature (42)..(93): Homolog of NCBI NO: 30679514 NR Description: expressed protein [Arabidopsis thaliana]
  misc_feature (42)..(93): Homolog of NCBI NO: 25411661 NR Description: hypothetical protein At2g15730 [imported] -
  misc_feature (9)..(93): Homolog of NCBI NO: 15229813 NR Description: expressed protein [Arabidopsis thaliana]
  misc_feature (1)..(93): Homolog of NCBI NO: 14029013 NR Description: Unknown protein [Oryza sativa]
  misc_feature (1)..(93): Homolog of NCBI NO: 33146729 NR Description: unknown protein [Oryza sativa (japonica
  misc_feature (1)..(93): Homolog of NCBI NO: 22329158 NR Description: hypothetical protein [Arabidopsis thaliana]
  misc_feature (1)..(93): Homolog of NCBI NO: 40823013 NR Description: At2g15730 [Arabidopsis thaliana]
  misc_feature (1)..(93): Homolog of NCBI NO: 29824462 NR Description: unknown protein [Oryza sativa (japonica
MPNTYDRKECACTGVRFFAILSMQRSGSGWVETLLNSHPNISSNGEIFSVKERRSNITAITKTLDRLYNLDWYSSAAKNECTAAVGLKWMLNQ

SEQ ID NO: 110702 - DNA, 1260 bp, Zea mays subsp. mays
  misc_feature (1)..(1260): Ceres Seq. ID no. 12637732
aacgatggacgccagcccatgggccaacgatcctccgtggaccgacttcctaaccgcacgaacctccgagacggagcgtggcgcccgcctcggcgcctccgccctccgtcggcggcgcacggggagcatagaaggtgtcgtactcgtacctctcgcacacgcccccatcgccacgcgtgcaacgaagctggctccgtcgccatggccctgctgccgttgcccccctgctccccgtgccaccgccgggccgcgcccttgccggcgcccacggccgcctcggcgcgccaccgcagggggagcctgcgcctcgctgcagccggtgcctgctccggacctaccgccgcgcggaagccccgtcccaccgccgccgacaggaggaggtgcgaatgctttgacctccatcggcggttagttccttacgcggaggcttactgctggcagaagtccattgtcgagaggaggaaaaggttgatagacagcggcgaagaccactccgacaccttgattgctttgcaacatccaccggtctacacattgggcaccgacaacaaggaggaatacctccatttcaacaaggaagatgctcctttcgaggttcatcgtattaatcgcggcggtgaagtgacgtaccatggccctggacagcttgttatgtacccgattatgaatctgcggtaccacaaagaggatcttcactggtacttcaggtcactcgaagaagtgatcatccgcgcacttaaatccgtcttctctatcacggcagcaagaatagaaggtctcactggtgtttgggttggggaccataaagttgcggcgatagggatccacggttctcggatgatagtttatcacgggctcgcactaaacataacaactgaccttgctccattcggaatgattgatccttgcggcataaaggaccgcagtgtggggagcattaaggagatactacaaagggtgtctgatgcggaagagatcgatgacgcgtcactgatggatatagcgtatgattccatgatcaaggagtttgcggaactcttccagctcagtctagacttcagccctggttgcagtttccagtgagaacaacgattttagcagaccgtatgatgctgccgttgtattctggacggaatgttagctcacggcctttcgtgctcggtatctccgtgtctgctgcactccaccatgtataccacatccacctttcagtcgcaggatatctctggaatctgtagcagtacagtcgggttcttcggt

SEQ ID NO: 110703 - protein, 360 aa, Zea mays subsp. mays
  misc_feature (1)..(360): Ceres Seq. ID no. 12637733
  misc_feature (137)..(350): Homolog of NCBI NO: 16331217 NR Description: LipB protein [Synechocystis sp. PCC 6803]
  misc_feature (137)..(355): Homolog of NCBI NO: 22298375 NR Description: lipoate-protein ligase [Thermosynechococcus
  misc_feature (137)..(324): Homolog of NCBI NO: 23041482 NR Description: hypothetical protein [Trichodesmium erythraeum
  misc_feature (179)..(216): Homolog of NCBI NO: 15220259 NR Description: hypothetical protein; protein id: At1g47580.1
  misc_feature (238)..(352): Homolog of NCBI NO: 15220259 NR Description: hypothetical protein; protein id: At1g47580.1
  misc_feature (130)..(324): Homolog of NCBI NO: 23125051 NR Description: hypothetical protein [Nostoc punctiforme]
  misc_feature (130)..(351): Homolog of NCBI NO: 17230677 NR Description: lipoate-protein ligase B [Nostoc sp. PCC 7120]
  misc_feature (127)..(266): Homolog of NCBI NO: 25407705 NR Description: hypothetical protein AT4g31050 [imported] -
  misc_feature (126)..(352): Homolog of NCBI NO: 25405224 NR Description: F16N3.14 [imported] - Arabidopsis thaliana
  misc_feature (126)..(352): Homolog of NCBI NO: 18417727 NR Description: putative protein
NDGRQPMGQRSSVDRLPNRTNLRDGAWRPPRRLRPPSAAHGEHRRCRTRTSRTRPHRHACNEAGSVAMALLPLPPCSPCHRRAAPLPAPTAASARHRRGSLRLAAAGACSGPTAARKPRPTAADRRRCECFDLHRRLVPYAEAYCWQKSIVERRKRLIDSGEDHSDTLIALQHPPVYTLGTDNKEEYLHFNKEDAPFEVHRINRGGEVTYHGPGQLVMYPIMNLRYHKEDLHWYFRSLEEVIIRALKSVFSITAARIEGLTGVWVGDHKVAAIGIHGSRMIVYHGLALNITTDLAPFGMIDPCGIKDRSVGSIKEILQRVSDAEEIDDASLMDIAYDSMIKEFAELFQLSLDFSPGCSFQ

SEQ ID NO: 110704 - protein, 354 aa, Zea mays subsp. mays
  misc_feature (1)..(354): Ceres Seq. ID no. 12637734
  misc_feature (124)..(345): Homolog of NCBI NO: 17230677 NR Description: lipoate-protein ligase B [Nostoc sp. PCC 7120]
  misc_feature (121)..(260): Homolog of NCBI NO: 25407705 NR Description: hypothetical protein AT4g31050 [imported] -
  misc_feature (120)..(346): Homolog of NCBI NO: 25405224 NR Description: F16N3.14 [imported] - Arabidopsis thaliana
  misc_feature (120)..(346): Homolog of NCBI NO: 18417727 NR Description: putative protein
  misc_feature (131)..(344): Homolog of NCBI NO: 16331217 NR Description: LipB protein [Synechocystis sp. PCC 6803]
  misc_feature (131)..(349): Homolog of NCBI NO: 22298375 NR Description: lipoate-protein ligase [Thermosynechococcus
  misc_feature (131)..(318): Homolog of NCBI NO: 23041482 NR Description: hypothetical protein [Trichodesmium erythraeum
  misc_feature (173)..(210): Homolog of NCBI NO: 15220259 NR Description: hypothetical protein; protein id: At1g47580.1
  misc_feature (232)..(346): Homolog of NCBI NO: 15220259 NR Description: hypothetical protein; protein id: At1g47580.1
  misc_feature (124)..(318): Homolog of NCBI NO: 23125051 NR Description: hypothetical protein [Nostoc punctiforme]
MGQRSSVDRLPNRTNLRDGAWRPPRRLRPPSAAHGEHRRCRTRTSRTRPHRHACNEAGSVAMALLPLPPCSPCHRRAAPLPAPTAASARHRRGSLRLAAAGACSGPTAARKPRPTAADRRRCECFDLHRRLVPYAEAYCWQKSIVERRKRLIDSGEDHSDTLIALQHPPVYTLGTDNKEEYLHFNKEDAPFEVHRINRGGEVTYHGPGQLVMYPIMNLRYHKEDLHWYFRSLEEVIIRALKSVFSITAARIEGLTGVWVGDHKVAAIGIHGSRMIVYHGLALNITTDLAPFGMIDPCGIKDRSVGSIKEILQRVSDAEEIDDASLMDIAYDSMIKEFAELFQLSLDFSPGCSFQ

SEQ ID NO: 110705 - protein, 293 aa, Zea mays subsp. mays
  misc_feature (1)..(293): Ceres Seq. ID no. 12637735
  misc_feature (70)..(283): Homolog of NCBI NO: 16331217 NR Description: LipB protein [Synechocystis sp. PCC 6803]
  misc_feature (70)..(288): Homolog of NCBI NO: 22298375 NR Description: lipoate-protein ligase [Thermosynechococcus
  misc_feature (70)..(257): Homolog of NCBI NO: 23041482 NR Description: hypothetical protein [Trichodesmium erythraeum
  misc_feature (112)..(149): Homolog of NCBI NO: 15220259 NR Description: hypothetical protein; protein id: At1g47580.1
  misc_feature (171)..(285): Homolog of NCBI NO: 15220259 NR Description: hypothetical protein; protein id: At1g47580.1
  misc_feature (63)..(257): Homolog of NCBI NO: 23125051 NR Description: hypothetical protein [Nostoc punctiforme]
  misc_feature (63)..(284): Homolog of NCBI NO: 17230677 NR Description: lipoate-protein ligase B [Nostoc sp. PCC 7120]
  misc_feature (60)..(199): Homolog of NCBI NO: 25407705 NR Description: hypothetical protein AT4g31050 [imported] -
  misc_feature (59)..(285): Homolog of NCBI NO: 25405224 NR Description: F16N3.14 [imported] - Arabidopsis thaliana
  misc_feature (59)..(285): Homolog of NCBI NO: 18417727 NR Description: putative protein
MALLPLPPCSPCHRRAAPLPAPTAASARHRRGSLRLAAAGACSGPTAARKPRPTAADRRRCECFDLHRRLVPYAEAYCWQKSIVERRKRLIDSGEDHSDTLIALQHPPVYTLGTDNKEEYLHFNKEDAPFEVHRINRGGEVTYHGPGQLVMYPIMNLRYHKEDLHWYFRSLEEVIIRALKSVFSITAARIEGLTGVWVGDHKVAAIGIHGSRMIVYHGLALNITTDLAPFGMIDPCGIKDRSVGSIKEILQRVSDAEEIDDASLMDIAYDSMIKEFAELFQLSLDFSPGCSFQ

SEQ ID NO: 110706 - DNA, 2169 bp, Zea mays subsp. mays
  misc_feature (1)..(2169): Ceres Seq. ID no. 15225419
gttagtgtatcaaaaccaattcgcgacatcacttaggaaggggaaagcaggggccggaaaaagaagaagagacgggaatggcaagctccgactcaaatcccaccgatgcattcgagtacatgctgcttgagaaggatcctgatctctaccggacggttttctctggtccgagccagacaagcccatggattgacccgagtgtgttaaagctgaagcaccggatagggagaggtccatttggggatgtatggatagcaactcaccaccaaaggacagaggatttcgatcagtaccatgaggttgcggtgaagatgctgcatccaattaaagaggaccagctgcagatcttctcagcgaggttccatgagatcttcagcaaatgtcagggtctgggcaacgtttgtttcttgcatggcatctctacacagaatgggaggatttgtatagctatgaagttctatgaaggatccatcgggaacaagatggctcggcttaaaggtggaaagctccctttgtcagaagttctaagatatggggctgatttggcacgcggtgtactaggcctacacaccagggggatattgatcctaaatatgaaaccttgcaattttctcatagacgaaaatgattgtgctgtgctgggggattttgggattccatccctgctgtttggcctttcattacctaatccggaccttatccagaggcttggaactccaaattacatggctcctgaacaatggcaaccaaacatcagaggtccgattagttatgaaactgattcgtggggttttgcgtgcagcgtccttgagatgttgactggcattcagccatggcgtggaaagtcagcagatgagatatatcagttggttgtcttgaagaaagaaaagccaatattcccgtgcagtctacctccagacattgaaaatgtgctttctggatgttttgaatatgactttagaaaccgtcccttgatgaaagacattttgcatgcatttgagagtgctaaaggtgcagatcatgacaacattggttggggcaattctgaaaatgctatggtagacaggataaccatgccaaatcgcatcaattggttacactttaaggacaagcttcaagtgggcgacaaggtccgttcaagaaagcttaaaaactcttgcggtcctgaaactatggaaatccctgatggaaccatagttggcattgaggacgatggcgagcgtgacgcttacgttcttgtacgagtccacgcgctacacaaccctttaaaggttcgcttttcaacggtggagagggtaacatatggttttgctgctggagactgggtgcggctgagggaggaggacaagaagcgctctcaggttggcattcttcacagcatcgaccgtgacggtgcagtggcagttggtctgataggagtggataccccttggaagggcaattattcagacctccagatggctgaagcctactgtgtcggacagtttgtgcgcctgaaggccagcatttcaagcccaaggttcgaatggcagcgaaagcggggtggattagcttctactggccgaatttcacagatacatccgaacgggttgctcgtcgtgaaatttcctggcaagtttaaccttggcgaagtgtgcagttgcctggcagacccctccgaggtggaggtggtgagctttgacaaatgcgaggggattgtgaagaagtacgagcatctcgaggacttccattgggcagtgaggcccctgttcgttgctattggtttcctcacggcgatcaagctgggtgtttttgttggcaagagcatttcgaggccgaggagccggaaggttgccagcatctctgatcagagtggagattaccagcagcagcaccagcagcaggtagtccaacaaagtgctaatgcggcgtggcttcctccaccagttgcaaacatgttcttcggagatagtgttgggacttctggataagaaatcataactggcccggagttttgcttaaaatagcaatttggaattgtggttcctagttgtgtgcatatttaggcctgaaatggtttatcccttatctaagcatctgtacatatctgccttatgcaccacaagttctgtaaataaactctagaattatcgtcttaaacatacaagtatgcgaagctatttcttgctt

SEQ ID NO: 110707 - protein, 630 aa, Zea mays subsp. mays
  misc_feature (1)..(630): Ceres Seq. ID no. 15225420
  misc_feature (34)..(308): Homolog of NCBI NO: 15227883 NR Description: protein kinase family [Arabidopsis thaliana]
  misc_feature (49)..(346): Homolog of NCBI NO: 34334393 NR Description: NIMA-related kinase 2 [Chlamydomonas reinhardtii]
  misc_feature (40)..(318): Homolog of NCBI NO: 39595415 NR Description: Hypothetical protein CBG04061 [Caenorhabditis
  misc_feature (34)..(311): Homolog of NCBI NO: 34901608 NR Description: P0571D04.18 [Oryza sativa (japonica
  misc_feature (45)..(304): Homolog of NCBI NO: 17505356 NR Description: mitogen activated protein kinase kinase kinase
  misc_feature (34)..(313): Homolog of NCBI NO: 34393850 NR Description: putative serine/threonine protein kinase
  misc_feature (45)..(318): Homolog of NCBI NO: 17505358 NR Description: mitogen activated protein kinase kinase kinase
  misc_feature (8)..(90): Homolog of NCBI NO: 7485349 NR Description: hypothetical protein F10M6.110 - Arabidopsis
  misc_feature (113)..(594): Homolog of NCBI NO: 7485349 NR Description: hypothetical protein F10M6.110 - Arabidopsis
  misc_feature (8)..(594): Homolog of NCBI NO: 22329080 NR Description: protein kinase family [Arabidopsis thaliana]
MASSDSNPTDAFEYMLLEKDPDLYRTVFSGPSQTSPWIDPSVLKLKHRIGRGPFGDVWIATHHQRTEDFDQYHEVAVKMLHPIKEDQLQIFSARFHEIFSKCQGLGNVCFLHGISTQNGRICIAMKFYEGSIGNKMARLKGGKLPLSEVLRYGADLARGVLGLHTRGILILNMKPCNFLIDENDCAVLGDFGIPSLLFGLSLPNPDLIQRLGTPNYMAPEQWQPNIRGPISYETDSWGFACSVLEMLTGIQPWRGKSADEIYQLVVLKKEKPIFPCSLPPDIENVLSGCFEYDFRNRPLMKDILHAFESAKGADHDNIGWGNSENAMVDRITMPNRINWLHFKDKLQVGDKVRSRKLKNSCGPETMEIPDGTIVGIEDDGERDAYVLVRVHALHNPLKVRFSTVERVTYGFAAGDWVRLREEDKKRSQVGILHSIDRDGAVAVGLIGVDTPWKGNYSDLQMAEAYCVGQFVRLKASISSPRFEWQRKRGGLASTGRISQIHPNGLLVVKFPGKFNLGEVCSCLADPSEVEVVSFDKCEGIVKKYEHLEDFHWAVRPLFVAIGFLTAIKLGVFVGKSISRPRSRKVASISDQSGDYQQQHQQQVVQQSANAAWLPPPVANMFFGDSVGTSG

SEQ ID NO: 110708 - protein, 616 aa, Zea mays subsp. mays
  misc_feature (1)..(616): Ceres Seq. ID no. 15225421
  misc_feature (20)..(294): Homolog of NCBI NO: 15227883 NR Description: protein kinase family [Arabidopsis thaliana]
  misc_feature (35)..(332): Homolog of NCBI NO: 34334393 NR Description: NIMA-related kinase 2 [Chlamydomonas reinhardtii]
  misc_feature (26)..(304): Homolog of NCBI NO: 39595415 NR Description: Hypothetical protein CBG04061 [Caenorhabditis
  misc_feature (20)..(297): Homolog of NCBI NO: 34901608 NR Description: P0571D04.18 [Oryza sativa (japonica
  misc_feature (31)..(290): Homolog of NCBI NO: 17505356 NR Description: mitogen activated protein kinase kinase kinase
  misc_feature (20)..(299): Homolog of NCBI NO: 34393850 NR Description: putative serine/threonine protein kinase
  misc_feature (31)..(304): Homolog of NCBI NO: 17505358 NR Description: mitogen activated protein kinase kinase kinase
  misc_feature (1)..(76): Homolog of NCBI NO: 7485349 NR Description: hypothetical protein F10M6.110 - Arabidopsis
  misc_feature (99)..(580): Homolog of NCBI NO: 7485349 NR Description: hypothetical protein F10M6.110 - Arabidopsis
  misc_feature (1)..(580): Homolog of NCBI NO: 22329080 NR Description: protein kinase family [Arabidopsis thaliana]
MLLEKDPDLYRTVFSGPSQTSPWIDPSVLKLKHRIGRGPFGDVWIATHHQRTEDFDQYHEVAVKMLHPIKEDQLQIFSARFHEIFSKCQGLGNVCFLHGISTQNGRICIAMKFYEGSIGNKMARLKGGKLPLSEVLRYGADLARGVLGLHTRGILILNMKPCNFLIDENDCAVLGDFGIPSLLFGLSLPNPDLIQRLGTPNYMAPEQWQPNIRGPISYETDSWGFACSVLEMLTGIQPWRGKSADEIYQLVVLKKEKPIFPCSLPPDIENVLSGCFEYDFRNRPLMKDILHAFESAKGADHDNIGWGNSENAMVDRITMPNRINWLHFKDKLQVGDKVRSRKLKNSCGPETMEIPDGTIVGIEDDGERDAYVLVRVHALHNPLKVRFSTVERVTYGFAAGDWVRLREEDKKRSQVGILHSIDRDGAVAVGLIGVDTPWKGNYSDLQMAEAYCVGQFVRLKASISSPRFEWQRKRGGLASTGRISQIHPNGLLVVKFPGKFNLGEVCSCLADPSEVEVVSFDKCEGIVKKYEHLEDFHWAVRPLFVAIGFLTAIKLGVFVGKSISRPRSRKVASISDQSGDYQQQHQQQVVQQSANAAWLPPPVANMFFGDSVGTSG

SEQ ID NO: 110709 - protein, 552 aa, Zea mays subsp. mays
  misc_feature (1)..(552): Ceres Seq. ID no. 15225422
  misc_feature (1)..(230): Homolog of NCBI NO: 15227883 NR Description: protein kinase family [Arabidopsis thaliana]
  misc_feature (1)..(268): Homolog of NCBI NO: 34334393 NR Description: NIMA-related kinase 2 [Chlamydomonas reinhardtii]
  misc_feature (1)..(240): Homolog of NCBI NO: 39595415 NR Description: Hypothetical protein CBG04061 [Caenorhabditis
  misc_feature (1)..(233): Homolog of NCBI NO: 34901608 NR Description: P0571D04.18 [Oryza sativa (japonica
  misc_feature (1)..(226): Homolog of NCBI NO: 17505356 NR Description: mitogen activated protein kinase kinase kinase
  misc_feature (1)..(235): Homolog of NCBI NO: 34393850 NR Description: putative serine/threonine protein kinase
  misc_feature (1)..(240): Homolog of NCBI NO: 17505358 NR Description: mitogen activated protein kinase kinase kinase
  misc_feature (1)..(12): Homolog of NCBI NO: 7485349 NR Description: hypothetical protein F10M6.110 - Arabidopsis
  misc_feature (35)..(516): Homolog of NCBI NO: 7485349 NR Description: hypothetical protein F10M6.110 - Arabidopsis
  misc_feature (1)..(516): Homolog of NCBI NO: 22329080 NR Description: protein kinase family [Arabidopsis thaliana]
MLHPIKEDQLQIFSARFHEIFSKCQGLGNVCFLHGISTQNGRICIAMKFYEGSIGNKMARLKGGKLPLSEVLRYGADLARGVLGLHTRGILILNMKPCNFLIDENDCAVLGDFGIPSLLFGLSLPNPDLIQRLGTPNYMAPEQWQPNIRGPISYETDSWGFACSVLEMLTGIQPWRGKSADEIYQLVVLKKEKPIFPCSLPPDIENVLSGCFEYDFRNRPLMKDILHAFESAKGADHDNIGWGNSENAMVDRITMPNRINWLHFKDKLQVGDKVRSRKLKNSCGPETMEIPDGTIVGIEDDGERDAYVLVRVHALHNPLKVRFSTVERVTYGFAAGDWVRLREEDKKRSQVGILHSIDRDGAVAVGLIGVDTPWKGNYSDLQMAEAYCVGQFVRLKASISSPRFEWQRKRGGLASTGRISQIHPNGLLVVKFPGKFNLGEVCSCLADPSEVEVVSFDKCEGIVKKYEHLEDFHWAVRPLFVAIGFLTAIKLGVFVGKSISRPRSRKVASISDQSGDYQQQHQQQVVQQSANAAWLPPPVANMFFGDSVGTSG

SEQ ID NO: 110710 - DNA, 718 bp, Zea mays subsp. mays
  misc_feature (1)..(718): Ceres Seq. ID no. 13598936
acatcctaatcgaaaaagttttacaatcatgtctcattctcatgatgtgcatatgcagtgaaaaacttcaacccaagaatggcgatgtcttggacaagagggttaaatcatggtgttgttccgaggcatgccgctcaattggtagagagcagaagccttgcaattgcaagcaaggcgaagaagggtggaaaggctgatgctggcaaaactcctgctctcagccaagagctcaagagtacaacagtgttcggggcaaacatcttcaaggagggttctgatccgaaaatccaaccagactctgagtatcctgactggctgtggcacttgctcgacaatcgtcctgtactaagtgagctgcggaggaaagatcccaagacactctcttatgaagacctgaagcgttttgtcaagttggacaaccgatccaggatcaagataaggaatgacctcaatgctaagaactgacctggagtcttggacgaaacaggacctgctctactgttctttttattattaatataatactagacgacatgaataatttttctggagtttttggcaaaacatagcgacttgggatgttaaaatgttaagatgtgcttggtttgttactcttttaggcagcttacgacactgtcatgctttttgttcttccatcttgggaaagatgcagctttgtgcccagtacttagcaaattatcaagttccatggttctgc

SEQ ID NO: 110711 - protein, 128 aa, Zea mays subsp. mays
  misc_feature (1)..(128): Ceres Seq. ID no. 15222458
  misc_feature (20)..(128): Homolog of NCBI NO: 15241366 NR Description: hypothetical protein [Arabidopsis thaliana]
  misc_feature (12)..(128): Homolog of NCBI NO: 18395929 NR Description: expressed protein [Arabidopsis thaliana]
MAMSWTRGLNHGVVPRHAAQLVESRSLAIASKAKKGGKADAGKTPALSQELKSTTVFGANIFKEGSDPKIQPDSEYPDWLWHLLDNRPVLSELRRKDPKTLSYEDLKRFVKLDNRSRIKIRNDLNAKN

SEQ ID NO: 110712 - protein, 126 aa, Zea mays subsp. mays
  misc_feature (1)..(126): Ceres Seq. ID no. 15222459
  misc_feature (18)..(126): Homolog of NCBI NO: 15241366 NR Description: hypothetical protein [Arabidopsis thaliana]
  misc_feature (10)..(126): Homolog of NCBI NO: 18395929 NR Description: expressed protein [Arabidopsis thaliana]
MSWTRGLNHGVVPRHAAQLVESRSLAIASKAKKGGKADAGKTPALSQELKSTTVFGANIFKEGSDPKIQPDSEYPDWLWHLLDNRPVLSELRRKDPKTLSYEDLKRFVKLDNRSRIKIRNDLNAKN

SEQ ID NO: 110713 - protein, 64 aa, Zea mays subsp. mays
  misc_feature (1)..(64): Ceres Seq. ID no. 15222460
ILIEKVLQSCLILMMCICSEKLQPKNGDVLDKRVKSWCCSEACRSIGREQKPCNCKQGEEGWKG

SEQ ID NO: 110714 - DNA, 1897 bp, Zea mays subsp. mays
  misc_feature (1)..(1897): Ceres Seq. ID no. 15177722
  misc_feature: MA Experiment ID: 20000534 Result: Down-regulated in Transcription
  misc_feature: MA Experiment 20000534 PARAMETER Experiment Name: Zm_Hybrid_Pollen_P Parameter: Age (day) Value: 8
  misc_feature: MA Experiment 20000534 PARAMETER Experiment Name: Zm_Hybrid_Pollen_P Parameter: Organism Value: Zea mays
  misc_feature: MA Experiment 20000534 PARAMETER Experiment Name: Zm_Hybrid_Pollen_P Parameter: Plant Line Value: 35A19
  misc_feature: MA Experiment 20000534 PARAMETER Experiment Name: Zm_Hybrid_Pollen_P Parameter: Tissue Value: Pollen vs. Aerial
accttcctctcttctcccctcacccctttctggctttctcctccgccgaagccccgagtcctgccggaattctagatcccggaggcaacttgccacgggctcctccgctccggtcgctgaatcgtactatcgtgctctcgacagaaagcccggccgaaacccagccggaccaggaccaagccctgttcgccgtgcgcgcggtgccccgggccagatctgcgagatctgcaccgacaccgctacgcctatcacgagcctgtaggtggatgctctcgtgatctctcggaggccgcggggactgagcggcatctcggcggaggcgtagcctgcttagctggtggcctgccgagatgcagcggaacggggtggtggaatgcagcgtgtgtcgctcccgggtggtggtgccgagtccccggagcgtgtccagggcatacgacaagcaccgcagcaagatgtcgtccaagttccgcgcgctcaacgtcttcctcgttgtcggcgactgcatccttgttggtctccagcccatcctagtgttcatgtcaaaggttgatgggaagttccagttcagtcccatcagtgttaactttctgaccgaggttatgaaagtcatctttgctattgtgatgcttataattcagtctagaaagcaaaaggttggagaaaagccactcttggcacgttcaaccttcatacaggcagcccgtaacaatgtacttctagctgttcctgctcttctgtatgccatcaacaattacttaaaattcatcatgcagttgtacttcaatcctgcgactgtgaaaatgttaagtaatctaaaggtactggttatagctgttcttctgaaatttataatgagaaggagattctcagttattcagtgggaagctcttgctttattgcttattggaatcagcatcaatcaacttcgaactgtacctgcgggcaatacagcatttggtcttcctgtcactgctattgcatacatatatacattgatttttgtaactgttccttcaatggcttctgtctacaatgaatatgccttgaaaagccaatatgacactagcatttatcttcagaacttgtttctgtatggatatggagcaatattcaacttccttggcattctcgggactgccttattccaagggccagagagttttaatattcttcgaggacattcaagggccacgatgtttctcatatgtaataatgcagcacaaggcattctatcttcattcttcttcaagtatgcagacacaattttgaagaagtattcgtcaactgttgccacgatatttactggcctagcttctgctgcatttttggggcataccttgaccattaattttctcctgggcatatcagtggtgtttatttcaatgcaccagttcttctctccacttgctaaagtcaaagatgacaaaccagctgacttaatagagttggaagacacacaaaatcaccggtcatccgaatcttcttttgtaaatatgactgctggtgctgctgttgatgcgagccatcggattggaactgatgagaggcaacccctgttgcctacatgaactagtttcttgaggtttggtgtagcattgtaagttgaataaactattgtacactgtaaaggcaaaggaaagaaagaactaccaacatcttctccattttctttcatttttgggacgaggccggccggtggcctgccatctgtggccgtgggagtgacagagcagcaaacattttgataggcttataattcaatagggattttccagatacggcacttgtaacagaattttcttggaggtgtatatgaacaacggcgatgtgacaatcttttctgtacggaacatttatactattgagtgattgatttactattactatgttgttactc

SEQ ID NO: 110715 - protein, 405 aa, Zea mays subsp. mays
  misc_feature (1)..(405): Ceres Seq. ID no. 15177723
  misc_feature (105)..(341): Pfam Name: Nucleotide-sugar transporter Pfam Description: Nucleotide-sugar transporter
  misc_feature (6)..(336): Homolog of NCBI NO: 30689311 NR Description: expressed protein [Arabidopsis thaliana]
  misc_feature (215)..(391): Homolog of NCBI NO: 30689311 NR Description: expressed protein [Arabidopsis thaliana]
  misc_feature (215)..(391): Homolog of NCBI NO: 25408848 NR Description: hypothetical protein At2g43240 [imported] -
  misc_feature (6)..(336): Homolog of NCBI NO: 25408848 NR Description: hypothetical protein At2g43240 [imported] -
  misc_feature (3)..(336): Homolog of NCBI NO: 11358902 NR Description: transporter-like protein - Arabidopsis thaliana
  misc_feature (4)..(57): Homolog of NCBI NO: 34907666 NR Description: putative transporter-like protein
  misc_feature (46)..(389): Homolog of NCBI NO: 34907666 NR Description: putative transporter-like protein
  misc_feature (3)..(404): Homolog of NCBI NO: 18411150 NR Description: transporter-related protein [Arabidopsis
  misc_feature (3)..(404): Homolog of NCBI NO: 26450627 NR Description: unknown protein [Arabidopsis thaliana]
  misc_feature (1)..(404): Homolog of NCBI NO: 38345234 NR Description: OSJNBa0084K20.12 [Oryza sativa (japonica
MQRNGVVECSVCRSRVVVPSPRSVSRAYDKHRSKMSSKFRALNVFLVVGDCILVGLQPILVFMSKVDGKFQFSPISVNFLTEVMKVIFAIVMLIIQSRKQKVGEKPLLARSTFIQAARNNVLLAVPALLYAINNYLKFIMQLYFNPATVKMLSNLKVLVIAVLLKFIMRRRFSVIQWEALALLLIGISINQLRTVPAGNTAFGLPVTAIAYIYTLIFVTVPSMASVYNEYALKSQYDTSIYLQNLFLYGYGAIFNFLGILGTALFQGPESFNILRGHSRATMFLICNNAAQGILSSFFFKYADTILKKYSSTVATIFTGLASAAFLGHTLTINFLLGISVVFISMHQFFSPLAKVKDDKPADLIELEDTQNHRSSESSFVNMTAGAAVDASHRIGTDERQPLLPT

SEQ ID NO: 110716 - protein, 371 aa, Zea mays subsp. mays
  misc_feature (1)..(371): Ceres Seq. ID no. 15177724
  misc_feature (71)..(307): Pfam Name: Nucleotide-sugar transporter Pfam Description: Nucleotide-sugar transporter
  misc_feature (1)..(302): Homolog of NCBI NO: 30689311 NR Description: expressed protein [Arabidopsis thaliana]
  misc_feature (181)..(357): Homolog of NCBI NO: 30689311 NR Description: expressed protein [Arabidopsis thaliana]
  misc_feature (181)..(357): Homolog of NCBI NO: 25408848 NR Description: hypothetical protein At2g43240 [imported] -
  misc_feature (1)..(302): Homolog of NCBI NO: 25408848 NR Description: hypothetical protein At2g43240 [imported] -
  misc_feature (1)..(302): Homolog of NCBI NO: 11358902 NR Description: transporter-like protein - Arabidopsis thaliana
  misc_feature (1)..(23): Homolog of NCBI NO: 34907666 NR Description: putative transporter-like protein
  misc_feature (12)..(355): Homolog of NCBI NO: 34907666 NR Description: putative transporter-like protein
  misc_feature (1)..(370): Homolog of NCBI NO: 18411150 NR Description: transporter-related protein [Arabidopsis
  misc_feature (1)..(370): Homolog of NCBI NO: 26450627 NR Description: unknown protein [Arabidopsis thaliana]
  misc_feature (1)..(370): Homolog of NCBI NO: 38345234 NR Description: OSJNBa0084K20.12 [Oryza sativa (japonica
MSSKFRALNVFLVVGDCILVGLQPILVFMSKVDGKFQFSPISVNFLTEVMKVIFAIVMLIIQSRKQKVGEKPLLARSTFIQAARNNVLLAVPALLYAINNYLKFIMQLYFNPATVKMLSNLKVLVIAVLLKFIMRRRFSVIQWEALALLLIGISINQLRTVPAGNTAFGLPVTAIAYIYTLIFVTVPSMASVYNEYALKSQYDTSIYLQNLFLYGYGAIFNFLGILGTALFQGPESFNILRGHSRATMFLICNNAAQGILSSFFFKYADTILKKYSSTVATIFTGLASAAFLGHTLTINFLLGISVVFISMHQFFSPLAKVKDDKPADLIELEDTQNHRSSESSFVNMTAGAAVDASHRIGTDERQPLLPT

SEQ ID NO: 110717 - protein, 343 aa, Zea mays subsp. mays
  misc_feature (1)..(343): Ceres Seq. ID no. 15177725
  misc_feature (43)..(279): Pfam Name: Nucleotide-sugar transporter Pfam Description: Nucleotide-sugar transporter
  misc_feature (132)..(342): Homolog of NCBI NO: 11358902 NR Description: transporter-like protein - Arabidopsis thaliana
  misc_feature (1)..(274): Homolog of NCBI NO: 30689311 NR Description: expressed protein [Arabidopsis thaliana]
  misc_feature (153)..(329): Homolog of NCBI NO: 30689311 NR Description: expressed protein [Arabidopsis thaliana]
  misc_feature (153)..(329): Homolog of NCBI NO: 25408848 NR Description: hypothetical protein At2g43240 [imported] -
  misc_feature (1)..(274): Homolog of NCBI NO: 25408848 NR Description: hypothetical protein At2g43240 [imported] -
  misc_feature (1)..(274): Homolog of NCBI NO: 11358902 NR Description: transporter-like protein - Arabidopsis thaliana
  misc_feature (1)..(327): Homolog of NCBI NO: 34907666 NR Description: putative transporter-like protein
  misc_feature (1)..(342): Homolog of NCBI NO: 18411150 NR Description: transporter-related protein [Arabidopsis
  misc_feature (1)..(342): Homolog of NCBI NO: 26450627 NR Description: unknown protein [Arabidopsis thaliana]
  misc_feature (1)..(342): Homolog of NCBI NO: 38345234 NR Description: OSJNBa0084K20.12 [Oryza sativa (japonica
MSKVDGKFQFSPISVNFLTEVMKVIFAIVMLIIQSRKQKVGEKPLLARSTFIQAARNNVLLAVPALLYAINNYLKFIMQLYFNPATVKMLSNLKVLVIAVLLKFIMRRRFSVIQWEALALLLIGISINQLRTVPAGNTAFGLPVTAIAYIYTLIFVTVPSMASVYNEYALKSQYDTSIYLQNLFLYGYGAIFNFLGILGTALFQGPESFNILRGHSRATMFLICNNAAQGILSSFFFKYADTILKKYSSTVATIFTGLASAAFLGHTLTINFLLGISVVFISMHQFFSPLAKVKDDKPADLIELEDTQNHRSSESSFVNMTAGAAVDASHRIGTDERQPLLPT

SEQ ID NO: 110718 - DNA, 1692 bp, Zea mays subsp. mays
  misc_feature (1)..(1692): Ceres Seq. ID no. 15180156
ctcgccaccgcttccttcccgatgccgccgtcgacgatccgaagcatctccatcaccgtctccgacgacgacggtgctgcggcggcaccgtcacggcggccgcgcgctggaagacggaaggcggcggcgcgtagcttggggcagcgggcggtgcggctggtggcgcggtggtggcccgttctcctgctcctcccggctgtcgcgctcctcctcttcgaggcgtcgcggctccgcgcctcatccccgggccccgccccaccggtctccagcctcggacggctcgacccgaccacacgtctcgtccatggcgtgcgcgagccttgcttgaagctccttagccccaaaagtttggcaaatgtggtgttcccggagggtacaagactcgattctgtggtgagcagaatcacgtacaaaactgatgacgatgactatgacacataccactccgaagcaaactctacatatttactgcaacatgcggaagcaacaaggttcgacctgtttacaggatttcagacacttgctgaaagggaagatagcttcaaggtgaatgagactgttagtgtgcactgtggtttctacagcgacaatggtggcttcaaaatttctgaggaggacaggagatacatgagagcctgtaaagttgttgtgtctacctgtgcatttggtggtggggatgatctatatcaacctattggaatggtcaattcttctattggcagggtttgctatgtggctttctgggatgaagtgacactagcagctcaggaagctgaaggaaaggtaattggtgatgatagcatgataggaaggtggcggatcattattgtcaggagcctcccttttgtagatcaacgattaaatgggaagataccaaagatgttgactcatcgccttttcacagaggcaaggtactctatatgggttgactctaaataccaattacgaagagatcctataggaatgcttgaagctcttctttggaggacaaactctacatttgctatctctgaacatggagcacggagtaacatatatgatgaggggaaagctattgttcaaaagcacaaggctacccctgaagaggtagaggtacaattgactcggtatcgtcaagatggaatgccggacacaaaaagattgcacggactgaaagctctagccgaagcctctgttattgtgagggaactcacccctgcaacgaaccatttcatgtgtgcttggtttaatgaagtggttcgcttcacatctcgtgatcagctcagttttccatacgttttgtggcggctaaacatgcatggattgagcatgtttcctgtatgcactcgcagggatcttgtgaatagtttgggtcacacaaggaaagtaaaacctcttacacagacaaattcagggtcttctactacttcgtaaccttccccccagttcatttgctggtagccaactaaccattgatttacatagtcgatactcgacatctctggttcacaattttgttgttgtatattatcatctttgcgttcttcctgcgagggaatcctggatctgaaccagaaacacgttaagctgttgcttcactgcaaagcaatcacacgatgttggcactatatatgtaaaagatatgccttctttggttagaagagaatgaacacttttgtgccccctttccgtttcctgatgtgttgaacatgc

SEQ ID NO: 110719 - protein, 470 aa, Zea mays subsp. mays
  misc_feature (1)..(470): Ceres Seq. ID no. 15180157
  misc_feature (152)..(452): Pfam Name: Protein of unknown function (DUF616) Pfam Description: Protein of unknown function (DUF616)
  misc_feature (11)..(461): Homolog of NCBI NO: 40539063 NR Description: hypothetical protein [Oryza sativa (japonica
  misc_feature (152)..(455): Homolog of NCBI NO: 18420250 NR Description: expressed protein [Arabidopsis thaliana]
  misc_feature (168)..(452): Homolog of NCBI NO: 25403429 NR Description: protein F12K21.12 [imported] - Arabidopsis
  misc_feature (168)..(457): Homolog of NCBI NO: 15233955 NR Description: expressed protein [Arabidopsis thaliana]
  misc_feature (15)..(459): Homolog of NCBI NO: 10177269 NR Description: gb|AAC32911.1~gene_id:MJB21.3~similar to unknown
  misc_feature (15)..(459): Homolog of NCBI NO: 30694104 NR Description: expressed protein [Arabidopsis thaliana]
  misc_feature (15)..(295): Homolog of NCBI NO: 21536990 NR Description: unknown [Arabidopsis thaliana]
  misc_feature (155)..(452): Homolog of NCBI NO: 15227062 NR Description: hypothetical protein [Arabidopsis thaliana]
  misc_feature (152)..(455): Homolog of NCBI NO: 7452444 NR Description: hypothetical protein F20M13.60 - Arabidopsis
  misc_feature (8)..(467): Homolog of NCBI NO: 34909520 NR Description: P0481E12.30 [Oryza sativa (japonica
LATASFPMPPSTIRSISITVSDDDGAAAAPSRRPRAGRRKAAARSLGQRAVRLVARWWPVLLLLPAVALLLFEASRLRASSPGPAPPVSSLGRLDPTTRLVHGVREPCLKLLSPKSLANVVFPEGTRLDSVVSRITYKTDDDDYDTYHSEANSTYLLQHAEATRFDLFTGFQTLAEREDSFKVNETVSVHCGFYSDNGGFKISEEDRRYMRACKVVVSTCAFGGGDDLYQPIGMVNSSIGRVCYVAFWDEVTLAAQEAEGKVIGDDSMIGRWRIIIVRSLPFVDQRLNGKIPKMLTHRLFTEARYSIWVDSKYQLRRDPIGMLEALLWRTNSTFAISEHGARSNIYDEGKAIVQKHKATPEEVEVQLTRYRQDGMPDTKRLHGLKALAEASVIVRELTPATNHFMCAWFNEVVRFTSRDQLSFPYVLWRLNMHGLSMFPVCTRRDLVNSLGHTRKVKPLTQTNSGSSTTS

SEQ ID NO: 110720 - protein, 463 aa, Zea mays subsp. mays
  misc_feature (1)..(463): Ceres Seq. ID no. 15180158
  misc_feature (145)..(445): Pfam Name: Protein of unknown function (DUF616) Pfam Description: Protein of unknown function (DUF616)
  misc_feature (145)..(448): Homolog of NCBI NO: 18420250 NR Description: expressed protein [Arabidopsis thaliana]
  misc_feature (145)..(448): Homolog of NCBI NO: 7452444 NR Description: hypothetical protein F20M13.60 - Arabidopsis
  misc_feature (161)..(445): Homolog of NCBI NO: 25403429 NR Description: protein F12K21.12 [imported] - Arabidopsis
  misc_feature (148)..(445): Homolog of NCBI NO: 15227062 NR Description: hypothetical protein [Arabidopsis thaliana]
  misc_feature (161)..(450): Homolog of NCBI NO: 15233955 NR Description: expressed protein [Arabidopsis thaliana]
  misc_feature (8)..(288): Homolog of NCBI NO: 21536990 NR Description: unknown [Arabidopsis thaliana]
  misc_feature (8)..(452): Homolog of NCBI NO: 10177269 NR Description: gb|AAC32911.1~gene_id:MJB21.3~similar to unknown
  misc_feature (8)..(452): Homolog of NCBI NO: 30694104 NR Description: expressed protein [Arabidopsis thaliana]
  misc_feature (4)..(454): Homolog of NCBI NO: 40539063 NR Description: hypothetical protein [Oryza sativa (japonica
  misc_feature (1)..(460): Homolog of NCBI NO: 34909520 NR Description: P0481E12.30 [Oryza sativa (japonica
MPPSTIRSISITVSDDDGAAAAPSRRPRAGRRKAAARSLGQRAVRLVARWWPVLLLLPAVALLLFEASRLRASSPGPAPPVSSLGRLDPTTRLVHGVREPCLKLLSPKSLANVVFPEGTRLDSVVSRITYKTDDDDYDTYHSEANSTYLLQHAEATRFDLFTGFQTLAEREDSFKVNETVSVHCGFYSDNGGFKISEEDRRYMRACKVVVSTCAFGGGDDLYQPIGMVNSSIGRVCYVAFWDEVTLAAQEAEGKVIGDDSMIGRWRIIIVRSLPFVDQRLNGKIPKMLTHRLFTEARYSIWVDSKYQLRRDPIGMLEALLWRTNSTFAISEHGARSNIYDEGKAIVQKHKATPEEVEVQLTRYRQDGMPDTKRLHGLKALAEASVIVRELTPATNHFMCAWFNEVVRFTSRDQLSFPYVLWRLNMHGLSMFPVCTRRDLVNSLGHTRKVKPLTQTNSGSSTTS

SEQ ID NO: 110721 - protein, 261 aa, Zea mays subsp. mays
  misc_feature (1)..(261): Ceres Seq. ID no. 15180159
  misc_feature (1)..(243): Pfam Name: Protein of unknown function (DUF616) Pfam Description: Protein of unknown function (DUF616)
  misc_feature (1)..(246): Homolog of NCBI NO: 18420250 NR Description: expressed protein [Arabidopsis thaliana]
  misc_feature (1)..(246): Homolog of NCBI NO: 7452444 NR Description: hypothetical protein F20M13.60 - Arabidopsis
  misc_feature (1)..(243): Homolog of NCBI NO: 25403429 NR Description: protein F12K21.12 [imported] - Arabidopsis
  misc_feature (1)..(243): Homolog of NCBI NO: 15227062 NR Description: hypothetical protein [Arabidopsis thaliana]
  misc_feature (1)..(248): Homolog of NCBI NO: 15233955 NR Description: expressed protein [Arabidopsis thaliana]
  misc_feature (1)..(86): Homolog of NCBI NO: 21536990 NR Description: unknown [Arabidopsis thaliana]
  misc_feature (1)..(250): Homolog of NCBI NO: 10177269 NR Description: gb|AAC32911.1~gene_id:MJB21.3~similar to unknown
  misc_feature (1)..(250): Homolog of NCBI NO: 30694104 NR Description: expressed protein [Arabidopsis thaliana]
  misc_feature (1)..(252): Homolog of NCBI NO: 40539063 NR Description: hypothetical protein [Oryza sativa (japonica
  misc_feature (1)..(258): Homolog of NCBI NO: 34909520 NR Description: P0481E12.30 [Oryza sativa (japonica
MRACKVVVSTCAFGGGDDLYQPIGMVNSSIGRVCYVAFWDEVTLAAQEAEGKVIGDDSMIGRWRIIIVRSLPFVDQRLNGKIPKMLTHRLFTEARYSIWVDSKYQLRRDPIGMLEALLWRTNSTFAISEHGARSNIYDEGKAIVQKHKATPEEVEVQLTRYRQDGMPDTKRLHGLKALAEASVIVRELTPATNHFMCAWFNEVVRFTSRDQLSFPYVLWRLNMHGLSMFPVCTRRDLVNSLGHTRKVKPLTQTNSGSSTTS

SEQ ID NO: 110722 - DNA, 1143 bp, Zea mays subsp. mays
  misc_feature (1)..(1143): Ceres Seq. ID no. 15180313
aacgagagttcttcttggatcgtggactcgatcgaatactcgatcgcggcgcgacacattgcccacgccgcgccgactagctagctaccagcctagctagctaccaccaacgaccaccacaccagtacaccactgcacttcgtcccactgctcggcccgatcacgatcgatccagtgaagatgccgccagctcccagccccggcgcacacggcgccagcggcgcggcgacgccgcccagcaagccgcagagcccgctgcgcatcacgcacgacggcgagttctacgcgcgcctgctcaccagggagagctcgctgggcaacccctcgttccgctactacggcgcggggagcggcgccgtgccgttcgtgtgggagtcccagccggggacgcccaaggacgcctactcctgccggatgctggccgccgccgccgcggtcgcggtcacgccggtcatcaccccgccgccctcctactacctccacggcgtgccgctcgggcgtgccaaccggcgccacggcaagacgaccggcgggtacaagcagctcaagtgggtcaagctcggcttcatcgccaccgtcttccgccgccttgccttcggtaataagtcgcggccctcgtcgtcgtcgtcgtcggcggcggtcaagtcctcgtcctcgtcctctgctcgctggctcttctccggctctagcgtcgccgaggcccgtgaccaggagtgctgcggctacgacgatcctgcggctgctgagccgcggacgaagggggcggtgctctgcctcggcatccgcgcgaccccgtggatggtgcagttctgcggcggccagagggagcaggctggctgggtgtacggctggcgcccgtagtcgtcgtccggtcgctgtcgaccaaatcatatgtgcaacggccggtccgtgtccgtgcatgcagtgtggttggccggacgcccggacccgacctttatattggatctaattgttcgtgcatatggatgttcctgtgtttgatccagtgtccggtcaccgtgctcggaaacaagataagataaaagctgtttcggggtggcgtgcctggcgtcgtgttgctatgcccagatatatatgtatacatgtatcttgcacctcccccgaaccattgttattgttgtc

SEQ ID NO: 110723 - protein, 226 aa, Zea mays subsp. mays
  misc_feature (1)..(226): Ceres Seq. ID no. 15180314
  misc_feature (31)..(159): Homolog of NCBI NO: 21537311 NR Description: unknown [Arabidopsis thaliana]
  misc_feature (31)..(159): Homolog of NCBI NO: 18405403 NR Description: expressed protein [Arabidopsis thaliana]
  misc_feature (24)..(172): Homolog of NCBI NO: 34896128 NR Description: P0701D05.18 [Oryza sativa (japonica
  misc_feature (1)..(220): Homolog of NCBI NO: 34907876 NR Description: P0031D02.26 [Oryza sativa (japonica
MPPAPSPGAHGASGAATPPSKPQSPLRITHDGEFYARLLTRESSLGNPSFRYYGAGSGAVPFVWESQPGTPKDAYSCRMLAAAAAVAVTPVITPPPSYYLHGVPLGRANRRHGKTTGGYKQLKWVKLGFIATVFRRLAFGNKSRPSSSSSSAAVKSSSSSSARWLFSGSSVAEARDQECCGYDDPAAAEPRTKGAVLCLGIRATPWMVQFCGGQREQAGWVYGWRP

SEQ ID NO: 110724 - protein, 148 aa, Zea mays subsp. mays
  misc_feature (1)..(148): Ceres Seq. ID no. 15180315
  misc_feature (1)..(81): Homolog of NCBI NO: 21537311 NR Description: unknown [Arabidopsis thaliana]
  misc_feature (1)..(81): Homolog of NCBI NO: 18405403 NR Description: expressed protein [Arabidopsis thaliana]
  misc_feature (1)..(94): Homolog of NCBI NO: 34896128 NR Description: P0701D05.18 [Oryza sativa (japonica
  misc_feature (1)..(142): Homolog of NCBI NO: 34907876 NR Description: P0031D02.26 [Oryza sativa (japonica
MLAAAAAVAVTPVITPPPSYYLHGVPLGRANRRHGKTTGGYKQLKWVKLGFIATVFRRLAFGNKSRPSSSSSSAAVKSSSSSSARWLFSGSSVAEARDQECCGYDDPAAAEPRTKGAVLCLGIRATPWMVQFCGGQREQAGWVYGWRP

SEQ ID NO: 110725 - DNA, 1237 bp, Zea mays subsp. mays
  misc_feature (1)..(1237): Ceres Seq. ID no. 13598926
gtagccctgcagtcacccagagcagacccggatttcgctcttgcggtcgctggggttttagcattggctgatcagttcgatccgatccggctgcgaaggcgagatggcgttcgcggtttctggggcggtgctcggtggggccgtaagggctccccgactcaccggcggcggggagggtagtctagtcttccggcacaccggcctcttcttaactcggcgtgctcgagttggatgttcggggacgcacggggccatgcgcgcggcggccgcggccaggaaggcggtcatggttcctgagggcgagaatgatggcctcgcatcaagggctgactcggctcaattccagtcggatgaactggaggtaccagacatttctgaagagacaacgtgcggtgctggtgtggctgatgctcaagccttgaacagagttcgagtggtccccccaccaagcgatggacaaaaaatattccagattgaccccatgttgcaaggctataagtaccatcttgagtatcggtacagcctctatagaagaatccgttcagacattgatgaacatgaaggaggcttggaagccttctcccgtagttatgagaagtttggatttaatcgcagcgcggaaggtatcacatatcgagaatgggctcctggagcattttctgcagcattggtgggtgacttcaacaactgggatccaaatgcagatcgtatgagcaaaaatgagtttggtgtttgggaaatttttctgcctaacaatgcagatggtacatcacctattcctcatggatctcgtgtaaaggtgagaatggatactccatcagggataaaggattcaattccagcctggatcaagtactcagtgcaggccccaggagaaataccatatgatgggatttattatgatcctcctgaagaggtaaagtatgtgttcaggcatgcgcaacctaaacgaccaaaatcattgcggatatatgaaacacatgtcggaatgagtagcccggtatgtcaccttttccttttgattctttagacagtgctaggcatatgtaacacccggccacctgggggacgtcgtccccccagggcgagttttttttgactgctagccacctgcagttttagttaattataggcttcaacgatatttagatactagcatcttctcacattggtcttccttatctaagcgtatgtaatctaagtgtatatatttattttcattcaatttaaaaaaacc

SEQ ID NO: 110726 - protein, 308 aa, Zea mays subsp. mays
  misc_feature (1)..(308): Ceres Seq. ID no. 13598927
  misc_feature (53)..(299): Homolog of NCBI NO: 11037534 NR Description: starch branching enzyme 2 [Triticum aestivum]
  misc_feature (53)..(299): Homolog of NCBI NO: 7433853 NR Description: probable 1,4-alpha-glucan branching enzyme (EC
  misc_feature (40)..(299): Homolog of NCBI NO: 13447952 NR Description: starch branching enzyme IIa variant [Triticum
  misc_feature (79)..(299): Homolog of NCBI NO: 5689138 NR Description: starch branching enzyme rbe4 [Oryza sativa]
  misc_feature (97)..(299): Homolog of NCBI NO: 7433848 NR Description: 1,4-alpha-glucan branching enzyme (EC 2.4.1.18)
  misc_feature (15)..(299): Homolog of NCBI NO: 3822022 NR Description: starch branching enzyme IIb [Hordeum vulgare]
  misc_feature (41)..(298): Homolog of NCBI NO: 477282 NR Description: starch branching enzyme isoform RBE3 - rice
  misc_feature (62)..(299): Homolog of NCBI NO: 913865 NR Description: branching enzyme II BEII
  misc_feature (1)..(299): Homolog of NCBI NO: 1169911 NR Description: 1,4-alpha-glucan branching enzyme IIB,
  misc_feature (1)..(299): Homolog of NCBI NO: 7433846 NR Description: 1,4-alpha-glucan branching enzyme (EC 2.4.1.18)
MAFAVSGAVLGGAVRAPRLTGGGEGSLVFRHTGLFLTRRARVGCSGTHGAMRAAAAARKAVMVPEGENDGLASRADSAQFQSDELEVPDISEETTCGAGVADAQALNRVRVVPPPSDGQKIFQIDPMLQGYKYHLEYRYSLYRRIRSDIDEHEGGLEAFSRSYEKFGFNRSAEGITYREWAPGAFSAALVGDFNNWDPNADRMSKNEFGVWEIFLPNNADGTSPIPHGSRVKVRMDTPSGIKDSIPAWIKYSVQAPGEIPYDGIYYDPPEEVKYVFRHAQPKRPKSLRIYETHVGMSSPVCHLFLLIL

SEQ ID NO: 110727 - protein, 258 aa, Zea mays subsp. mays
  misc_feature (1)..(258): Ceres Seq. ID no. 13598928
  misc_feature (3)..(249): Homolog of NCBI NO: 11037534 NR Description: starch branching enzyme 2 [Triticum aestivum]
  misc_feature (3)..(249): Homolog of NCBI NO: 7433853 NR Description: probable 1,4-alpha-glucan branching enzyme (EC
  misc_feature (1)..(249): Homolog of NCBI NO: 13447952 NR Description: starch branching enzyme IIa variant [Triticum
  misc_feature (29)..(249): Homolog of NCBI NO: 5689138 NR Description: starch branching enzyme rbe4 [Oryza sativa]
  misc_feature (47)..(249): Homolog of NCBI NO: 7433848 NR Description: 1,4-alpha-glucan branching enzyme (EC 2.4.1.18)
  misc_feature (1)..(249): Homolog of NCBI NO: 3822022 NR Description: starch branching enzyme IIb [Hordeum vulgare]
  misc_feature (1)..(248): Homolog of NCBI NO: 477282 NR Description: starch branching enzyme isoform RBE3 - rice
  misc_feature (12)..(249): Homolog of NCBI NO: 913865 NR Description: branching enzyme II BEII
  misc_feature (1)..(249): Homolog of NCBI NO: 1169911 NR Description: 1,4-alpha-glucan branching enzyme IIB,
  misc_feature (1)..(249): Homolog of NCBI NO: 7433846 NR Description: 1,4-alpha-glucan branching enzyme (EC 2.4.1.18)
MRAAAAARKAVMVPEGENDGLASRADSAQFQSDELEVPDISEETTCGAGVADAQALNRVRVVPPPSDGQKIFQIDPMLQGYKYHLEYRYSLYRRIRSDIDEHEGGLEAFSRSYEKFGFNRSAEGITYREWAPGAFSAALVGDFNNWDPNADRMSKNEFGVWEIFLPNNADGTSPIPHGSRVKVRMDTPSGIKDSIPAWIKYSVQAPGEIPYDGIYYDPPEEVKYVFRHAQPKRPKSLRIYETHVGMSSPVCHLFLLIL

SEQ ID NO: 110728 - protein, 247 aa, Zea mays subsp. mays
  misc_feature (1)..(247): Ceres Seq. ID no. 13598929
  misc_feature (1)..(238): Homolog of NCBI NO: 11037534 NR Description: starch branching enzyme 2 [Triticum aestivum]
  misc_feature (1)..(238): Homolog of NCBI NO: 7433853 NR Description: probable 1,4-alpha-glucan branching enzyme (EC
  misc_feature (1)..(238): Homolog of NCBI NO: 13447952 NR Description: starch branching enzyme IIa variant [Triticum
  misc_feature (18)..(238): Homolog of NCBI NO: 5689138 NR Description: starch branching enzyme rbe4 [Oryza sativa]
  misc_feature (36)..(238): Homolog of NCBI NO: 7433848 NR Description: 1,4-alpha-glucan branching enzyme (EC 2.4.1.18)
  misc_feature (1)..(238): Homolog of NCBI NO: 3822022 NR Description: starch branching enzyme IIb [Hordeum vulgare]
  misc_feature (1)..(237): Homolog of NCBI NO: 477282 NR Description: starch branching enzyme isoform RBE3 - rice
  misc_feature (1)..(238): Homolog of NCBI NO: 913865 NR Description: branching enzyme II BEII
  misc_feature (1)..(238): Homolog of NCBI NO: 1169911 NR Description: 1,4-alpha-glucan branching enzyme IIB,
  misc_feature (1)..(238): Homolog of NCBI NO: 7433846 NR Description: 1,4-alpha-glucan branching enzyme (EC 2.4.1.18)
MVPEGENDGLASRADSAQFQSDELEVPDISEETTCGAGVADAQALNRVRVVPPPSDGQKIFQIDPMLQGYKYHLEYRYSLYRRIRSDIDEHEGGLEAFSRSYEKFGFNRSAEGITYREWAPGAFSAALVGDFNNWDPNADRMSKNEFGVWEIFLPNNADGTSPIPHGSRVKVRMDTPSGIKDSIPAWIKYSVQAPGEIPYDGIYYDPPEEVKYVFRHAQPKRPKSLRIYETHVGMSSPVCHLFLLIL

SEQ ID NO: 110729 - DNA, 587 bp, Zea mays subsp. mays
  misc_feature (1)..(587): Ceres Seq. ID no. 13598930
  misc_feature: MA Experiment ID: 20000492 Result: Down-regulated in Transcription
  misc_feature: MA Experiment 20000492 PARAMETER Experiment Name: Zm_Hybrid_Seed_Dev_P Parameter: DAP Value: 12
  misc_feature: MA Experiment 20000492 PARAMETER Experiment Name: Zm_Hybrid_Seed_Dev_P Parameter: Organism Value: Zea mays
  misc_feature: MA Experiment 20000492 PARAMETER Experiment Name: Zm_Hybrid_Seed_Dev_P Parameter: Plant Line Value: 35A19
  misc_feature: MA Experiment 20000492 PARAMETER Experiment Name: Zm_Hybrid_Seed_Dev_P Parameter: Tissue Value: Fert Kernel vs. Unfert Floret
acccaagtcgcgtgcttccattcccagcccaaccgaagcgaagcacgccaccggcctcgaagggatcagcttctctagcactcatcctcgtggccttgttcctcctcttctatatgggactgcgtcggagtggagatccgtgccgacatagtccgactttgtcgctcgctgcctacgattgatggcctcaccttcaccaaccgagttcagtagggaagcagctcgtcagtctctcatcgcaatctcccagaccattccggagacaccttcacccgagacggtgaaggcaccgatctccattgcagaaaacgggaagctgggcgatggggcggataagttcagatcaaagctgatgtccatcacagacctgtcttctgatgcccaacctgcgcagtgccctcccgaggatattgctgcttgatcgtgtgattttcctgctcgacttgcggacataatgtatcagtgcttgctgatgctctgggcatttaactgtcgtgcattaaactgaacgtccttgtgttactagtcgtttttctttgttaaaatattcagggaaaccggtggaaatatattgtgcaagttttttt

SEQ ID NO: 110730 - protein, 79 aa, Zea mays subsp. mays
  misc_feature (1)..(79): Ceres Seq. ID no. 13598931
  misc_feature (1)..(79): Homolog of NCBI NO: 38346711 NR Description: OSJNBa0086O06.9 [Oryza sativa (japonica
MASPSPTEFSREAARQSLIAISQTIPETPSPETVKAPISIAENGKLGDGADKFRSKLMSITDLSSDAQPAQCPPEDIAA

SEQ ID NO: 110731 - protein, 59 aa, Zea mays subsp. mays
  misc_feature (1)..(59): Ceres Seq. ID no. 13598932
PSRVLPFPAQPKRSTPPASKGSASLALILVALFLLFYMGLRRSGDPCRHSPTLSLAAYD

SEQ ID NO: 110732 - protein, 49 aa, Zea mays subsp. mays
  misc_feature (1)..(49): Ceres Seq. ID no. 13598933
PKSRASIPSPTEAKHATGLEGISFSSTHPRGLVPPLLYGTASEWRSVPT

SEQ ID NO: 110733 - DNA, 1097 bp, Zea mays subsp. mays
  misc_feature (1)..(1097): Ceres Seq. ID no. 14305144
  misc_feature: MA Experiment ID: 108543 Result: Down-regulated in Transcription
  misc_feature: MA Experiment ID: 20000492 Result: Up-regulated in Transcription
  misc_feature: MA Experiment 20000492 PARAMETER Experiment Name: Zm_Hybrid_Seed_Dev_P Parameter: DAP Value: 12
  misc_feature: MA Experiment 20000492 PARAMETER Experiment Name: Zm_Hybrid_Seed_Dev_P Parameter: Organism Value: Zea mays
  misc_feature: MA Experiment 20000492 PARAMETER Experiment Name: Zm_Hybrid_Seed_Dev_P Parameter: Plant Line Value: 35A19
  misc_feature: MA Experiment 20000492 PARAMETER Experiment Name: Zm_Hybrid_Seed_Dev_P Parameter: Tissue Value: Fert Kernel vs. Unfert Floret
  misc_feature: MA Experiment ID: 20000534 Result: Up-regulated in Transcription
  misc_feature: MA Experiment 20000534 PARAMETER Experiment Name: Zm_Hybrid_Pollen_P Parameter: Age (day) Value: 8
  misc_feature: MA Experiment 20000534 PARAMETER Experiment Name: Zm_Hybrid_Pollen_P Parameter: Organism Value: Zea mays
  misc_feature: MA Experiment 20000534 PARAMETER Experiment Name: Zm_Hybrid_Pollen_P Parameter: Plant Line Value: 35A19
  misc_feature: MA Experiment 20000534 PARAMETER Experiment Name: Zm_Hybrid_Pollen_P Parameter: Tissue Value: Pollen vs. Aerial
gattcccggatggatgtgccggcccggcccggcccgctcggcgctcgtgcttctccccagtcccgtccatccaaagcgttttgcacttgtgcacaaactgcggctgctgtagatacgcgcgccgccactccaaggtccaagcctcccttgctcccgccaccgcccctcaccatgggcagcgccgccacctctccgcagccgtctgggaatctgacgcaggacgagctcaagcgcgtggcggcgcaccgcgcgttggagttcgtggagtccggcatgacgctgggcctgggcacgggttccacggccgcgcacgcgctggaccgcctgggcgacctcctccgcgcgggcgcgctgcccggggtcgccggcgttcccacctccctcaagacggaggcccacgccgcccgcgtcgggatcccgctgcttccgctcgacgccgcctcgggcgccagcatccgcctctccatcgacggcgccgacgaggtcgacccggacctcaacctcgtcaagggccgcggcgggtcgctgctccgggagaagatgatcgagggcgccggcgatcggttcgtcgtcatcgtcgacgagtccaagctcgtgccgaggctcggctgcacgggcgccgtccccgtcgaggtcatccccttcggcgcaccccacacgctcggcctcatccgcaaggtgttcgatggagtgcctggcttccacgccaggctgaggacggtccccgccgccaatggggaggactcggacgcgccgttcctcaccgacaacggcaactacatcgtggagatgttcttcgaggacggtatccgcggcgacctgctggacatcagcgatcgtctgctccggatcaccggcgtcatcgagcatggcatgtttcttggcatggccactacagtcatcgtcgctaacaaggacggcaccgtcacagtcatcaacaagaagaagtaataatctacaagtagcctgtatgtgtgcgtccgtgtgtgatccagctacctaagttctgctcgttaccgttgtgaaaccatcattttgttttatcatctcatatctttcctactggtgattccaatatatcttatttattatccctc

SEQ ID NO: 110734 - protein, 316 aa, Zea mays subsp. mays
  misc_feature (1)..(316): Ceres Seq. ID no. 14305145
  misc_feature (121)..(307): Pfam Name: Ribose 5-phosphate isomerase A (phosphoriboisomerase A) Pfam Description: Ribose 5-phosphate isomerase A
  misc_feature (71)..(311): Homolog of NCBI NO: 39935050 NR Description: ribose 5-phosphate isomerase [Rhodopseudomonas
  misc_feature (24)..(311): Homolog of NCBI NO: 22963952 NR Description: hypothetical protein [Rhodopseudomonas palustris]
  misc_feature (61)..(314): Homolog of NCBI NO: 34393835 NR Description: putative ribose-5-phosphate isomerase
  misc_feature (60)..(314): Homolog of NCBI NO: 34393836 NR Description: putative ribose-5-phosphate isomerase
  misc_feature (63)..(314): Homolog of NCBI NO: 18654317 NR Description: ribose-5-phosphate isomerase [Spinacia oleracea]
  misc_feature (60)..(311): Homolog of NCBI NO: 13430836 NR Description: putative ribose 5-phosphate isomerase
  misc_feature (60)..(311): Homolog of NCBI NO: 15223936 NR Description: ribose 5-phosphate isomerase -related
  misc_feature (61)..(314): Homolog of NCBI NO: 15226223 NR Description: ribose 5-phosphate isomerase -related
  misc_feature (60)..(311): Homolog of NCBI NO: 21592672 NR Description: putative ribose 5-phosphate isomerase
  misc_feature (52)..(316): Homolog of NCBI NO: 38347196 NR Description: OSJNBa0023J03.8 [Oryza sativa (japonica
DSRMDVPARPGPLGARASPQSRPSKAFCTCAQTAAAVDTRAATPRSKPPLLPPPPLTMGSAATSPQPSGNLTQDELKRVAAHRALEFVESGMTLGLGTGSTAAHALDRLGDLLRAGALPGVAGVPTSLKTEAHAARVGIPLLPLDAASGASIRLSIDGADEVDPDLNLVKGRGGSLLREKMIEGAGDRFVVIVDESKLVPRLGCTGAVPVEVIPFGAPHTLGLIRKVFDGVPGFHARLRTVPAANGEDSDAPFLTDNGNYIVEMFFEDGIRGDLLDISDRLLRITGVIEHGMFLGMATTVIVANKDGTVTVINKKK

SEQ ID NO: 110735 - protein, 313 aa, Zea mays subsp. mays
  misc_feature (1)..(313): Ceres Seq. ID no. 14305146
  misc_feature (118)..(304): Pfam Name: Ribose 5-phosphate isomerase A (phosphoriboisomerase A) Pfam Description: Ribose 5-phosphate isomerase A
  misc_feature (68)..(308): Homolog of NCBI NO: 39935050 NR Description: ribose 5-phosphate isomerase [Rhodopseudomonas
  misc_feature (21)..(308): Homolog of NCBI NO: 22963952 NR Description: hypothetical protein [Rhodopseudomonas palustris]
  misc_feature (58)..(311): Homolog of NCBI NO: 34393835 NR Description: putative ribose-5-phosphate isomerase
  misc_feature (57)..(311): Homolog of NCBI NO: 34393836 NR Description: putative ribose-5-phosphate isomerase
  misc_feature (60)..(311): Homolog of NCBI NO: 18654317 NR Description: ribose-5-phosphate isomerase [Spinacia oleracea]
  misc_feature (57)..(308): Homolog of NCBI NO: 13430836 NR Description: putative ribose 5-phosphate isomerase
  misc_feature (57)..(308): Homolog of NCBI NO: 15223936 NR Description: ribose 5-phosphate isomerase -related
  misc_feature (58)..(311): Homolog of NCBI NO: 15226223 NR Description: ribose 5-phosphate isomerase -related
  misc_feature (57)..(308): Homolog of NCBI NO: 21592672 NR Description: putative ribose 5-phosphate isomerase
  misc_feature (49)..(313): Homolog of NCBI NO: 38347196 NR Description: OSJNBa0023J03.8 [Oryza sativa (japonica
MDVPARPGPLGARASPQSRPSKAFCTCAQTAAAVDTRAATPRSKPPLLPPPPLTMGSAATSPQPSGNLTQDELKRVAAHRALEFVESGMTLGLGTGSTAAHALDRLGDLLRAGALPGVAGVPTSLKTEAHAARVGIPLLPLDAASGASIRLSIDGADEVDPDLNLVKGRGGSLLREKMIEGAGDRFVVIVDESKLVPRLGCTGAVPVEVIPFGAPHTLGLIRKVFDGVPGFHARLRTVPAANGEDSDAPFLTDNGNYIVEMFFEDGIRGDLLDISDRLLRITGVIEHGMFLGMATTVIVANKDGTVTVINKKK

SEQ ID NO: 110736 - protein, 302 aa, Zea mays subsp. mays
  misc_feature (1)..(302): Ceres Seq. ID no. 14305147
FPDGCAGPARPARRSCFSPVPSIQSVLHLCTNCGCCRYARRHSKVQASLAPATAPHHGQRRHLSAAVWESDAGRAQARGGAPRVGVRGVRHDAGPGHGFHGRARAGPPGRPPPRGRAARGRRRSHLPQDGGPRRPRRDPAASARRRLGRQHPPLHRRRRRGRPGPQPRQGPRRVAAPGEDDRGRRRSVRRHRRRVQARAEARLHGRRPRRGHPLRRTPHARPHPQGVRWSAWLPRQAEDGPRRQWGGLGRAVPHRQRQLHRGDVLRGRYPRRPAGHQRSSAPDHRRHRAWHVSWHGHYSHRR

SEQ ID NO: 110737 - DNA, 2180 bp, Zea mays subsp. mays
  misc_feature (1)..(2180): Ceres Seq. ID no. 15180702
aaaaaaaaaaacagccctaacagcaggggcagcggtttccgaaaagagaggcgtggagtgggggagagggccgagccaagccacctccaccgcagcaggcggcggagccgtacgcgaagcgaaagcgaggaaagccttctgaatcaggcttcctcgcgccgccgccgcttcctgctctcagcggcgtggataggtttcccgcccgcccgggcctggttgctcgtcttccttccttggtacaattcaattgattacctcaccagggagggagggtgctgcatccacggaccacggcttcacatgagtgaaagggatagaaagtgcagcgaccgtggacgaaaggactcgtgcttttgagcaattcaggaggagtacaagcatcacgaagccttcattctggaatgctgtccagtcgaaggaacagcgggattatcctacgggaagggtcagttagggactggtccgagttcaacgatccctctccgtccccaaaaccgttgtactcgcagtcctatgtcgcagtgagaggattcctgctgtcgagcaagctaaagtcagtgtatgcggctatgacttcacagaggcatagccgatcgcaggagagatcaaaatcaaaggggttgagctgcaggagagttgcagtccgtctactgttctttttcatgttaggcattttcattgggttcatgcctttattctctgtcgacgtctacaagaaaatagtatctgaaaacaagatgcttccgttccacgagggtgtgattgagacggaaatggtgggtaccaaagttaaggagtcggagacgattgtagtagagaaagagatcgaactgatcgacgagcctcatattcaagagagccctccagtccctgcattgttggatgatgatgtggatttttctgaatcatcacatgtgttacctgctattagagaatctgacattcccgtgaagaagttgctgataatcgtgacaatcacttctgtccggccacaacaggcatattacttgaatcggctagcccataccttgaaagctgtacaggcacctcttctatggttactggtggaatggcctgaacagtcctatgaaacagcagaaattctgaggtcttccggggttatgtacaggcatcttatgtgcagaaagaataccacgagtgttcggaagattgctgtttgtcaaaggaataatgcaatctatcatgtcaaaaggcatcaccttgatggtataatgcattttgctgatgaagaacggtcatactcagctgatgtatttgaagaaatgcagaagatcaggcgctttggctcatggcctgtaacaatccatattggaacaaagtatagggcagttctggaaggccctatttgcaaagctaaccgagtcatgagatggcacacagtccagacggctcaaaagaagagttcaactcgtcgattcccaattggtttctctgcatttgctttcaatagtacactgttatgggaccctcaaagatggaaccgcccgcctatggattctgttatagtccacacaggtggaagaggtggtttgcaggagtcacggtttatagaaaagcttgttaaaagtgagcgccaaatagagggtcttccagacaattgcaacagggtcatggtctggaatttcaacctggaacctcctcagctgaactaccccgcaggctgggcactttataagaacctagaagctgacatacctgtaatatagcttcctgcgagctacgttatgccttgctcctagaggtggtttctcccggcaaggcagaaggttgaagcacgtctccagcggcatgttagttctaaatttcaactccctgtcctttaaggtgcccaggtaaagctgctggttgatgccatcctgaacaagttgcgccaaagatttcgtgccgagatctgtcttcagtaatgcaatgtcatcctgaacaagttgcagcggcaatcaaaataggatcccccccccctgccttttagtctcgtgtattccttttgtgctcttcatttttttttcctcatcagctagatacgacatgtagactttcttttaggttttttttgtttttgtttttcatactgtgtgttaccttacagatgtaaaagcgcccccgtacattgcaactgttaaagaggaaaagcaaaataccgtcatttagcttcttcaaat

SEQ ID NO: 110738 - protein, 441 aa, Zea mays subsp. mays
  misc_feature (1)..(441): Ceres Seq. ID no. 15180703
  misc_feature (206)..(425): Pfam Name: Glycosyltransferase family 43 Pfam Description: Glycosyltransferase family 43
  misc_feature (116)..(440): Homolog of NCBI NO: 32879545 NR Description: beta3-glucuronyltransferase [Zea mays]
  misc_feature (185)..(440): Homolog of NCBI NO: 38344768 NR Description: OSJNBa0068L06.11 [Oryza sativa (japonica
  misc_feature (177)..(369): Homolog of NCBI NO: 6693039 NR Description: T22C5.4 [Arabidopsis thaliana]
  misc_feature (177)..(431): Homolog of NCBI NO: 5668771 NR Description: Contains similarity to gb|D88035 glycoprotein
  misc_feature (180)..(438): Homolog of NCBI NO: 32968172 NR Description: beta3-glucuronyltransferase [Lycopersicon
  misc_feature (177)..(436): Homolog of NCBI NO: 18396409 NR Description: glycosyltransferase family 43 [Arabidopsis
  misc_feature (83)..(436): Homolog of NCBI NO: 31979313 NR Description: 3-beta-glucuronosyltransferase [Hordeum vulgare]
  misc_feature (81)..(435): Homolog of NCBI NO: 32968189 NR Description: beta3-glucuronyltransferase [Triticum aestivum]
  misc_feature (64)..(437): Homolog of NCBI NO: 31979311 NR Description: 3-beta-glucuronosyltransferase [Hordeum vulgare]
  misc_feature (4)..(440): Homolog of NCBI NO: 34911082 NR Description: P0485G01.28 [Oryza sativa (japonica
MLSSRRNSGIILREGSVRDWSEFNDPSPSPKPLYSQSYVAVRGFLLSSKLKSVYAAMTSQRHSRSQERSKSKGLSCRRVAVRLLFFFMLGIFIGFMPLFSVDVYKKIVSENKMLPFHEGVIETEMVGTKVKESETIVVEKEIELIDEPHIQESPPVPALLDDDVDFSESSHVLPAIRESDIPVKKLLIIVTITSVRPQQAYYLNRLAHTLKAVQAPLLWLLVEWPEQSYETAEILRSSGVMYRHLMCRKNTTSVRKIAVCQRNNAIYHVKRHHLDGIMHFADEERSYSADVFEEMQKIRRFGSWPVTIHIGTKYRAVLEGPICKANRVMRWHTVQTAQKKSSTRRFPIGFSAFAFNSTLLWDPQRWNRPPMDSVIVHTGGRGGLQESRFIEKLVKSERQIEGLPDNCNRVMVWNFNLEPPQLNYPAGWALYKNLEADIPVI

SEQ ID NO: 110739 - protein, 385 aa, Zea mays subsp. mays
  misc_feature (1)..(385): Ceres Seq. ID no. 15180704
  misc_feature (150)..(369): Pfam Name: Glycosyltransferase family 43 Pfam Description: Glycosyltransferase family 43
  misc_feature (129)..(384): Homolog of NCBI NO: 38344768 NR Description: OSJNBa0068L06.11 [Oryza sativa (japonica
  misc_feature (121)..(313): Homolog of NCBI NO: 6693039 NR Description: T22C5.4 [Arabidopsis thaliana]
  misc_feature (121)..(375): Homolog of NCBI NO: 5668771 NR Description: Contains similarity to gb|D88035 glycoprotein
  misc_feature (124)..(382): Homolog of NCBI NO: 32968172 NR Description: beta3-glucuronyltransferase [Lycopersicon
  misc_feature (121)..(380): Homolog of NCBI NO: 18396409 NR Description: glycosyltransferase family 43 [Arabidopsis
  misc_feature (27)..(380): Homolog of NCBI NO: 31979313 NR Description: 3-beta-glucuronosyltransferase [Hordeum vulgare]
  misc_feature (25)..(379): Homolog of NCBI NO: 32968189 NR Description: beta3-glucuronyltransferase [Triticum aestivum]
  misc_feature (8)..(381): Homolog of NCBI NO: 31979311 NR Description: 3-beta-glucuronosyltransferase [Hordeum vulgare]
  misc_feature (1)..(384): Homolog of NCBI NO: 34911082 NR Description: P0485G01.28 [Oryza sativa (japonica
  misc_feature (60)..(384): Homolog of NCBI NO: 32879545 NR Description: beta3-glucuronyltransferase [Zea mays]
MTSQRHSRSQERSKSKGLSCRRVAVRLLFFFMLGIFIGFMPLFSVDVYKKIVSENKMLPFHEGVIETEMVGTKVKESETIVVEKEIELIDEPHIQESPPVPALLDDDVDFSESSHVLPAIRESDIPVKKLLIIVTITSVRPQQAYYLNRLAHTLKAVQAPLLWLLVEWPEQSYETAEILRSSGVMYRHLMCRKNTTSVRKIAVCQRNNAIYHVKRHHLDGIMHFADEERSYSADVFEEMQKIRRFGSWPVTIHIGTKYRAVLEGPICKANRVMRWHTVQTAQKKSSTRRFPIGFSAFAFNSTLLWDPQRWNRPPMDSVIVHTGGRGGLQESRFIEKLVKSERQIEGLPDNCNRVMVWNFNLEPPQLNYPAGWALYKNLEADIPVI

SEQ ID NO: 110740 - protein, 354 aa, Zea mays subsp. mays
  misc_feature (1)..(354): Ceres Seq. ID no. 15180705
  misc_feature (119)..(338): Pfam Name: Glycosyltransferase family 43 Pfam Description: Glycosyltransferase family 43
  misc_feature (98)..(353): Homolog of NCBI NO: 38344768 NR Description: OSJNBa0068L06.11 [Oryza sativa (japonica
  misc_feature (90)..(282): Homolog of NCBI NO: 6693039 NR Description: T22C5.4 [Arabidopsis thaliana]
  misc_feature (90)..(344): Homolog of NCBI NO: 5668771 NR Description: Contains similarity to gb|D88035 glycoprotein
  misc_feature (93)..(351): Homolog of NCBI NO: 32968172 NR Description: beta3-glucuronyltransferase [Lycopersicon
  misc_feature (90)..(349): Homolog of NCBI NO: 18396409 NR Description: glycosyltransferase family 43 [Arabidopsis
  misc_feature (1)..(349): Homolog of NCBI NO: 31979313 NR Description: 3-beta-glucuronosyltransferase [Hordeum vulgare]
  misc_feature (1)..(348): Homolog of NCBI NO: 32968189 NR Description: beta3-glucuronyltransferase [Triticum aestivum]
  misc_feature (1)..(350): Homolog of NCBI NO: 31979311 NR Description: 3-beta-glucuronosyltransferase [Hordeum vulgare]
  misc_feature (1)..(353): Homolog of NCBI NO: 34911082 NR Description: P0485G01.28 [Oryza sativa (japonica
  misc_feature (29)..(353): Homolog of NCBI NO: 32879545 NR Description: beta3-glucuronyltransferase [Zea mays]
MLGIFIGFMPLFSVDVYKKIVSENKMLPFHEGVIETEMVGTKVKESETIVVEKEIELIDEPHIQESPPVPALLDDDVDFSESSHVLPAIRESDIPVKKLLIIVTITSVRPQQAYYLNRLAHTLKAVQAPLLWLLVEWPEQSYETAEILRSSGVMYRHLMCRKNTTSVRKIAVCQRNNAIYHVKRHHLDGIMHFADEERSYSADVFEEMQKIRRFGSWPVTIHIGTKYRAVLEGPICKANRVMRWHTVQTAQKKSSTRRFPIGFSAFAFNSTLLWDPQRWNRPPMDSVIVHTGGRGGLQESRFIEKLVKSERQIEGLPDNCNRVMVWNFNLEPPQLNYPAGWALYKNLEADIPVI

SEQ ID NO: 110741 - DNA, 976 bp, Zea mays subsp. mays
  misc_feature (1)..(976): Ceres Seq. ID no. 15179263
accagcccctctcgcctcacgaaaaggcgcaggccaaggccaaggccaagccgccccctccctcctctcgtctccactctctctctctctctggcagccaaaggcgaggccgagatccggcgcgcggaggatgccttccaggtccatgagccggctgtccgtcgagtccgcctcgggcagcgggggcggctgccgggaggccgagccggtgctctgcgcgcctcggccgcgcagggcccagcagcagctggtccacgtccacccccgcggcgccgacctcatcctcggcccgccgcccttcctgctcaacgagagcagcgaggagggtcgctgcagctgggcggcgttgggcggcgggtcgccgccggcgcgcgcgggcaacccgctggtgcacgaccccagcttcctgctgagccagcgccaccccgcggcggacccgccgctggagctcggcttcttcgaccacctgatccgcaccagcagctacgtgcaccggccgacgacgacgacgtcgtataccagctccggcaccagcagcagcggcggcagtagcagcaagagcagttttggcccgtcgtcgttcgcgcccgccgtgaggatccaggggttcgacgtcgccgcgtgccggagctcccacggcggcgggggcggccgcgtgctgtccgccgcccgcgcgtgagcggtcgagctccatggtgtggagggggatgaaatcaaagagggaggaggaagaaccttgtgtacagattctgtgtctgacgagtcgtgttcgtgttcgtgtccgctgtactaattgtgaacaccaccacacatagcatagcatatagcatagcatatcaaagactactaggtcggtcggagtcggacggtcagcgctcgtgttcttgtagcagtcgagcgagcgactaggctaccgcgcgccatgtaacgtacggtcctgcaaacaatactgcacgtataaagatggaaaccgtgc

SEQ ID NO: 110742 - protein, 225 aa, Zea mays subsp. mays
  misc_feature (1)..(225): Ceres Seq. ID no. 15179264
  misc_feature (49)..(222): Homolog of NCBI NO: 34907108 NR Description: OSJNBa0052O12.19 [Oryza sativa (japonica
PAPLASRKGAGQGQGQAAPSLLSSPLSLSLWQPKARPRSGARRMPSRSMSRLSVESASGSGGGCREAEPVLCAPRPRRAQQQLVHVHPRGADLILGPPPFLLNESSEEGRCSWAALGGGSPPARAGNPLVHDPSFLLSQRHPAADPPLELGFFDHLIRTSSYVHRPTTTTSYTSSGTSSSGGSSSKSSFGPSSFAPAVRIQGFDVAACRSSHGGGGGRVLSAARA

SEQ ID NO: 110743 - protein, 183 aa, Zea mays subsp. mays
  misc_feature (1)..(183): Ceres Seq. ID no. 15179265
  misc_feature (60)..(166): Pfam Name: Herpesvirus glycoprotein D Pfam Description: Herpesvirus glycoprotein D
TSPSRLTKRRRPRPRPSRPLPPLVSTLSLSLAAKGEAEIRRAEDAFQVHEPAVRRVRLGQRGRLPGGRAGALRASAAQGPAAAGPRPPPRRRPHPRPAALPAQREQRGGSLQLGGVGRRVAAGARGQPAGARPQLPAEPAPPRGGPAAGARLLRPPDPHQQLRAPADDDDVVYQLRHQQQRRQ

SEQ ID NO: 110744 - protein, 182 aa, Zea mays subsp. mays
  misc_feature (1)..(182): Ceres Seq. ID no. 15179266
  misc_feature (6)..(179): Homolog of NCBI NO: 34907108 NR Description: OSJNBa0052O12.19 [Oryza sativa (japonica
MPSRSMSRLSVESASGSGGGCREAEPVLCAPRPRRAQQQLVHVHPRGADLILGPPPFLLNESSEEGRCSWAALGGGSPPARAGNPLVHDPSFLLSQRHPAADPPLELGFFDHLIRTSSYVHRPTTTTSYTSSGTSSSGGSSSKSSFGPSSFAPAVRIQGFDVAACRSSHGGGGGRVLSAARA

SEQ ID NO: 110745 - DNA, 799 bp, Zea mays subsp. mays
  misc_feature (1)..(799): Ceres Seq. ID no. 14302128
aataatataaccacagaaatccatcgacgaacaactgagaagagctgcgcctgcgcctgcgcctgcgggaaagggagaacatggtggggaagaagaggggtgttatctccccgctggaccatctcgctgggctgctggaggtgcgcgtggtgaggggagtggacctcgccatccgcgacctccgatccagcgacccctacgtcgtccttcgcatcggcaaggcgcagaaagtgaagacgcgagtggtcaagaagagcatcaatccggaatggaacgaaaaactcaccctctctattgaagaccctgccgttcctattagactggaagtatttgacaaggacactttcgttgatgatgcaatgggtaacgcggagctggacatccgcccgttagtcgagattgtgaagatgaagctccagggtgtcgctgacaaaacggtggtaaagaagctggtgcccaacagacagaactgcctagccgaggagagctccatatacatatcggaggggaaggtgaagcaagacctggtcgtacggctaaggaacgtagagtgtggcgaaatcgagctccaacttcagtgggtccacctccctggctctaagggtgtatgagaagagttatgagcgctgcctagcttgcactgctcaggttcttcgcttcacattaaagtaatctatttgaactgtagttgtaatctatagagataaaagcagtgtaaaaatagtagaaatcgttatggattaaagacagtcgacccagctcttgctagttgaaaagaacccagctcttgccatttgac

SEQ ID NO: 110746 - protein, 176 aa, Zea mays subsp. mays
  misc_feature (1)..(176): Ceres Seq. ID no. 14302129
  misc_feature (19)..(98): Pfam Name: C2 domain Pfam Description: C2 domain
  misc_feature (12)..(172): Homolog of NCBI NO: 33146446 NR Description: zinc finger and C2 domain protein-like
  misc_feature (13)..(176): Homolog of NCBI NO: 18409675 NR Description: C2 domain-containing protein [Arabidopsis
  misc_feature (9)..(176): Homolog of NCBI NO: 15219500 NR Description: C2 domain-containing protein [Arabidopsis
  misc_feature (12)..(176): Homolog of NCBI NO: 15240322 NR Description: C2 domain-containing protein [Arabidopsis
  misc_feature (12)..(176): Homolog of NCBI NO: 13430460 NR Description: unknown protein [Arabidopsis thaliana]
  misc_feature (10)..(176): Homolog of NCBI NO: 25405940 NR Description: protein T1N15.21 [imported] - Arabidopsis
  misc_feature (10)..(176): Homolog of NCBI NO: 15221907 NR Description: C2 domain-containing protein [Arabidopsis
  misc_feature (12)..(172): Homolog of NCBI NO: 33146442 NR Description: zinc finger and C2 domain protein-like
  misc_feature (12)..(176): Homolog of NCBI NO: 18409682 NR Description: C2 domain-containing protein [Arabidopsis
  misc_feature (10)..(176): Homolog of NCBI NO: 30684739 NR Description: C2 domain-containing protein [Arabidopsis
MVGKKRGVISPLDHLAGLLEVRVVRGVDLAIRDLRSSDPYVVLRIGKAQKVKTRVVKKSINPEWNEKLTLSIEDPAVPIRLEVFDKDTFVDDAMGNAELDIRPLVEIVKMKLQGVADKTVVKKLVPNRQNCLAEESSIYISEGKVKQDLVVRLRNVECGEIELQLQWVHLPGSKGV

SEQ ID NO: 110747 - DNA, 583 bp, Zea mays subsp. mays
  misc_feature (1)..(583): Ceres Seq. ID no. 12420140
aaaatgcaaatgtgagctccttctcgtttggagaggccgacattgacagcacagtgaaaacagcaaagaagaaagggtccagcaacttgtctactgatctgaacggcaagaccatgcccaagaaggattcagcgtctgcagagaaacagcctccgaaccgtgcgaggccgaaaggaatgagtggcagcagcaattttgcagacgggaaggcctcaacctcaacaaccggagatcatgaaggccgtcgtacccggcagcctcctggcggcgacagcagcattttgctgggctagcgtgcatatgaatcttgccctatgccgccgccgcacgggtggttggtccgtcagtctgtggtcttgttttcgtggtcaggccatgtgtcccatctccggtccttcagatgatctggttcgcatctgtcttgtgtatggttttgatatgtgttggttgtgacatgccccatggaacaaccctatcgctatgctgttttgttgtgtacaatggatgacgtgtgctgccgttttgttgtgtgtacaatggatatgtctggttgttgaataagaagaaattggtatatggtacc

SEQ ID NO: 110748 - protein, 96 aa, Zea mays subsp. mays
  misc_feature (1)..(96): Ceres Seq. ID no. 12420141
  misc_feature (1)..(95): Homolog of NCBI NO: 33146622 NR Description: hypothetical protein [Oryza sativa (japonica
NANVSSFSFGEADIDSTVKTAKKKGSSNLSTDLNGKTMPKKDSASAEKQPPNRARPKGMSGSSNFADGKASTSTTGDHEGRRTRQPPGGDSSILLG

SEQ ID NO: 110749 - protein, 72 aa, Zea mays subsp. mays
  misc_feature (1)..(72): Ceres Seq. ID no. 12420142
MKAVVPGSLLAATAAFCWASVHMNLALCRRRTGGWSVSLWSCFRGQAMCPISGPSDDLVRICLVYGFDMCWL

SEQ ID NO: 110750 - protein, 59 aa, Zea mays subsp. mays
  misc_feature (1)..(59): Ceres Seq. ID no. 12420143
  misc_feature (1)..(58): Homolog of NCBI NO: 33146622 NR Description: hypothetical protein [Oryza sativa (japonica
MPKKDSASAEKQPPNRARPKGMSGSSNFADGKASTSTTGDHEGRRTRQPPGGDSSILLG

SEQ ID NO: 110751 - DNA, 2433 bp, Zea mays subsp. mays
  misc_feature (1)..(2433): Ceres Seq. ID no. 15179301
atcgaacatcggagagatgcgcgcgggcggcggcgcgcctccccgacacgcaccactctccccgaccgcctccgccactgccacgctagtacccgcttctgtcgccatgcccacgccgcgcctcgtacacctccgccacctcctctcattccgctccgcccttccccgcccgctgggtcccaaccaaagccacccgctccccgggtcggttcacccgtcccttctcctcccccgtgccatggctggtgtcgcatacgcaggtctggcgacggggtcggcggaatacgaggaggtgctcgggtgcctcgcgtcgctgataacgcagaaggtgcgcgcggacaccggcaaccgcggcaaccagtgggagctcatgtccaagtacgtccagatactggaactggaggaatccatcgcgcagttgaaagtggttcacgttgctgggaccaaagggaagggttcaacatgcacatttgctgagtcaatccttcgatcatgtggtttccacactgggctcttcacttcaccacatttgatggatgtccgcgagcgatttcggcttgatgggctggacatttcagaagaaaagtttattaggtatttctggtggtgctggaagacactgaaggacaagactggtgatggtgtaccgatgccggcctactttaggttccttgcactgctagcattcaagatcttttcagatgagcagcaggtggatgtcgtagtgctcgaggttggtttgggagggaagtatgatgcaacaaatgtggtcagagcacctgtagtttgtggaataacatcccttgggtatgatcatatggaaattcttggaaacacacttggagaaattactagagagaaggctgggatactgaagaaaggagttccagcgtatacagttccacagccagaagaggcaatgtctgtactgatgaagcgagctactgaattgggtgtttctcttcaagttgtccaccctttggacccacagaaattagaggatcaacctcttggactccatggtgagcaccaatacatgaatgcaggtcttgcaattgcattggctaatacctggcttgagaggcaaggccatttgaacagattacatgtcaaacattctggtaccttgccagatcagttcatcaaagggctgtcgagtgcttgtctgcatggtcgaggacagattattccaaattcacaagtgaactcagaaaatgatcgtgattcttcattggttttctatttggatggggcacatagctcagaaagcatggaaatgtgtgcaagatggtttgcccacgctacaaatagtgatggaatacagccaggtccttcggagcagcctcacactgatagggattccaggaagtttctccttttcaattgcatgactgtaagagatcctcagagattgctcccacgtcttctagatacatgtgctcaaaatggtctccactttgagcatgccttatttgtgccaaaccaatcacagtacaacaagcttggatcccttgcatccccaccttcagagcgtgaacaaattgatttgtcatggcagttgtcgcttcaaaaggtgtggggaaacctgcctcatcacaataaaggtctaaatgatgtaaactctagcggagctacctcggtttttgaatctcttccattggcaattaaatggctaagggaaactgctcaacaaaatcaatcgattcagtttcaggtcttagttaccggctcgctgcaccttgtcggcgatgtcttaagattgctcaagaacaataagtaacttcatttggaatggcacattgttcagattgaactggctgcctacggaccactaaggcactaactggagcttatcgaaatttgtgattgggatagcacaacataccaacttggttacaaggctggaagaaattgaaagacatttttatttcagttccaatcagcggtaaaattgttgtatttaatcgtttctttaagttcctggcgttatgtgccatcacatcctcactccagaaggatgtaaccaatttttagaatgtacaattagtggattctcagcgacacatctttgtatgattggtggacggatctgcgtagcctttgcaacagacaatcaagaagacgctttgacggcctgctaattcatttttggtggaatttatggctggaacgaaataacagaattttccaaagtcagcatagaagcgttaatcaagtggcccttgcagtcatcagatattgctagtagctgaggtcttgttgatctggtctagtgggtttttgttcttctccttttattttttcttttttaccctctcccctccggttctctggttttgtatcttccatttctttgctctctaatctaatatatttcggagtggcaagtcttttgccccttcctttcaaaaaaaaaaaaacaattagtggatt

SEQ ID NO: 110752 - protein, 592 aa, Zea mays subsp. mays
  misc_feature (1)..(592): Ceres Seq. ID no. 15179302
  misc_feature (221)..(310): Pfam Name: Mur ligase family, catalytic domain Pfam Description: Mur ligase family, catalytic domain
  misc_feature (92)..(432): Homolog of NCBI NO: 30694288 NR Description: folylpolyglutamate-dihydrofolate synthase
  misc_feature (544)..(589): Homolog of NCBI NO: 15228213 NR Description: dihydrofolate synthetase (dhfs) [Arabidopsis
  misc_feature (171)..(526): Homolog of NCBI NO: 15228213 NR Description: dihydrofolate synthetase (dhfs) [Arabidopsis
  misc_feature (88)..(573): Homolog of NCBI NO: 10177571 NR Description: tetrahydrofolylpolyglutamate synthase-like
  misc_feature (544)..(589): Homolog of NCBI NO: 17976757 NR Description: dihydrofolate synthetase [Arabidopsis thaliana]
  misc_feature (93)..(526): Homolog of NCBI NO: 17976757 NR Description: dihydrofolate synthetase [Arabidopsis thaliana]
  misc_feature (89)..(589): Homolog of NCBI NO: 17976705 NR Description: dihydrofolate synthetase /folylpolyglutamate
  misc_feature (89)..(589): Homolog of NCBI NO: 30681208 NR Description: folylpolyglutamate synthase (fpgs2) [Arabidopsis
  misc_feature (375)..(589): Homolog of NCBI NO: 37535812 NR Description: putative folylpolyglutamate synthetase
  misc_feature (36)..(354): Homolog of NCBI NO: 37535812 NR Description: putative folylpolyglutamate synthetase
SNIGEMRAGGGAPPRHAPLSPTASATATLVPASVAMPTPRLVHLRHLLSFRSALPRPLGPNQSHPLPGSVHPSLLLPRAMAGVAYAGLATGSAEYEEVLGCLASLITQKVRADTGNRGNQWELMSKYVQILELEESIAQLKVVHVAGTKGKGSTCTFAESILRSCGFHTGLFTSPHLMDVRERFRLDGLDISEEKFIRYFWWCWKTLKDKTGDGVPMPAYFRFLALLAFKIFSDEQQVDVVVLEVGLGGKYDATNVVRAPVVCGITSLGYDHMEILGNTLGEITREKAGILKKGVPAYTVPQPEEAMSVLMKRATELGVSLQVVHPLDPQKLEDQPLGLHGEHQYMNAGLAIALANTWLERQGHLNRLHVKHSGTLPDQFIKGLSSACLHGRGQIIPNSQVNSENDRDSSLVFYLDGAHSSESMEMCARWFAHATNSDGIQPGPSEQPHTDRDSRKFLLFNCMTVRDPQRLLPRLLDTCAQNGLHFEHALFVPNQSQYNKLGSLASPPSEREQIDLSWQLSLQKVWGNLPHHNKGLNDVNSSGATSVFESLPLAIKWLRETAQQNQSIQFQVLVTGSLHLVGDVLRLLKNNK

SEQ ID NO: 110753 - protein, 587 aa, Zea mays subsp. mays
  misc_feature (1)..(587): Ceres Seq. ID no. 15179303
  misc_feature (216)..(305): Pfam Name: Mur ligase family, catalytic domain Pfam Description: Mur ligase family, catalytic domain
  misc_feature (87)..(427): Homolog of NCBI NO: 30694288 NR Description: folylpolyglutamate-dihydrofolate synthase
  misc_feature (539)..(584): Homolog of NCBI NO: 15228213 NR Description: dihydrofolate synthetase (dhfs) [Arabidopsis
  misc_feature (166)..(521): Homolog of NCBI NO: 15228213 NR Description: dihydrofolate synthetase (dhfs) [Arabidopsis
  misc_feature (83)..(568): Homolog of NCBI NO: 10177571 NR Description: tetrahydrofolylpolyglutamate synthase-like
  misc_feature (539)..(584): Homolog of NCBI NO: 17976757 NR Description: dihydrofolate synthetase [Arabidopsis thaliana]
  misc_feature (88)..(521): Homolog of NCBI NO: 17976757 NR Description: dihydrofolate synthetase [Arabidopsis thaliana]
  misc_feature (84)..(584): Homolog of NCBI NO: 17976705 NR Description: dihydrofolate synthetase /folylpolyglutamate
  misc_feature (84)..(584): Homolog of NCBI NO: 30681208 NR Description: folylpolyglutamate synthase (fpgs2) [Arabidopsis
  misc_feature (370)..(584): Homolog of NCBI NO: 37535812 NR Description: putative folylpolyglutamate synthetase
  misc_feature (31)..(349): Homolog of NCBI NO: 37535812 NR Description: putative folylpolyglutamate synthetase
MRAGGGAPPRHAPLSPTASATATLVPASVAMPTPRLVHLRHLLSFRSALPRPLGPNQSHPLPGSVHPSLLLPRAMAGVAYAGLATGSAEYEEVLGCLASLITQKVRADTGNRGNQWELMSKYVQILELEESIAQLKVVHVAGTKGKGSTCTFAESILRSCGFHTGLFTSPHLMDVRERFRLDGLDISEEKFIRYFWWCWKTLKDKTGDGVPMPAYFRFLALLAFKIFSDEQQVDVVVLEVGLGGKYDATNVVRAPVVCGITSLGYDHMEILGNTLGEITREKAGILKKGVPAYTVPQPEEAMSVLMKRATELGVSLQVVHPLDPQKLEDQPLGLHGEHQYMNAGLAIALANTWLERQGHLNRLHVKHSGTLPDQFIKGLSSACLHGRGQIIPNSQVNSENDRDSSLVFYLDGAHSSESMEMCARWFAHATNSDGIQPGPSEQPHTDRDSRKFLLFNCMTVRDPQRLLPRLLDTCAQNGLHFEHALFVPNQSQYNKLGSLASPPSEREQIDLSWQLSLQKVWGNLPHHNKGLNDVNSSGATSVFESLPLAIKWLRETAQQNQSIQFQVLVTGSLHLVGDVLRLLKNNK

SEQ ID NO: 110754 - protein, 557 aa, Zea mays subsp. mays
  misc_feature (1)..(557): Ceres Seq. ID no. 15179304
  misc_feature (186)..(275): Pfam Name: Mur ligase family, catalytic domain Pfam Description: Mur ligase family, catalytic domain
  misc_feature (57)..(397): Homolog of NCBI NO: 30694288 NR Description: folylpolyglutamate-dihydrofolate synthase
  misc_feature (509)..(554): Homolog of NCBI NO: 15228213 NR Description: dihydrofolate synthetase (dhfs) [Arabidopsis
  misc_feature (136)..(491): Homolog of NCBI NO: 15228213 NR Description: dihydrofolate synthetase (dhfs) [Arabidopsis
  misc_feature (53)..(538): Homolog of NCBI NO: 10177571 NR Description: tetrahydrofolylpolyglutamate synthase-like
  misc_feature (509)..(554): Homolog of NCBI NO: 17976757 NR Description: dihydrofolate synthetase [Arabidopsis thaliana]
  misc_feature (58)..(491): Homolog of NCBI NO: 17976757 NR Description: dihydrofolate synthetase [Arabidopsis thaliana]
  misc_feature (54)..(554): Homolog of NCBI NO: 17976705 NR Description: dihydrofolate synthetase /folylpolyglutamate
  misc_feature (54)..(554): Homolog of NCBI NO: 30681208 NR Description: folylpolyglutamate synthase (fpgs2) [Arabidopsis
  misc_feature (340)..(554): Homolog of NCBI NO: 37535812 NR Description: putative folylpolyglutamate synthetase
  misc_feature (1)..(319): Homolog of NCBI NO: 37535812 NR Description: putative folylpolyglutamate synthetase
MPTPRLVHLRHLLSFRSALPRPLGPNQSHPLPGSVHPSLLLPRAMAGVAYAGLATGSAEYEEVLGCLASLITQKVRADTGNRGNQWELMSKYVQILELEESIAQLKVVHVAGTKGKGSTCTFAESILRSCGFHTGLFTSPHLMDVRERFRLDGLDISEEKFIRYFWWCWKTLKDKTGDGVPMPAYFRFLALLAFKIFSDEQQVDVVVLEVGLGGKYDATNVVRAPVVCGITSLGYDHMEILGNTLGEITREKAGILKKGVPAYTVPQPEEAMSVLMKRATELGVSLQVVHPLDPQKLEDQPLGLHGEHQYMNAGLAIALANTWLERQGHLNRLHVKHSGTLPDQFIKGLSSACLHGRGQIIPNSQVNSENDRDSSLVFYLDGAHSSESMEMCARWFAHATNSDGIQPGPSEQPHTDRDSRKFLLFNCMTVRDPQRLLPRLLDTCAQNGLHFEHALFVPNQSQYNKLGSLASPPSEREQIDLSWQLSLQKVWGNLPHHNKGLNDVNSSGATSVFESLPLAIKWLRETAQQNQSIQFQVLVTGSLHLVGDVLRLLKNNK

SEQ ID NO: 110755 - DNA, 1644 bp, Zea mays subsp. mays
  misc_feature (1)..(1644): Ceres Seq. ID no. 13598923
  misc_feature: MA Experiment ID: 108556 Result: Up-regulated in Transcription
  misc_feature: MA Experiment 108556 PARAMETER Experiment Name: Zm_Drought_P Parameter: Age (day) Value: 9
  misc_feature: MA Experiment 108556 PARAMETER Experiment Name: Zm_Drought_P Parameter: Organism Value: Zea mays
  misc_feature: MA Experiment 108556 PARAMETER Experiment Name: Zm_Drought_P Parameter: Plant Line Value: 35A19
  misc_feature: MA Experiment 108556 PARAMETER Experiment Name: Zm_Drought_P Parameter: Timepoint (hr) Value: 24
  misc_feature: MA Experiment 108556 PARAMETER Experiment Name: Zm_Drought_P Parameter: Tissue Value: Aerial
  misc_feature: MA Experiment 108556 PARAMETER Experiment Name: Zm_Drought_P Parameter: Treatment Value: Drought vs. No Drought
  misc_feature: MA Experiment ID: 108559 Result: Up-regulated in Transcription
  misc_feature: MA Experiment 108559 PARAMETER Experiment Name: Zm_5mM_NO_P Parameter: Age (day) Value: 8
  misc_feature: MA Experiment 108559 PARAMETER Experiment Name: Zm_5mM_NO_P Parameter: Organism Value: Zea mays
  misc_feature: MA Experiment 108559 PARAMETER Experiment Name: Zm_5mM_NO_P Parameter: Plant Line Value: 35A19
  misc_feature: MA Experiment 108559 PARAMETER Experiment Name: Zm_5mM_NO_P Parameter: Timepoint (hr) Value: 12
  misc_feature: MA Experiment 108559 PARAMETER Experiment Name: Zm_5mM_NO_P Parameter: Tissue Value: Aerial
  misc_feature: MA Experiment 108559 PARAMETER Experiment Name: Zm_5mM_NO_P Parameter: Treatment Value: 5mM NO vs. No Treatment
  misc_feature: MA Experiment ID: 20000479 Result: Up-regulated in Transcription
  misc_feature: MA Experiment 20000479 PARAMETER Experiment Name: Zm_Drought_P Parameter: Age (day) Value: 10
  misc_feature: MA Experiment 20000479 PARAMETER Experiment Name: Zm_Drought_P Parameter: Organism Value: Zea mays
  misc_feature: MA Experiment 20000479 PARAMETER Experiment Name: Zm_Drought_P Parameter: Plant Line Value: 35A19
  misc_feature: MA Experiment 20000479 PARAMETER Experiment Name: Zm_Drought_P Parameter: Timepoint (hr) Value: 48
  misc_feature: MA Experiment 20000479 PARAMETER Experiment Name: Zm_Drought_P Parameter: Tissue Value: Aerial
  misc_feature: MA Experiment 20000479 PARAMETER Experiment Name: Zm_Drought_P Parameter: Treatment Value: Drought vs. No Drought
  misc_feature: MA Experiment ID: 20000480 Result: Up-regulated in Transcription
  misc_feature: MA Experiment 20000480 PARAMETER Experiment Name: Zm_Drought_P Parameter: Age (day) Value: 11
  misc_feature: MA Experiment 20000480 PARAMETER Experiment Name: Zm_Drought_P Parameter: Organism Value: Zea mays
  misc_feature: MA Experiment 20000480 PARAMETER Experiment Name: Zm_Drought_P Parameter: Plant Line Value: 35A19
  misc_feature: MA Experiment 20000480 PARAMETER Experiment Name: Zm_Drought_P Parameter: Timepoint (hr) Value: 72
  misc_feature: MA Experiment 20000480 PARAMETER Experiment Name: Zm_Drought_P Parameter: Tissue Value: Aerial
  misc_feature: MA Experiment 20000480 PARAMETER Experiment Name: Zm_Drought_P Parameter: Treatment Value: Drought vs. No Drought
  misc_feature: MA Experiment ID: 20001608 Result: Up-regulated in Transcription
  misc_feature: MA Experiment 20001608 PARAMETER Experiment Name: Zm_50ppm_KNO3_L-to-H_P Parameter: Age (day) Value: 21
  misc_feature: MA Experiment 20001608 PARAMETER Experiment Name: Zm_50ppm_KNO3_L-to-H_P Parameter: Organism Value: Zea mays
  misc_feature: MA Experiment 20001608 PARAMETER Experiment Name: Zm_50ppm_KNO3_L-to-H_P Parameter: Plant Line Value: 35A19
  misc_feature: MA Experiment 20001608 PARAMETER Experiment Name: Zm_50ppm_KNO3_L-to-H_P Parameter: Timepoint (hr) Value: 48
  misc_feature: MA Experiment 20001608 PARAMETER Experiment Name: Zm_50ppm_KNO3_L-to-H_P Parameter: Tissue Value: Shoots
  misc_feature: MA Experiment 20001608 PARAMETER Experiment Name: Zm_50ppm_KNO3_L-to-H_P Parameter: Treatment Value: 50ppm KNO3 vs. 50ppm KCl
aaccgcgccgctctctctctctctctcgcacgagccgcgccggcgccgccaccacgcgcgcgggagacagagaccacagccgcagccaccggcgggcggaataggaatggtggcgccggggggaggagcaggaggaggtccgtcgcggtggccggcggcggaggagcttgacactgtacggaagaaggtggtggagattagtggaagggatgaacaagaggttatggttgctgcttgcccctacagaatttgccctttgggggctcatattgatcatcagggtggagtagtcacagctatgaccataaattatggagtactccttggtttcgttccctctaatggttctgaggttttacttcattctggtcagtttgaaggtgctataagattcagagttgatgacttgcaaaagcctattgataaacctgagaacataaactggggaagttatgcaaaaggtgctgttagtgcactgcagaatagtggatatgatctaaggaagggtatcataggatatatttctggtgtgaaaggtcttgatagttcagggctcagttcttctgcggcggttggcatcgcctacttgctggctttagaacatgtaaatgatctggttatatcaccagtagataacattcagttagacaagtacattgaaaataaatacttgggtctcgaaaatggcattctagatccatctgccattttgctttcacggtatggctatctcaccttcatggactgcaagactgcttcaccttcctacgtctgcttctcggagctgaataaaagccaacagcctcagggacagctaccattcaagattttgttggcattttcaggactccaacataatctgccaaagaagcgtggatataatacacgagtttctgagtgcaaagaggctgcccgtgctcttttgcatgcttcaggctgtgaagatacaccaaatatactttgcaatgttgacccagttgtatatgagacccagaagtgtgtattggaagaaaatctttccaggagagctgaacactacttttttgaaatgaagcgggttacaaagggcagggatgcatgggctcatgggaacctacaagaacttggacagctgatctctgaatctggtcgcagctccatactcaactacgaatgtgggagcaaagagatgatccagctgtacgagatcctgctgaaggcccccggcgccctcggcgcccggttcagcggcgccggcttcaggggctgctgcctggccatcgtggagagcgaccgcgcggaggatgcggctgcatacgtccgtgccgagtacgaaaaggcccagcccgagctggtctccaggatccccgcggatcgccgtgttctggtctgcgagcccggggactccgcgcgcgtcatattgcctgatcctcacctgagctcctgatgccatttcgtggcccggacagacggaatgatgactctactagtccattcgctgcgtttggattcgtttttagttaagccccttttgagcatcggatattttcctttcctttattgtttctaataaaaataaattaatttctgtaaactttatataagcttctagcttttttagataaaagtatataatatctatctacttctctactacamtammgt

SEQ ID NO: 110756 - protein, 474 aa, Zea mays subsp. mays
  misc_feature (1)..(474): Ceres Seq. ID no. 15222449
  misc_feature (142)..(440): Homolog of NCBI NO: 18310327 NR Description: galactokinase [Clostridium perfringens]
  misc_feature (80)..(440): Homolog of NCBI NO: 23003215 NR Description: hypothetical protein [Lactobacillus gasseri]
  misc_feature (80)..(440): Homolog of NCBI NO: 120900 NR Description: Galactokinase (Galactose kinase)
  misc_feature (357)..(467): Homolog of NCBI NO: 12322772 NR Description: putative galactokinase, 5' partial; 97-568
  misc_feature (50)..(139): Homolog of NCBI NO: 6630560 NR Description: galactokinase-like protein [Arabidopsis thaliana]
  misc_feature (356)..(467): Homolog of NCBI NO: 6630560 NR Description: galactokinase-like protein [Arabidopsis thaliana]
  misc_feature (139)..(322): Homolog of NCBI NO: 6630560 NR Description: galactokinase-like protein [Arabidopsis thaliana]
  misc_feature (50)..(467): Homolog of NCBI NO: 22330971 NR Description: GHMP kinase family [Arabidopsis thaliana]
  misc_feature (332)..(448): Homolog of NCBI NO: 38567889 NR Description: OSJNBa0060N03.9 [Oryza sativa (japonica
  misc_feature (36)..(250): Homolog of NCBI NO: 38567889 NR Description: OSJNBa0060N03.9 [Oryza sativa (japonica
TAPLSLSLSHEPRRRRHHARGRQRPQPQPPAGGIGMVAPGGGAGGGPSRWPAAEELDTVRKKVVEISGRDEQEVMVAACPYRICPLGAHIDHQGGVVTAMTINYGVLLGFVPSNGSEVLLHSGQFEGAIRFRVDDLQKPIDKPENINWGSYAKGAVSALQNSGYDLRKGIIGYISGVKGLDSSGLSSSAAVGIAYLLALEHVNDLVISPVDNIQLDKYIENKYLGLENGILDPSAILLSRYGYLTFMDCKTASPSYVCFSELNKSQQPQGQLPFKILLAFSGLQHNLPKKRGYNTRVSECKEAARALLHASGCEDTPNILCNVDPVVYETQKCVLEENLSRRAEHYFFEMKRVTKGRDAWAHGNLQELGQLISESGRSSILNYECGSKEMIQLYEILLKAPGALGARFSGAGFRGCCLAIVESDRAEDAAAYVRAEYEKAQPELVSRIPADRRVLVCEPGDSARVILPDPHLSS

SEQ ID NO: 110757 - protein, 439 aa, Zea mays subsp. mays
  misc_feature (1)..(439): Ceres Seq. ID no. 15222450
  misc_feature (107)..(405): Homolog of NCBI NO: 18310327 NR Description: galactokinase [Clostridium perfringens]
  misc_feature (45)..(405): Homolog of NCBI NO: 23003215 NR Description: hypothetical protein [Lactobacillus gasseri]
  misc_feature (45)..(405): Homolog of NCBI NO: 120900 NR Description: Galactokinase (Galactose kinase)
  misc_feature (322)..(432): Homolog of NCBI NO: 12322772 NR Description: putative galactokinase, 5' partial; 97-568
  misc_feature (15)..(104): Homolog of NCBI NO: 6630560 NR Description: galactokinase-like protein [Arabidopsis thaliana]
  misc_feature (321)..(432): Homolog of NCBI NO: 6630560 NR Description: galactokinase-like protein [Arabidopsis thaliana]
  misc_feature (104)..(287): Homolog of NCBI NO: 6630560 NR Description: galactokinase-like protein [Arabidopsis thaliana]
  misc_feature (15)..(432): Homolog of NCBI NO: 22330971 NR Description: GHMP kinase family [Arabidopsis thaliana]
  misc_feature (297)..(413): Homolog of NCBI NO: 38567889 NR Description: OSJNBa0060N03.9 [Oryza sativa (japonica
  misc_feature (1)..(215): Homolog of NCBI NO: 38567889 NR Description: OSJNBa0060N03.9 [Oryza sativa (japonica
MVAPGGGAGGGPSRWPAAEELDTVRKKVVEISGRDEQEVMVAACPYRICPLGAHIDHQGGVVTAMTINYGVLLGFVPSNGSEVLLHSGQFEGAIRFRVDDLQKPIDKPENINWGSYAKGAVSALQNSGYDLRKGIIGYISGVKGLDSSGLSSSAAVGIAYLLALEHVNDLVISPVDNIQLDKYIENKYLGLENGILDPSAILLSRYGYLTFMDCKTASPSYVCFSELNKSQQPQGQLPFKILLAFSGLQHNLPKKRGYNTRVSECKEAARALLHASGCEDTPNILCNVDPVVYETQKCVLEENLSRRAEHYFFEMKRVTKGRDAWAHGNLQELGQLISESGRSSILNYECGSKEMIQLYEILLKAPGALGARFSGAGFRGCCLAIVESDRAEDAAAYVRAEYEKAQPELVSRIPADRRVLVCEPGDSARVILPDPHLSS

SEQ ID NO: 110758 - protein, 400 aa, Zea mays subsp. mays
  misc_feature (1)..(400): Ceres Seq. ID no. 15222451
  misc_feature (1)..(176): Homolog of NCBI NO: 38567889 NR Description: OSJNBa0060N03.9 [Oryza sativa (japonica
  misc_feature (1)..(393): Homolog of NCBI NO: 22330971 NR Description: GHMP kinase family [Arabidopsis thaliana]
  misc_feature (258)..(374): Homolog of NCBI NO: 38567889 NR Description: OSJNBa0060N03.9 [Oryza sativa (japonica
  misc_feature (68)..(366): Homolog of NCBI NO: 18310327 NR Description: galactokinase [Clostridium perfringens]
  misc_feature (6)..(366): Homolog of NCBI NO: 23003215 NR Description: hypothetical protein [Lactobacillus gasseri]
  misc_feature (6)..(366): Homolog of NCBI NO: 120900 NR Description: Galactokinase (Galactose kinase)
  misc_feature (283)..(393): Homolog of NCBI NO: 12322772 NR Description: putative galactokinase, 5' partial; 97-568
  misc_feature (1)..(65): Homolog of NCBI NO: 6630560 NR Description: galactokinase-like protein [Arabidopsis thaliana]
  misc_feature (282)..(393): Homolog of NCBI NO: 6630560 NR Description: galactokinase-like protein [Arabidopsis thaliana]
  misc_feature (65)..(248): Homolog of NCBI NO: 6630560 NR Description: galactokinase-like protein [Arabidopsis thaliana]
MVAACPYRICPLGAHIDHQGGVVTAMTINYGVLLGFVPSNGSEVLLHSGQFEGAIRFRVDDLQKPIDKPENINWGSYAKGAVSALQNSGYDLRKGIIGYISGVKGLDSSGLSSSAAVGIAYLLALEHVNDLVISPVDNIQLDKYIENKYLGLENGILDPSAILLSRYGYLTFMDCKTASPSYVCFSELNKSQQPQGQLPFKILLAFSGLQHNLPKKRGYNTRVSECKEAARALLHASGCEDTPNILCNVDPVVYETQKCVLEENLSRRAEHYFFEMKRVTKGRDAWAHGNLQELGQLISESGRSSILNYECGSKEMIQLYEILLKAPGALGARFSGAGFRGCCLAIVESDRAEDAAAYVRAEYEKAQPELVSRIPADRRVLVCEPGDSARVILPDPHLSS

SEQ ID NO: 110759 - DNA, 3044 bp, Zea mays subsp. mays
  misc_feature (1)..(3044): Ceres Seq. ID no. 15179283
accacgctccggtcagcctcgcctcccttctccgtctcattcccccaatcccacgccactcccgcaggaatccccacccaaattcccgtctccccgatcgccgcccttctcggtgcccgtaaaccctacccccggagtcgcccgtgcgctgtcgtgcccgcgttgccaccgtcggtggtccgcggcgcccgtaaccaaaacctaaccgcagcctgcagatcccgattccgcagggaggcgggagaggtgaaggccgcctcgccgcagatggagcccgcgggcgcgcgcaaggagtggcgcgccgtccccggctcctcgctccgctccaatggcgccgaggatgccgcggagcacgggaaactggggcagtcggaggaccgagctatctacgaggaaggggcgggtggactggaggacttctgcgccatcaccattgatgggagcggagggctcagcgaggacatcctgcagcagcgcctgcagagcgttgtgcggcaaagggagcagctgcagcaggtcgagatggagctgcgtgcgcaggccattgcacacccgcagatcattcaggcgcaacaaagcttccaggctacttccaaggaacatgccgcagctgtggccaagatcaaggagcaactgcatgagcgggagcaatacattcttgaactagaaatgaaactcaatgacaaggatagagaactaaatgctctgaagattgatcatcaaacggtgtgggcaaatcaagatcttattagagaacagaccaaagagctggcaactgtcagaagggaacgcgacaactctgaagctgaaagagcccaacatcttacacaaattcatgagctccaagaacatctgcgagaaaaagaaagccagttcattgcattagaggaacagcatagggctgctcaagacaacattctttacaaagatgagcagttgagggaagcccatgcttgggtatctcaagttcgagaaatggatgctttgcagtctcaatccctacaagttgagttacgtgagcgcatggagcaatttaatcaatattggattagctcccagcagcagtatgctgaaatgcagcggagtcttctccatacaatacaacaactccagcaagaattaactgaggcaagggaacagtctggtgcacaaaaagatggtccacaagtttctcgggaagggtcagctgaatcatcactagttcaaagcatgggaaacagcgtggcttcaaatggtagtgcaactgcagatgggaaccagcaattgttgaaaaataatggaagcgtggatgtctctgttcaggccaatagtgcctcagctgtacctgttccttcttccctactgggaatcggtggtccggctgcgcatatcgctgcgatgcatgcttttatgattcatcctcaaggcattcctcaacccttagtagcatcacccaactctggtgttcctcaatttggcagttttcagtctcagtctacaattcaaccaaattcacaatggccaaatcagcaggaagtacaaaatgtctcacaaccacaagatgaaacaaactatcagacatcccaatcagaccggactgttttacaacaaggcgctattaatactgatgagttgtcctcaaagccaagccaggatagtcagccagaccatcttaatgcccatgtgaaacaacagcaaagccctgcaagtgcacctactgaatcaactcatgaacttactgttgttgaagcgaatgtagctgaacatgtatcttgtgacgaacaacaaaaaatcttaaacgaacaggattcactgtcaaatatgaacaaccatattggaatagttgagcatctagagcaaaataccgaatccaaggatgaaagagctgcatctgataagcaacctgaacctgtatctaggcagcataaacatttgaactttcctccgttcactacccagattcacttgaaaaagagtgcaacagagaatcctaatgttgtaaatcaggttgatataatgaaatcagttgcaggtggttttagttcgcagttacctcgtgcaccaaaggaaccttctctcctagatgagagatctctattggcttgcattgtacgtgcagttcctgctgggactgagggtggaatcaggataagttcaactctgccaaataggcttgggaaaatgttggctccccttcactggcatgactataagaagcaatacgggaagctcgacgattttgtggctagtcatccagagctgtttgtgattgagggagacttcattcaccttcgtgatggagcacagcagattatttctgccactacagctgctgcaaaaatagctgctgcgacagcatcttctgcctcttactcatccttactgccttctgttgccgttactcctgtggcacaaaatactcggcaaaagaggaggcccgcagttgattccagatcatcaaatgcaattccctctggaaacggcttcacagatcaatttaacatcattcagggtgtcagcgacgtaacaatttcaggcaaagtaagaaatatccaagataatggcttcatagatgaagttcgcactgggcagccatccgtgctcacagctgctactgccaacggagcaagacatgacaaatgtgcaaataataccagacatggttatggtggaaaacaacaggggaggaccactgggacgacatacctttccagaagatgaaccaactttcactgggcgatgatgctgttggaattggaaaccatgcgagtggcgatgatgcggttggggaaaccatacgagtgacgatgctttggcttcgaaatgatggtgaagatgacctggattaaagttattctagattcattttttattttgcactattggtcttcacagagcctgtatggttgggggccttgttttggcaaagctgtactgatatatccctaccccaagaatcagaagcctgccaaagttttgcgactatgtacctcgtctgcgcttgtgtattgtggtgcacttgaatgatgcgaatgttatatcgaatccccgtccttgatcgtgag

SEQ ID NO: 110760 - protein, 899 aa, Zea mays subsp. mays
  misc_feature (1)..(899): Ceres Seq. ID no. 15179284
  misc_feature (145)..(441): Pfam Name: Myosin tail Pfam Description: Myosin tail
  misc_feature (153)..(421): Homolog of NCBI NO: 13936996 NR Description: ORF73 [Human herpesvirus 8]
  misc_feature (157)..(421): Homolog of NCBI NO: 5669894 NR Description: latent nuclear antigen [Human herpesvirus 8]
  misc_feature (158)..(417): Homolog of NCBI NO: 11037008 NR Description: latent nuclear antigen [Human herpesvirus 8]
  misc_feature (157)..(417): Homolog of NCBI NO: 2246532 NR Description: ORF 73, contains large complex repeat CR 73
  misc_feature (489)..(638): Homolog of NCBI NO: 23480318 NR Description: Drosophila melanogaster CG8797 gene
  misc_feature (147)..(389): Homolog of NCBI NO: 23480318 NR Description: Drosophila melanogaster CG8797 gene
  misc_feature (674)..(804): Homolog of NCBI NO: 9759201 NR Description: gene_id:MNC6.16~unknown protein [Arabidopsis
  misc_feature (75)..(506): Homolog of NCBI NO: 9759201 NR Description: gene_id:MNC6.16~unknown protein [Arabidopsis
  misc_feature (674)..(804): Homolog of NCBI NO: 18423534 NR Description: expressed protein [Arabidopsis thaliana]
  misc_feature (68)..(506): Homolog of NCBI NO: 18423534 NR Description: expressed protein [Arabidopsis thaliana]
TTLRSASPPFSVSFPQSHATPAGIPTQIPVSPIAALLGARKPYPRSRPCAVVPALPPSVVRGARNQNLTAACRSRFRREAGEVKAASPQMEPAGARKEWRAVPGSSLRSNGAEDAAEHGKLGQSEDRAIYEEGAGGLEDFCAITIDGSGGLSEDILQQRLQSVVRQREQLQQVEMELRAQAIAHPQIIQAQQSFQATSKEHAAAVAKIKEQLHEREQYILELEMKLNDKDRELNALKIDHQTVWANQDLIREQTKELATVRRERDNSEAERAQHLTQIHELQEHLREKESQFIALEEQHRAAQDNILYKDEQLREAHAWVSQVREMDALQSQSLQVELRERMEQFNQYWISSQQQYAEMQRSLLHTIQQLQQELTEAREQSGAQKDGPQVSREGSAESSLVQSMGNSVASNGSATADGNQQLLKNNGSVDVSVQANSASAVPVPSSLLGIGGPAAHIAAMHAFMIHPQGIPQPLVASPNSGVPQFGSFQSQSTIQPNSQWPNQQEVQNVSQPQDETNYQTSQSDRTVLQQGAINTDELSSKPSQDSQPDHLNAHVKQQQSPASAPTESTHELTVVEANVAEHVSCDEQQKILNEQDSLSNMNNHIGIVEHLEQNTESKDERAASDKQPEPVSRQHKHLNFPPFTTQIHLKKSATENPNVVNQVDIMKSVAGGFSSQLPRAPKEPSLLDERSLLACIVRAVPAGTEGGIRISSTLPNRLGKMLAPLHWHDYKKQYGKLDDFVASHPELFVIEGDFIHLRDGAQQIISATTAAAKIAAATASSASYSSLLPSVAVTPVAQNTRQKRRPAVDSRSSNAIPSGNGFTDQFNIIQGVSDVTISGKVRNIQDNGFIDEVRTGQPSVLTAATANGARHDKCANNTRHGYGGKQQGRTTGTTYLSRR

SEQ ID NO: 110761 - protein, 810 aa, Zea mays subsp. mays
  misc_feature (1)..(810): Ceres Seq. ID no. 15179285
  misc_feature (56)..(352): Pfam Name: Myosin tail Pfam Description: Myosin tail
  misc_feature (64)..(332): Homolog of NCBI NO: 13936996 NR Description: ORF73 [Human herpesvirus 8]
  misc_feature (68)..(332): Homolog of NCBI NO: 5669894 NR Description: latent nuclear antigen [Human herpesvirus 8]
  misc_feature (69)..(328): Homolog of NCBI NO: 11037008 NR Description: latent nuclear antigen [Human herpesvirus 8]
  misc_feature (68)..(328): Homolog of NCBI NO: 2246532 NR Description: ORF 73, contains large complex repeat CR 73
  misc_feature (400)..(549): Homolog of NCBI NO: 23480318 NR Description: Drosophila melanogaster CG8797 gene
  misc_feature (58)..(300): Homolog of NCBI NO: 23480318 NR Description: Drosophila melanogaster CG8797 gene
  misc_feature (585)..(715): Homolog of NCBI NO: 9759201 NR Description: gene_id:MNC6.16~unknown protein [Arabidopsis
  misc_feature (1)..(417): Homolog of NCBI NO: 9759201 NR Description: gene_id:MNC6.16~unknown protein [Arabidopsis
  misc_feature (585)..(715): Homolog of NCBI NO: 18423534 NR Description: expressed protein [Arabidopsis thaliana]
  misc_feature (1)..(417): Homolog of NCBI NO: 18423534 NR Description: expressed protein [Arabidopsis thaliana]
MEPAGARKEWRAVPGSSLRSNGAEDAAEHGKLGQSEDRAIYEEGAGGLEDFCAITIDGSGGLSEDILQQRLQSVVRQREQLQQVEMELRAQAIAHPQIIQAQQSFQATSKEHAAAVAKIKEQLHEREQYILELEMKLNDKDRELNALKIDHQTVWANQDLIREQTKELATVRRERDNSEAERAQHLTQIHELQEHLREKESQFIALEEQHRAAQDNILYKDEQLREAHAWVSQVREMDALQSQSLQVELRERMEQFNQYWISSQQQYAEMQRSLLHTIQQLQQELTEAREQSGAQKDGPQVSREGSAESSLVQSMGNSVASNGSATADGNQQLLKNNGSVDVSVQANSASAVPVPSSLLGIGGPAAHIAAMHAFMIHPQGIPQPLVASPNSGVPQFGSFQSQSTIQPNSQWPNQQEVQNVSQPQDETNYQTSQSDRTVLQQGAINTDELSSKPSQDSQPDHLNAHVKQQQSPASAPTESTHELTVVEANVAEHVSCDEQQKILNEQDSLSNMNNHIGIVEHLEQNTESKDERAASDKQPEPVSRQHKHLNFPPFTTQIHLKKSATENPNVVNQVDIMKSVAGGFSSQLPRAPKEPSLLDERSLLACIVRAVPAGTEGGIRISSTLPNRLGKMLAPLHWHDYKKQYGKLDDFVASHPELFVIEGDFIHLRDGAQQIISATTAAAKIAAATASSASYSSLLPSVAVTPVAQNTRQKRRPAVDSRSSNAIPSGNGFTDQFNIIQGVSDVTISGKVRNIQDNGFIDEVRTGQPSVLTAATANGARHDKCANNTRHGYGGKQQGRTTGTTYLSRR

SEQ ID NO: 110762 - protein, 725 aa, Zea mays subsp. mays
  misc_feature (1)..(725): Ceres Seq. ID no. 15179286
  misc_feature (1)..(267): Pfam Name: Myosin tail Pfam Description: Myosin tail
  misc_feature (1)..(247): Homolog of NCBI NO: 13936996 NR Description: ORF73 [Human herpesvirus 8]
  misc_feature (1)..(247): Homolog of NCBI NO: 5669894 NR Description: latent nuclear antigen [Human herpesvirus 8]
  misc_feature (1)..(243): Homolog of NCBI NO: 11037008 NR Description: latent nuclear antigen [Human herpesvirus 8]
  misc_feature (1)..(243): Homolog of NCBI NO: 2246532 NR Description: ORF 73, contains large complex repeat CR 73
  misc_feature (315)..(464): Homolog of NCBI NO: 23480318 NR Description: Drosophila melanogaster CG8797 gene
  misc_feature (1)..(215): Homolog of NCBI NO: 23480318 NR Description: Drosophila melanogaster CG8797 gene
  misc_feature (500)..(630): Homolog of NCBI NO: 9759201 NR Description: gene_id:MNC6.16~unknown protein [Arabidopsis
  misc_feature (1)..(332): Homolog of NCBI NO: 9759201 NR Description: gene_id:MNC6.16~unknown protein [Arabidopsis
  misc_feature (500)..(630): Homolog of NCBI NO: 18423534 NR Description: expressed protein [Arabidopsis thaliana]
  misc_feature (1)..(332): Homolog of NCBI NO: 18423534 NR Description: expressed protein [Arabidopsis thaliana]
MELRAQAIAHPQIIQAQQSFQATSKEHAAAVAKIKEQLHEREQYILELEMKLNDKDRELNALKIDHQTVWANQDLIREQTKELATVRRERDNSEAERAQHLTQIHELQEHLREKESQFIALEEQHRAAQDNILYKDEQLREAHAWVSQVREMDALQSQSLQVELRERMEQFNQYWISSQQQYAEMQRSLLHTIQQLQQELTEAREQSGAQKDGPQVSREGSAESSLVQSMGNSVASNGSATADGNQQLLKNNGSVDVSVQANSASAVPVPSSLLGIGGPAAHIAAMHAFMIHPQGIPQPLVASPNSGVPQFGSFQSQSTIQPNSQWPNQQEVQNVSQPQDETNYQTSQSDRTVLQQGAINTDELSSKPSQDSQPDHLNAHVKQQQSPASAPTESTHELTVVEANVAEHVSCDEQQKILNEQDSLSNMNNHIGIVEHLEQNTESKDERAASDKQPEPVSRQHKHLNFPPFTTQIHLKKSATENPNVVNQVDIMKSVAGGFSSQLPRAPKEPSLLDERSLLACIVRAVPAGTEGGIRISSTLPNRLGKMLAPLHWHDYKKQYGKLDDFVASHPELFVIEGDFIHLRDGAQQIISATTAAAKIAAATASSASYSSLLPSVAVTPVAQNTRQKRRPAVDSRSSNAIPSGNGFTDQFNIIQGVSDVTISGKVRNIQDNGFIDEVRTGQPSVLTAATANGARHDKCANNTRHGYGGKQQGRTTGTTYLSRR

SEQ ID NO: 110763 - DNA, 991 bp, Zea mays subsp. mays
  misc_feature (1)..(991): Ceres Seq. ID no. 12637760
  misc_feature: MA Experiment ID: 108535 Result: Up-regulated in Transcription
  misc_feature: MA Experiment 108535 PARAMETER Experiment Name: Zm_Meristem_P Parameter: Age (day) Value: 8
  misc_feature: MA Experiment 108535 PARAMETER Experiment Name: Zm_Meristem_P Parameter: Organism Value: Zea mays
  misc_feature: MA Experiment 108535 PARAMETER Experiment Name: Zm_Meristem_P Parameter: Plant Line Value: 35A19
  misc_feature: MA Experiment 108535 PARAMETER Experiment Name: Zm_Meristem_P Parameter: Tissue Value: Root Meristem vs. Above Root Meristem
  misc_feature: MA Experiment ID: 108543 Result: Up-regulated in Transcription
  misc_feature: MA Experiment ID: 20000488 Result: Up-regulated in Transcription
  misc_feature: MA Experiment 20000488 PARAMETER Experiment Name: Zm_50mM_NH4NO3_L_to_H_P Parameter: Organism Value: Zea mays
  misc_feature: MA Experiment 20000488 PARAMETER Experiment Name: Zm_50mM_NH4NO3_L_to_H_P Parameter: Timepoint (hr) Value: 8
  misc_feature: MA Experiment 20000488 PARAMETER Experiment Name: Zm_50mM_NH4NO3_L_to_H_P Parameter: Tissue Value: Leaves
  misc_feature: MA Experiment 20000488 PARAMETER Experiment Name: Zm_50mM_NH4NO3_L_to_H_P Parameter: Treatment Value: 50mM NH4NO3 vs. 100mM Mannitol
attacatgttctggagctttcagagggatgggattcattggtcactgcacgtgcagctgaactcctaagtttaaatcttgaaaccatggagaagttgaaggaatcagaagagctattggaacgatgccttgcagtcaagaaaaagattctacctgaagatcatcttcaggtagcttatacgttggtacacctggcaaggttaacattgcacagagttgtaaaggatcgggatgtaaacagcgatgtaactgcatattacctcgcaaaagcaaaaacagttcagcaatgattcaatcaggattacagaaggacaattaaattcttcaagaaaagatcagaataaaattaacaacacatcaactgcagatacagataagagtgcagcaataattctttttcaagcacttcatgtttttggactcattgatattgcagcgaagcagttgctagggcaaggggagcaagactataattctgttcaagatgctctgcagaagtgtgtttcactttacaaagagcctcatacacgaaggttggtgaaaaatgctgccaagcaggactacatgatatgcctgacgagcctgatcgatatggttcagagcttgtttcccattccacacataccggggttgcaggagttgctttgcgaggccgaacaaattttaggagagctagaagaagagagtactaggaagaagcaatgatacgtaggaaccaacacccatatgggtggaagcatttgttaattgcaagttgtgagccatatattttttcagttggtcgagatcgcccacctatatgggtggaagcatttgtttgacgaggtgctgaatcgagtgacgggttaaagagtttaatgcttgtttgcgcagtggtgttatgacgtggtcttcaacatagagtcctagtttctcggtggtggtggtccacaagatagatcatgttgctgaaatcttggatgctttctaaatcaaaatccttgacattggcg

SEQ ID NO: 110764 - protein, 95 aa, Zea mays subsp. mays
  misc_feature (1)..(95): Ceres Seq. ID no. 12637761
  misc_feature (18)..(91): Homolog of NCBI NO: 9757968 NR Description: gene_id:K12B20.4~unknown protein [Arabidopsis
  misc_feature (3)..(91): Homolog of NCBI NO: 15240284 NR Description: putative protein; protein id: At5g37580.1
LHVLELSEGWDSLVTARAAELLSLNLETMEKLKESEELLERCLAVKKKILPEDHLQVAYTLVHLARLTLHRVVKDRDVNSDVTAYYLAKAKTVQQ

SEQ ID NO: 110765 - protein, 67 aa, Zea mays subsp. mays
  misc_feature (1)..(67): Ceres Seq. ID no. 12637762
  misc_feature (1)..(63): Homolog of NCBI NO: 9757968 NR Description: gene_id:K12B20.4~unknown protein [Arabidopsis
  misc_feature (1)..(63): Homolog of NCBI NO: 15240284 NR Description: putative protein; protein id: At5g37580.1
MEKLKESEELLERCLAVKKKILPEDHLQVAYTLVHLARLTLHRVVKDRDVNSDVTAYYLAKAKTVQQ

SEQ ID NO: 110766 - DNA, 610 bp, Zea mays subsp. mays
  misc_feature (1)..(610): Ceres Seq. ID no. 12637716
ataccccaccgtagtggcagcgagccagcgacctcgagtagcagcagaggctccgcaggggcgaaaaggtgtgaagcttccttcggagatcccagtagcagaagcaacgcaggcatcggcttgcgacaggagaggacggagatgacgcagaagcagaccctgttcaaggggcagagcaagaagaagactatccctcccaaccgccacggcaaggcgcctcatgttcgtaaaggaaagagagccgtcaagcccaccaagttcacaaaggacatggacgccgagaaggaactcaccaagttcatcaaccagtgcaacgaaataaaagctgcgaatcttgctagcaaagagggcggtgacctcaacatagtaaaggcggatggcgaggaatctaaatcaaagaaataggaagccagaaactgaaaacgagtgtgtgaaacgtgatgcgtggtaaactgttaatgccatgtattctgctgaagaaaattcggttccgtatggctgggtagatgaacatgtttagcgcaaagtgacggtgtaactgcaaccggggtaatggcttgcaagttttgttctgtgccatctctatttctccgaattattatattgatgg

SEQ ID NO: 110767 - protein, 134 aa, Zea mays subsp. mays
  misc_feature (1)..(134): Ceres Seq. ID no. 12637717
  misc_feature (48)..(134): Homolog of NCBI NO: 15231119 NR Description: putative protein
  misc_feature (48)..(132): Homolog of NCBI NO: 34903208 NR Description: unnamed protein product [Oryza sativa (japonica
IPHRSGSEPATSSSSRGSAGAKRCEASFGDPSSRSNAGIGLRQERTEMTQKQTLFKGQSKKKTIPPNRHGKAPHVRKGKRAVKPTKFTKDMDAEKELTKFINQCNEIKAANLASKEGGDLNIVKADGEESKSKK

SEQ ID NO: 110768 - protein, 87 aa, Zea mays subsp. mays; identical to SEQ ID NO: 19958
  misc_feature (1)..(87): Ceres Seq. ID no. 12637718
  misc_feature (1)..(87): Homolog of NCBI NO: 15231119 NR Description: putative protein
  misc_feature (1)..(85): Homolog of NCBI NO: 34903208 NR Description: unnamed protein product [Oryza sativa (japonica

SEQ ID NO: 110769 - DNA, 847 bp, Zea mays subsp. mays
  misc_feature (1)..(847): Ceres Seq. ID no. 14306359
accaggcaccagcatagatctcgtgctcgccactattattctgcacagcaacgcatcagccttctggaaccatctcgccgccgccacaccacaatccacaacccgtcgaagcgaagcaagcaatggccggagtcggatcgaaggccctcgccgttgccgccgttctggcggccgtctccttctcggtggccgccgcggccgagaagctatcgccggaatgctgcaagcacatgttgcggaacggcgagttcccgaccacggcggcggtgcaagcgctggcatcgcagcatacggtgttgaagagcgtcgtgcttcgcgaaccgggccaactgaagtccgtgtcgccatcccctaccgcttccacgggaaagcgccgcgacggctatgacgacgacaatggcggcggcgagaacgacgggcaggtgatcctgtacgcgagacggctggacctgtcggtggagaaccagaacctgcggtcgctccttgacgggatgcactggcgggtggtggagctggagaaggtgtgcagccggatgaagacgcggatgagcaagatgaagcaggccaggagaggcggcggcggccgcaccgccaggtcgctccctaggatgtgttcttgatccagctcgccctgccactagcgcttagcggtgatcgcaacactgtaccatagcgacgatgtacatactctagttgctaggaatcaatcaaaagcggatcgcagctgggatctgtccggacatgcgctgcgcggccggccgatccggcgccggcgggagccacagcatccacaagatgcgctagctatggtagcattaataactaactgctcgcaccgatcccacct

SEQ ID NO: 110770 - protein, 165 aa, Zea mays subsp. mays
  misc_feature (1)..(165): Ceres Seq. ID no. 14306360
  misc_feature (27)..(165): Homolog of NCBI NO: 34898504 NR Description: OJ1612_A04.8 [Oryza sativa (japonica
  misc_feature (27)..(165): Homolog of NCBI NO: 33146528 NR Description: putative phototropic response protein family
MAGVGSKALAVAAVLAAVSFSVAAAAEKLSPECCKHMLRNGEFPTTAAVQALASQHTVLKSVVLREPGQLKSVSPSPTASTGKRRDGYDDDNGGGENDGQVILYARRLDLSVENQNLRSLLDGMHWRVVELEKVCSRMKTRMSKMKQARRGGGGRTARSLPRMCS

SEQ ID NO: 110771 - protein, 129 aa, Zea mays subsp. mays
  misc_feature (1)..(129): Ceres Seq. ID no. 14306361
  misc_feature (1)..(129): Homolog of NCBI NO: 34898504 NR Description: OJ1612_A04.8 [Oryza sativa (japonica
  misc_feature (1)..(129): Homolog of NCBI NO: 33146528 NR Description: putative phototropic response protein family
MLRNGEFPTTAAVQALASQHTVLKSVVLREPGQLKSVSPSPTASTGKRRDGYDDDNGGGENDGQVILYARRLDLSVENQNLRSLLDGMHWRVVELEKVCSRMKTRMSKMKQARRGGGGRTARSLPRMCS

SEQ ID NO: 110772 - protein, 128 aa, Zea mays subsp. mays
  misc_feature (1)..(128): Ceres Seq. ID no. 14306362
PGTSIDLVLATIILHSNASAFWNHLAAATPQSTTRRSEASNGRSRIEGPRRCRRSGGRLLLGGRRGREAIAGMLQAHVAERRVPDHGGGASAGIAAYGVEERRASRTGPTEVRVAIPYRFHGKAPRRL

SEQ ID NO: 110773 - DNA, 734 bp, Zea mays subsp. mays
  misc_feature (1)..(734): Ceres Seq. ID no. 12637827
catatgaagatgacctaccctcgccaaaacctgctccaaaacttgtacccaaaagtgaaccagatgatagcagccctgctaaaccaacaccatcagggcacgctcagagcgctacaccttcatccaaatccactcaaaagaggaaatcagggggtggtgatgcaaatatttctaatggtgcaccctcgaaaaagataaagatggaacatgaaaccggaacattggctgtcaaggatgaaaatccgtcttatttggaaccaacttcgaaagcatctctttcagcaagaagagaatcatcacccattacagaggaagaagtcaggacagtacttcgtgcaatttcacccacgacaagccaagatctggtgtcgaggttcaagactcgtctaataactcaagaggacaagaaagcatttttgggcattgtgacgaaaatatctcgcatacttaagcacaacggcggtaggtatatcgttcttcggcacgaacatatgtgaacagacaaattactctacctgtatagtgcaacagattctttaatgccacaaggcaacagcatgagtttttccccctagcttagagcttagggtttaggtattaggtatattgggtactggcaaccaagatgctcagcaagaggcctctgcagtttttctcccttataatgtacttcctgagagctgagaatgaaatgagaaaacgagaatggaatctatggtagattcttataatcc

SEQ ID NO: 110774 - protein, 164 aa, Zea mays subsp. mays
  misc_feature (1)..(164): Ceres Seq. ID no. 12637828
  misc_feature (2)..(160): Pfam Name: Transcription initiation factor IIF, alpha Pfam Description: Transcription initiation factor IIF, alpha
  misc_feature (13)..(162): Homolog of NCBI NO: 39545900 NR Description: mutant TFIIF-alpha [Arabidopsis thaliana]
  misc_feature (13)..(162): Homolog of NCBI NO: 15235418 NR Description: putative protein; protein id: At4g12610.1
  misc_feature (2)..(162): Homolog of NCBI NO: 37531856 NR Description: putative transcription initiation factor
YEDDLPSPKPAPKLVPKSEPDDSSPAKPTPSGHAQSATPSSKSTQKRKSGGGDANISNGAPSKKIKMEHETGTLAVKDENPSYLEPTSKASLSARRESSPITEEEVRTVLRAISPTTSQDLVSRFKTRLITQEDKKAFLGIVTKISRILKHNGGRYIVLRHEHM

SEQ ID NO: 110775 - protein, 98 aa, Zea mays subsp. mays
  misc_feature (1)..(98): Ceres Seq. ID no. 12637829
  misc_feature (1)..(94): Pfam Name: Transcription initiation factor IIF, alpha Pfam Description: Transcription initiation factor IIF, alpha
  misc_feature (1)..(96): Homolog of NCBI NO: 39545900 NR Description: mutant TFIIF-alpha [Arabidopsis thaliana]
  misc_feature (1)..(96): Homolog of NCBI NO: 15235418 NR Description: putative protein; protein id: At4g12610.1
  misc_feature (1)..(96): Homolog of NCBI NO: 37531856 NR Description: putative transcription initiation factor
MEHETGTLAVKDENPSYLEPTSKASLSARRESSPITEEEVRTVLRAISPTTSQDLVSRFKTRLITQEDKKAFLGIVTKISRILKHNGGRYIVLRHEHM

SEQ ID NO: 110776 - DNA, 1350 bp, Zea mays subsp. mays
  misc_feature (1)..(1350): Ceres Seq. ID no. 15179271
ctaatcggtcatctgatgctactgtttccaaatcatttcctgaagaatttgaggatttggaatctgtgaggaatcagagaataaagccagaatctctggaaggtgatctggcagttactggagaaatgaacaaagatgatgacaacgggcatttagtttcacagcaggaacatcgcttcttgagcaactcccctggttttgatattgcacaatcgtgggctaagtagcgtgtgatggcaagtggaagcagtaaaaatgatgagcttgatgctgtcgctcttcctgttggtgtaaaacttagcaaagttcagtctgatcattctccagatatgcagactgaaactcttggtgctgacacaactgttgctagtggacatgctgcctttggattatctttttctgatgttcgtttggagaaagtaatggacgtatgtagttctgcgatcacatttctgaggaatagaatggataggcctcgaaagcgtggttcaaactcattatccagccgggctgccctgatgcttgatgcagaaagagaaccagaaaagacatggagccccatagttgaaatacattatgtagggggaacttatagaggtagatgtcaagaaggtgtccctgaaggaaagggacgtctaaccttcagtgacggaagcttttatgatggactctggaggtatggtaagagatctggtttggggactctatttcacagtaacggtgatgtataccatggaacgtggagggatgaccttattcatggaaagggctggtactattttcacagcggtgaccgctggtttgcaaatttttggaagggcaaggctaatggtgagggtagattttatgccaatgatgggagtatcttctttggccatttccgaaatggatggcgccatggggagagcctgttggtagatgcaaacggttcaaggtggatcgaagtttgggctgatggtgtacttatcaacagaactaaaatggagaaataaggttcagatctaaatacattttcctgatgtttctaaaacttggctcctcagatggctacgcttcaaagtctcagatattgcaaggcactctggtccggagcctctctactgtacacgaagtcgtcctatattcagtcttgaaagtcgtaaataggtgcgctgttgaggtttcgatgccctaatttcaaaggggcagactgcaggcgtttctgtatataccactagactgcaagtatgggaggatgcctttgttcatacggctgatggatcaagctgggaacagctatatacccaactgtacctgaacgtgaagtgtgtttgattagttccactgataacccatagatattttcttgtc

SEQ ID NO: 110777 - protein, 252 aa, Zea mays subsp. mays
  misc_feature (1)..(252): Ceres Seq. ID no. 15179272
  misc_feature (166)..(188): Pfam Name: MORN repeat Pfam Description: MORN repeat
  misc_feature (117)..(242): Homolog of NCBI NO: 22297733 NR Description: ORF_ID:tlr0189~hypothetical protein
  misc_feature (117)..(241): Homolog of NCBI NO: 23481997 NR Description: MORN repeat, putative [Plasmodium yoelii yoelii]
  misc_feature (117)..(242): Homolog of NCBI NO: 40062709 NR Description: MORN repeat protein [uncultured bacterium 314]
  misc_feature (117)..(243): Homolog of NCBI NO: 25404297 NR Description: hypothetical protein T7P1.4 [imported] -
  misc_feature (117)..(243): Homolog of NCBI NO: 22330351 NR Description: phosphatidylinositol-4-phosphate 5-kinase
  misc_feature (117)..(243): Homolog of NCBI NO: 40062709 NR Description: MORN repeat protein [uncultured bacterium 314]
  misc_feature (117)..(239): Homolog of NCBI NO: 29346157 NR Description: putative phosphatidylinositol-4-phosphate
  misc_feature (1)..(251): Homolog of NCBI NO: 25406404 NR Description: hypothetical protein F9E10.14 [imported] -
  misc_feature (1)..(251): Homolog of NCBI NO: 15222086 NR Description: expressed protein [Arabidopsis thaliana]
  misc_feature (1)..(251): Homolog of NCBI NO: 5882723 NR Description: F25A4.3 [Arabidopsis thaliana]
MASGSSKNDELDAVALPVGVKLSKVQSDHSPDMQTETLGADTTVASGHAAFGLSFSDVRLEKVMDVCSSAITFLRNRMDRPRKRGSNSLSSRAALMLDAEREPEKTWSPIVEIHYVGGTYRGRCQEGVPEGKGRLTFSDGSFYDGLWRYGKRSGLGTLFHSNGDVYHGTWRDDLIHGKGWYYFHSGDRWFANFWKGKANGEGRFYANDGSIFFGHFRNGWRHGESLLVDANGSRWIEVWADGVLINRTKMEK

SEQ ID NO: 110778 - protein, 220 aa, Zea mays subsp. mays
  misc_feature (1)..(220): Ceres Seq. ID no. 15179273
  misc_feature (134)..(156): Pfam Name: MORN repeat Pfam Description: MORN repeat
  misc_feature (85)..(210): Homolog of NCBI NO: 22297733 NR Description: ORF_ID:tlr0189~hypothetical protein
  misc_feature (85)..(209): Homolog of NCBI NO: 23481997 NR Description: MORN repeat, putative [Plasmodium yoelii yoelii]
  misc_feature (85)..(210): Homolog of NCBI NO: 40062709 NR Description: MORN repeat protein [uncultured bacterium 314]
  misc_feature (85)..(211): Homolog of NCBI NO: 25404297 NR Description: hypothetical protein T7P1.4 [imported] -
  misc_feature (85)..(211): Homolog of NCBI NO: 22330351 NR Description: phosphatidylinositol-4-phosphate 5-kinase
  misc_feature (85)..(211): Homolog of NCBI NO: 40062709 NR Description: MORN repeat protein [uncultured bacterium 314]
  misc_feature (85)..(207): Homolog of NCBI NO: 29346157 NR Description: putative phosphatidylinositol-4-phosphate
  misc_feature (1)..(219): Homolog of NCBI NO: 25406404 NR Description: hypothetical protein F9E10.14 [imported] -
  misc_feature (1)..(219): Homolog of NCBI NO: 15222086 NR Description: expressed protein [Arabidopsis thaliana]
  misc_feature (1)..(219): Homolog of NCBI NO: 5882723 NR Description: F25A4.3 [Arabidopsis thaliana]
MQTETLGADTTVASGHAAFGLSFSDVRLEKVMDVCSSAITFLRNRMDRPRKRGSNSLSSRAALMLDAEREPEKTWSPIVEIHYVGGTYRGRCQEGVPEGKGRLTFSDGSFYDGLWRYGKRSGLGTLFHSNGDVYHGTWRDDLIHGKGWYYFHSGDRWFANFWKGKANGEGRFYANDGSIFFGHFRNGWRHGESLLVDANGSRWIEVWADGVLINRTKMEK

SEQ ID NO: 110779 - protein, 189 aa, Zea mays subsp. mays
  misc_feature (1)..(189): Ceres Seq. ID no. 15179274
  misc_feature (103)..(125): Pfam Name: MORN repeat Pfam Description: MORN repeat
  misc_feature (54)..(179): Homolog of NCBI NO: 22297733 NR Description: ORF_ID:tlr0189~hypothetical protein
  misc_feature (54)..(178): Homolog of NCBI NO: 23481997 NR Description: MORN repeat, putative [Plasmodium yoelii yoelii]
  misc_feature (54)..(179): Homolog of NCBI NO: 40062709 NR Description: MORN repeat protein [uncultured bacterium 314]
  misc_feature (54)..(180): Homolog of NCBI NO: 25404297 NR Description: hypothetical protein T7P1.4 [imported] -
  misc_feature (54)..(180): Homolog of NCBI NO: 22330351 NR Description: phosphatidylinositol-4-phosphate 5-kinase
  misc_feature (54)..(180): Homolog of NCBI NO: 40062709 NR Description: MORN repeat protein [uncultured bacterium 314]
  misc_feature (54)..(176): Homolog of NCBI NO: 29346157 NR Description: putative phosphatidylinositol-4-phosphate
  misc_feature (1)..(188): Homolog of NCBI NO: 25406404 NR Description: hypothetical protein F9E10.14 [imported] -
  misc_feature (1)..(188): Homolog of NCBI NO: 15222086 NR Description: expressed protein [Arabidopsis thaliana]
  misc_feature (1)..(188): Homolog of NCBI NO: 5882723 NR Description: F25A4.3 [Arabidopsis thaliana]
MDVCSSAITFLRNRMDRPRKRGSNSLSSRAALMLDAEREPEKTWSPIVEIHYVGGTYRGRCQEGVPEGKGRLTFSDGSFYDGLWRYGKRSGLGTLFHSNGDVYHGTWRDDLIHGKGWYYFHSGDRWFANFWKGKANGEGRFYANDGSIFFGHFRNGWRHGESLLVDANGSRWIEVWADGVLINRTKMEK

SEQ ID NO: 110780 - DNA, 1675 bp, Zea mays subsp. mays
  misc_feature (1)..(1675): Ceres Seq. ID no. 15179308
  misc_feature: MA Experiment ID: 20000487 Result: Up-regulated in Transcription
  misc_feature: MA Experiment 20000487 PARAMETER Experiment Name: Zm_50mM_NH4NO3_L_to_H_P Parameter: Organism Value: Zea mays
  misc_feature: MA Experiment 20000487 PARAMETER Experiment Name: Zm_50mM_NH4NO3_L_to_H_P Parameter: Timepoint (hr) Value: 4
  misc_feature: MA Experiment 20000487 PARAMETER Experiment Name: Zm_50mM_NH4NO3_L_to_H_P Parameter: Tissue Value: Leaves
  misc_feature: MA Experiment 20000487 PARAMETER Experiment Name: Zm_50mM_NH4NO3_L_to_H_P Parameter: Treatment Value: 50mM NH4NO3 vs. 100mM Mannitol
ttctcttacctttctcaatgtctctacctggccgaactccacacgcccgccgcctctcccgagcccggccgcccccgccacgccctcggcgccggctgcccctcccgcgcccggccgtccccgccccccgccgtggccgcccccaccgcgcccgacccccgacgtgcccagcccccgacgcccgcccccaccgaggtcgtcccgaccgccgccgctgatgccccctccacgcccgcgcccgcctcgcctggccgtccccgccctcggccccgcccgcccccattgaggtatcagcaatctctcgctgcttcgatcgatcgtagctgaaaaacatgcagcaggcagatgatacatacttttatatggctcgatttcgattgaatgcaatgcaatgatggcaacaaggaccaagctaagcaagcttatcattagcctgctcctcctctgtatctcgatctatttttatctcgtttgcaatgatggcaaggaccaagctaagaatgcatcaagcagtggccagctcgatgatccagataattcagaattgcttgctgcgtggaaatttaacgcgactccgtgctagtacgcagccaagttagatcgtcgaggccgacctgagacaagggggcagctgagctgggtactcatcacccggccccatatatgcatgtaatatactgctagctacctcaaatgcagttacactgatcaagaggacaggacagacgatctgccacataattgtaagctatatatagctaccgcagtgagttatcaccttaataagggtacgcagtgagttatcaccttaatcagaataaaattgaaacctccaaggatgccaaacttgtactcacaactgaaagccttaagcatgggctcaacatgctccaaagcatgcaaaatgataacaagagctccaaaaaatcactgaaggatgttgtcatagagaatgagtttgagaaaaggcttttggcagatgttatacctccaaatgacattggagttacctttgatgatattggagccttggagaatgtaaaggacacgttaaaggagctggtgatgctccatttgcaaagacctaagttgttctgcaaagggcagttaacaaagccttgcaaggggatattgcttttcggacctcctggcactggaaaaactatgcttgccaaagtagtagcaactgaagcaggcgctaatttcatcaatatatcaatgtcgagcattacatgtaagtggtttggtgaaggggagaagtatgtaaaggttgttttctcactagcaagtaaaatagcacccagtgttatatttattgatgaggtatgcaagcacacaagtttactttagtaaccactaccttgccgatgcatgaacaagatgacgggttagactttgtcgaaaccctcttcaacagtggaggtatcgaccatcactcttcattgtaacccgatggtgatcggcgaccgtgagcttccatgttattgtgttctgatacttgagactttttattatgactatgtatgagatattgtctcttattagtactggatgatgagatgtgtcttattatgactatggatgagacttttgtgatgtaattgatgagactatggatttaaatattgttatgtgattgtgtgtgagatgttttatatgaaaatatgttgtgctt

SEQ ID NO: 110781 - protein, 154 aa, Zea mays subsp. mays
  misc_feature (1)..(154): Ceres Seq. ID no. 15179309
  misc_feature (81)..(147): Pfam Name: ATPase family associated with various cellular Pfam Description: ATPase family associated with various cellular
  misc_feature (1)..(147): Homolog of NCBI NO: 25518408 NR Description: hypothetical protein F22D16.11 - Arabidopsis
  misc_feature (1)..(147): Homolog of NCBI NO: 15234019 NR Description: expressed protein [Arabidopsis thaliana]
  misc_feature (1)..(147): Homolog of NCBI NO: 30679158 NR Description: expressed protein [Arabidopsis thaliana]
  misc_feature (1)..(147): Homolog of NCBI NO: 20259341 NR Description: unknown protein [Arabidopsis thaliana]
  misc_feature (1)..(147): Homolog of NCBI NO: 34912822 NR Description: P0501G01.20 [Oryza sativa (japonica
  misc_feature (1)..(147): Homolog of NCBI NO: 15234347 NR Description: hypothetical protein [Arabidopsis thaliana]
  misc_feature (6)..(147): Homolog of NCBI NO: 34904204 NR Description: P0492F05.26 [Oryza sativa (japonica
  misc_feature (1)..(147): Homolog of NCBI NO: 7487016 NR Description: hypothetical protein T14P8.7 - Arabidopsis
  misc_feature (1)..(147): Homolog of NCBI NO: 33146850 NR Description: putative MSP1(mitochondrial sorting of proteins)
  misc_feature (1)..(147): Homolog of NCBI NO: 30678418 NR Description: expressed protein [Arabidopsis thaliana]
MLQSMQNDNKSSKKSLKDVVIENEFEKRLLADVIPPNDIGVTFDDIGALENVKDTLKELVMLHLQRPKLFCKGQLTKPCKGILLFGPPGTGKTMLAKVVATEAGANFINISMSSITCKWFGEGEKYVKVVFSLASKIAPSVIFIDEVCKHTSLL

SEQ ID NO: 110782 - protein, 150 aa, Zea mays subsp. mays
  misc_feature (1)..(150): Ceres Seq. ID no. 15179310
  misc_feature (77)..(143): Pfam Name: ATPase family associated with various cellular Pfam Description: ATPase family associated with various cellular
  misc_feature (2)..(143): Homolog of NCBI NO: 34904204 NR Description: P0492F05.26 [Oryza sativa (japonica
  misc_feature (1)..(143): Homolog of NCBI NO: 34912822 NR Description: P0501G01.20 [Oryza sativa (japonica
  misc_feature (1)..(143): Homolog of NCBI NO: 15234347 NR Description: hypothetical protein [Arabidopsis thaliana]
  misc_feature (1)..(143): Homolog of NCBI NO: 25518408 NR Description: hypothetical protein F22D16.11 - Arabidopsis
  misc_feature (1)..(143): Homolog of NCBI NO: 15234019 NR Description: expressed protein [Arabidopsis thaliana]
  misc_feature (1)..(143): Homolog of NCBI NO: 30679158 NR Description: expressed protein [Arabidopsis thaliana]
  misc_feature (1)..(143): Homolog of NCBI NO: 20259341 NR Description: unknown protein [Arabidopsis thaliana]
  misc_feature (1)..(143): Homolog of NCBI NO: 7487016 NR Description: hypothetical protein T14P8.7 - Arabidopsis
  misc_feature (1)..(143): Homolog of NCBI NO: 33146850 NR Description: putative MSP1(mitochondrial sorting of proteins)
  misc_feature (1)..(143): Homolog of NCBI NO: 30678418 NR Description: expressed protein [Arabidopsis thaliana]
MQNDNKSSKKSLKDVVIENEFEKRLLADVIPPNDIGVTFDDIGALENVKDTLKELVMLHLQRPKLFCKGQLTKPCKGILLFGPPGTGKTMLAKVVATEAGANFINISMSSITCKWFGEGEKYVKVVFSLASKIAPSVIFIDEVCKHTSLL

SEQ ID NO: 110783 - protein, 108 aa, Zea mays subsp. mays
  misc_feature (1)..(108): Ceres Seq. ID no. 15179311
FSYLSQCLYLAELHTPAASPEPGRPRHALGAGCPSRARPSPPPAVAAPTAPDPRRAQPPTPAPTEVVPTAAADAPSTPAPASPGRPRPRPRPPPLRYQQSLAASIDRS

SEQ ID NO: 110784 - DNA, 875 bp, Zea mays subsp. mays
  misc_feature (1)..(875): Ceres Seq. ID no. 14303245
  misc_feature: MA Experiment ID: 108504 Result: Down-regulated in Transcription
  misc_feature: MA Experiment 108504 PARAMETER Experiment Name: Zm_Drought_P Parameter: Age (day) Value: 8
  misc_feature: MA Experiment 108504 PARAMETER Experiment Name: Zm_Drought_P Parameter: Organism Value: Zea mays
  misc_feature: MA Experiment 108504 PARAMETER Experiment Name: Zm_Drought_P Parameter: Plant Line Value: 35A19
  misc_feature: MA Experiment 108504 PARAMETER Experiment Name: Zm_Drought_P Parameter: Timepoint (hr) Value: 12
  misc_feature: MA Experiment 108504 PARAMETER Experiment Name: Zm_Drought_P Parameter: Tissue Value: Aerial
  misc_feature: MA Experiment 108504 PARAMETER Experiment Name: Zm_Drought_P Parameter: Treatment Value: Drought vs. No Drought
  misc_feature: MA Experiment ID: 108556 Result: Down-regulated in Transcription
  misc_feature: MA Experiment 108556 PARAMETER Experiment Name: Zm_Drought_P Parameter: Age (day) Value: 9
  misc_feature: MA Experiment 108556 PARAMETER Experiment Name: Zm_Drought_P Parameter: Organism Value: Zea mays
  misc_feature: MA Experiment 108556 PARAMETER Experiment Name: Zm_Drought_P Parameter: Plant Line Value: 35A19
  misc_feature: MA Experiment 108556 PARAMETER Experiment Name: Zm_Drought_P Parameter: Timepoint (hr) Value: 24
  misc_feature: MA Experiment 108556 PARAMETER Experiment Name: Zm_Drought_P Parameter: Tissue Value: Aerial
  misc_feature: MA Experiment 108556 PARAMETER Experiment Name: Zm_Drought_P Parameter: Treatment Value: Drought vs. No Drought
  misc_feature: MA Experiment ID: 108689 Result: Down-regulated in Transcription
  misc_feature: MA Experiment 108689 PARAMETER Experiment Name: Zm_Drought_Roots_P Parameter: Age (day) Value: 9
  misc_feature: MA Experiment 108689 PARAMETER Experiment Name: Zm_Drought_Roots_P Parameter: Organism Value: Zea mays
  misc_feature: MA Experiment 108689 PARAMETER Experiment Name: Zm_Drought_Roots_P Parameter: Plant Line Value: 35A19
  misc_feature: MA Experiment 108689 PARAMETER Experiment Name: Zm_Drought_Roots_P Parameter: Timepoint (hr) Value: 24
  misc_feature: MA Experiment 108689 PARAMETER Experiment Name: Zm_Drought_Roots_P Parameter: Tissue Value: Roots
  misc_feature: MA Experiment 108689 PARAMETER Experiment Name: Zm_Drought_Roots_P Parameter: Treatment Value: Drought vs. No Drought
  misc_feature: MA Experiment ID: 20000477 Result: Down-regulated in Transcription
  misc_feature: MA Experiment 20000477 PARAMETER Experiment Name: Zm_5mM_SA_P Parameter: Age (day) Value: 10
  misc_feature: MA Experiment 20000477 PARAMETER Experiment Name: Zm_5mM_SA_P Parameter: Organism Value: Zea mays
  misc_feature: MA Experiment 20000477 PARAMETER Experiment Name: Zm_5mM_SA_P Parameter: Plant Line Value: 35A19
  misc_feature: MA Experiment 20000477 PARAMETER Experiment Name: Zm_5mM_SA_P Parameter: Timepoint (hr) Value: 48
  misc_feature: MA Experiment 20000477 PARAMETER Experiment Name: Zm_5mM_SA_P Parameter: Tissue Value: Aerial
  misc_feature: MA Experiment 20000477 PARAMETER Experiment Name: Zm_5mM_SA_P Parameter: Treatment Value: 5mM SA vs. No Treatment
  misc_feature: MA Experiment ID: 20000479 Result: Down-regulated in Transcription
  misc_feature: MA Experiment 20000479 PARAMETER Experiment Name: Zm_Drought_P Parameter: Age (day) Value: 10
  misc_feature: MA Experiment 20000479 PARAMETER Experiment Name: Zm_Drought_P Parameter: Organism Value: Zea mays
  misc_feature: MA Experiment 20000479 PARAMETER Experiment Name: Zm_Drought_P Parameter: Plant Line Value: 35A19
  misc_feature: MA Experiment 20000479 PARAMETER Experiment Name: Zm_Drought_P Parameter: Timepoint (hr) Value: 48
  misc_feature: MA Experiment 20000479 PARAMETER Experiment Name: Zm_Drought_P Parameter: Tissue Value: Aerial
  misc_feature: MA Experiment 20000479 PARAMETER Experiment Name: Zm_Drought_P Parameter: Treatment Value: Drought vs. No Drought
  misc_feature: MA Experiment ID: 20000480 Result: Down-regulated in Transcription
  misc_feature: MA Experiment 20000480 PARAMETER Experiment Name: Zm_Drought_P Parameter: Age (day) Value: 11
  misc_feature: MA Experiment 20000480 PARAMETER Experiment Name: Zm_Drought_P Parameter: Organism Value: Zea mays
  misc_feature: MA Experiment 20000480 PARAMETER Experiment Name: Zm_Drought_P Parameter: Plant Line Value: 35A19
  misc_feature: MA Experiment 20000480 PARAMETER Experiment Name: Zm_Drought_P Parameter: Timepoint (hr) Value: 72
  misc_feature: MA Experiment 20000480 PARAMETER Experiment Name: Zm_Drought_P Parameter: Tissue Value: Aerial
  misc_feature: MA Experiment 20000480 PARAMETER Experiment Name: Zm_Drought_P Parameter: Treatment Value: Drought vs. No Drought
atccccaatatatccccactcttcgcctcctttctggagcagctagggttccgtcctcgatccgatccgccgagtgcacaccacctttccccactccgatcgaatcgatggccgccgagggcgagaagaagatgataaccctcaaaagctccgatggcgaggagttcgaggtggaagaggcggtggcgatggagtcgcagaccatccgccacatgatcgaggatgactgcgccgacaacggtatccctcttcctaacgtcaactccaagatcctatccaaggtaatcgagtactgcaacaagcacgtacatgccgccgccgccaagagcgagtgctcgcgcagcctcttcggcggctactccgactacccgaactacatggccaacacggagtcgttccgcgccaaggcgcggtcgcagagcgcgccgaagcagaggccgcagtacgagcggtccagctccctacgcagggcgtcggcggcgcagaggtcggcggcggcggcggcctcctccctgcacgccaagttcaccaacaaggcgtacccgggctctggcaggctggatcggcttggcttgccggccaggtactgatactgagcctgcctaattcgcgtcaggatgatgtgctgccgctgtgtctcgagcgaggaggacgacgacgaagaagtgcaatcgactagtggtagttaggttcccccgtgccttggttgtgctattaccatcaacagttttttctgtttcttgctttgggtagctacccatgtttaaagttgctggtagctgtaatgatgctataatgcgtgcttaactgctgacgaacctttttcctctacatttccgtggtatatatatatgtgccgtcaaatcatgcatggg

SEQ ID NO: 110785 - protein, 195 aa, Zea mays subsp. mays
  misc_feature (1)..(195): Ceres Seq. ID no. 14303246
  misc_feature (43)..(102): Pfam Name: Skp1 family, tetramerisation domain Pfam Description: Skp1 family, tetramerisation domain
  misc_feature (42)..(106): Homolog of NCBI NO: 18400912 NR Description: E3 ubiquitin ligase SCF complex subunit SKP1/ASK1
  misc_feature (43)..(110): Homolog of NCBI NO: 4959710 NR Description: Skp1 [Medicago sativa]
  misc_feature (43)..(110): Homolog of NCBI NO: 18958257 NR Description: kinetochore protein [Brassica juncea]
  misc_feature (43)..(110): Homolog of NCBI NO: 18410982 NR Description: E3 ubiquitin ligase SCF complex subunit,
  misc_feature (43)..(121): Homolog of NCBI NO: 18958253 NR Description: kinetochore protein [Brassica juncea]
  misc_feature (43)..(121): Homolog of NCBI NO: 18958259 NR Description: kinetochore protein [Brassica juncea]
  misc_feature (40)..(107): Homolog of NCBI NO: 40644754 NR Description: putative SKP1 protein [Triticum aestivum]
  misc_feature (40)..(107): Homolog of NCBI NO: 32330695 NR Description: SKP1/ASK1-like protein [Triticum aestivum]
  misc_feature (40)..(112): Homolog of NCBI NO: 7378764 NR Description: putative kinetochore protein [Hordeum vulgare
  misc_feature (108)..(195): Homolog of NCBI NO: 38567921 NR Description: OSJNBa0088I22.17 [Oryza sativa (japonica
PQYIPTLRLLSGAARVPSSIRSAECTPPFPTPIESMAAEGEKKMITLKSSDGEEFEVEEAVAMESQTIRHMIEDDCADNGIPLPNVNSKILSKVIEYCNKHVHAAAAKSECSRSLFGGYSDYPNYMANTESFRAKARSQSAPKQRPQYERSSSLRRASAAQRSAAAAASSLHAKFTNKAYPGSGRLDRLGLPARY

SEQ ID NO: 110786 - protein, 160 aa, Zea mays subsp. mays
  misc_feature (1)..(160): Ceres Seq. ID no. 14303247
  misc_feature (8)..(67): Pfam Name: Skp1 family, tetramerisation domain Pfam Description: Skp1 family, tetramerisation domain
  misc_feature (7)..(71): Homolog of NCBI NO: 18400912 NR Description: E3 ubiquitin ligase SCF complex subunit SKP1/ASK1
  misc_feature (8)..(75): Homolog of NCBI NO: 4959710 NR Description: Skp1 [Medicago sativa]
  misc_feature (8)..(75): Homolog of NCBI NO: 18958257 NR Description: kinetochore protein [Brassica juncea]
  misc_feature (8)..(75): Homolog of NCBI NO: 18410982 NR Description: E3 ubiquitin ligase SCF complex subunit,
  misc_feature (8)..(86): Homolog of NCBI NO: 18958253 NR Description: kinetochore protein [Brassica juncea]
  misc_feature (8)..(86): Homolog of NCBI NO: 18958259 NR Description: kinetochore protein [Brassica juncea]
  misc_feature (5)..(72): Homolog of NCBI NO: 40644754 NR Description: putative SKP1 protein [Triticum aestivum]
  misc_feature (5)..(72): Homolog of NCBI NO: 32330695 NR Description: SKP1/ASK1-like protein [Triticum aestivum]
  misc_feature (5)..(77): Homolog of NCBI NO: 7378764 NR Description: putative kinetochore protein [Hordeum vulgare
  misc_feature (73)..(160): Homolog of NCBI NO: 38567921 NR Description: OSJNBa0088I22.17 [Oryza sativa (japonica
MAAEGEKKMITLKSSDGEEFEVEEAVAMESQTIRHMIEDDCADNGIPLPNVNSKILSKVIEYCNKHVHAAAAKSECSRSLFGGYSDYPNYMANTESFRAKARSQSAPKQRPQYERSSSLRRASAAQRSAAAAASSLHAKFTNKAYPGSGRLDRLGLPARY

SEQ ID NO: 110787 - protein, 152 aa, Zea mays subsp. mays
  misc_feature (1)..(152): Ceres Seq. ID no. 14303248
  misc_feature (1)..(59): Pfam Name: Skp1 family, tetramerisation domain Pfam Description: Skp1 family, tetramerisation domain
  misc_feature (1)..(63): Homolog of NCBI NO: 18400912 NR Description: E3 ubiquitin ligase SCF complex subunit SKP1/ASK1
  misc_feature (1)..(67): Homolog of NCBI NO: 4959710 NR Description: Skp1 [Medicago sativa]
  misc_feature (1)..(67): Homolog of NCBI NO: 18958257 NR Description: kinetochore protein [Brassica juncea]
  misc_feature (1)..(67): Homolog of NCBI NO: 18410982 NR Description: E3 ubiquitin ligase SCF complex subunit,
  misc_feature (1)..(78): Homolog of NCBI NO: 18958253 NR Description: kinetochore protein [Brassica juncea]
  misc_feature (1)..(78): Homolog of NCBI NO: 18958259 NR Description: kinetochore protein [Brassica juncea]
  misc_feature (1)..(64): Homolog of NCBI NO: 40644754 NR Description: putative SKP1 protein [Triticum aestivum]
  misc_feature (1)..(64): Homolog of NCBI NO: 32330695 NR Description: SKP1/ASK1-like protein [Triticum aestivum]
  misc_feature (1)..(69): Homolog of NCBI NO: 7378764 NR Description: putative kinetochore protein [Hordeum vulgare
  misc_feature (65)..(152): Homolog of NCBI NO: 38567921 NR Description: OSJNBa0088I22.17 [Oryza sativa (japonica
MITLKSSDGEEFEVEEAVAMESQTIRHMIEDDCADNGIPLPNVNSKILSKVIEYCNKHVHAAAAKSECSRSLFGGYSDYPNYMANTESFRAKARSQSAPKQRPQYERSSSLRRASAAQRSAAAAASSLHAKFTNKAYPGSGRLDRLGLPARY

SEQ ID NO: 110788 - DNA, 2007 bp, Zea mays subsp. mays
  misc_feature (1)..(2007): Ceres Seq. ID no. 12566921
atccatccatcctcctcgcggctcgcgccccgaaaaatggcgccaacccctccccagtctcccgcgcggcgctgccccagctatttccccctcccctgaattgaccccagccgcgcctcccaaaccctaacctaacccccgccccctgggccccggccatggcgtcactgcccaagccgccgccgccgccgcgccccaagacgaggggcaactacaactgcggccgctgcggccagcccaagaagggccacgtctgcgtcggccccggccccggccccggcgccgctgcgtcgccctcctcctcgtncggggccggaggggagcacgggctgcgccgcgccctctccttcgacgaggccggcacgccgtcctcgccggagaagaagcccaaggtggaggacgttcggacgaggcggagctggacgaggaggccacggtggacgtgggcgcccgcgcggtgtccagggaggtcatggcggaggttctgcaccgcctcggtccccgcggggtcatggccgccgcgggggtcagccgaggctggcgggactgcgcgggccgggtctggcgcgcggccgaggagctccgcctccgcgtcctcgcctcctctggcgccggcctcctcgccgcgctgctcccgcgctgccccgcgctctcccgcctccacctccggatggaaagtgatgttgatggcactaccctggcttgtattgcattttcctgtccaagtttaagaactcttgagattaccatggctgctgatgctgtcaacaggatgactggggaggatctaagtcgttttgtttcagagaagtcttctctctcagtcctcaaaattggtggttgctctaatttggatattcttaatctgtgctcttcaagcctttcaattctttggttgtcagatctttgttccctttcgaaatcggttatgaactgtcctaatatgagtgagctatcactgtgcttcacagaacatagtagtgattgtaccaatctgattactttgatggatggcctaggtcgtacatgtcctaacttggaaaaaatgcacatatcatcaaaacaattatctaatgaagctgtatgtgctctagagaatgctaatctcaggggactgttcatgctatccctgattctaggttcaaaaataactgatgcagctgttgcatctattgttcggtcatgtgcaagcttggaattacttgatttaagtggatctagcattagtgacaatggtgttgggatgatatgtaaagcataccctcgtactttatcaaggctgctccttgctctttgcccaaatgtgaccacacgtgggatccagctagccacagcacagttgccatgtcttcaactcatggactgtggaatgagcctatgtgctaatgtgaagaatgaaaaagagggtccatattttggtgaaatcaatggaggtattagaattattcgaaaactgtccatcttaaagaggcaacctattcaccaaaagcttattataaagcatgggaatttgaagaagctcagcctgtggggctgttctgcattagatgctctatatctaaattgtccagagttaaatgatctcaatcttaactcttgcacaaatctacatccagaacgtctgcttcttcagtgcccaaatttaaagaatgtctatgcatccggatgccaagacatgttgattggagcaatcagaaatcaggttctgaatgagttcgctgcagttgaaccatctcttccatgcaagcggctagcggatggctccaaacgggttcaactccctcagttcctaaagcagcagccgtcgaaggacaacaaattaattgaattgagccagacccagtgcactgtgcatcttggttcataataacaccaccagagccagttaacggagcattgtacaccgaattatgtgaatcatgcaccacataacattatcaattcgttgtatacttctgtattgcatcagaacctgtagtgattgttgtataagctgctaattgctgc

SEQ ID NO: 110789 - protein, 464 aa, Zea mays subsp. mays
  misc_feature (1)..(464): Ceres Seq. ID no. 12566922
  misc_feature (3)..(412): Homolog of NCBI NO: 18410106 NR Description: F-box protein family, AtFBL17; protein id:
  misc_feature (3)..(460): Homolog of NCBI NO: 18087570 NR Description: AT3g54650/T5N23_10 [Arabidopsis thaliana]
MAEVLHRLGPRGVMAAAGVSRGWRDCAGRVWRAAEELRLRVLASSGAGLLAALLPRCPALSRLHLRMESDVDGTTLACIAFSCPSLRTLEITMAADAVNRMTGEDLSRFVSEKSSLSVLKIGGCSNLDILNLCSSSLSILWLSDLCSLSKSVMNCPNMSELSLCFTEHSSDCTNLITLMDGLGRTCPNLEKMHISSKQLSNEAVCALENANLRGLFMLSLILGSKITDAAVASIVRSCASLELLDLSGSSISDNGVGMICKAYPRTLSRLLLALCPNVTTRGIQLATAQLPCLQLMDCGMSLCANVKNEKEGPYFGEINGGIRIIRKLSILKRQPIHQKLIIKHGNLKKLSLWGCSALDALYLNCPELNDLNLNSCTNLHPERLLLQCPNLKNVYASGCQDMLIGAIRNQVLNEFAAVEPSLPCKRLADGSKRVQLPQFLKQQPSKDNKLIELSQTQCTVHLGS

SEQ ID NO: 110790 - protein, 451 aa, Zea mays subsp. mays
  misc_feature (1)..(451): Ceres Seq. ID no. 12566923
  misc_feature (1)..(399): Homolog of NCBI NO: 18410106 NR Description: F-box protein family, AtFBL17; protein id:
  misc_feature (1)..(447): Homolog of NCBI NO: 18087570 NR Description: AT3g54650/T5N23_10 [Arabidopsis thaliana]
MAAAGVSRGWRDCAGRVWRAAEELRLRVLASSGAGLLAALLPRCPALSRLHLRMESDVDGTTLACIAFSCPSLRTLEITMAADAVNRMTGEDLSRFVSEKSSLSVLKIGGCSNLDILNLCSSSLSILWLSDLCSLSKSVMNCPNMSELSLCFTEHSSDCTNLITLMDGLGRTCPNLEKMHISSKQLSNEAVCALENANLRGLFMLSLILGSKITDAAVASIVRSCASLELLDLSGSSISDNGVGMICKAYPRTLSRLLLALCPNVTTRGIQLATAQLPCLQLMDCGMSLCANVKNEKEGPYFGEINGGIRIIRKLSILKRQPIHQKLIIKHGNLKKLSLWGCSALDALYLNCPELNDLNLNSCTNLHPERLLLQCPNLKNVYASGCQDMLIGAIRNQVLNEFAAVEPSLPCKRLADGSKRVQLPQFLKQQPSKDNKLIELSQTQCTVHLGS

SEQ ID NO: 110791 - protein, 398 aa, Zea mays subsp. mays
  misc_feature (1)..(398): Ceres Seq. ID no. 12566924
  misc_feature (1)..(346): Homolog of NCBI NO: 18410106 NR Description: F-box protein family, AtFBL17; protein id:
  misc_feature (1)..(394): Homolog of NCBI NO: 18087570 NR Description: AT3g54650/T5N23_10 [Arabidopsis thaliana]
MESDVDGTTLACIAFSCPSLRTLEITMAADAVNRMTGEDLSRFVSEKSSLSVLKIGGCSNLDILNLCSSSLSILWLSDLCSLSKSVMNCPNMSELSLCFTEHSSDCTNLITLMDGLGRTCPNLEKMHISSKQLSNEAVCALENANLRGLFMLSLILGSKITDAAVASIVRSCASLELLDLSGSSISDNGVGMICKAYPRTLSRLLLALCPNVTTRGIQLATAQLPCLQLMDCGMSLCANVKNEKEGPYFGEINGGIRIIRKLSILKRQPIHQKLIIKHGNLKKLSLWGCSALDALYLNCPELNDLNLNSCTNLHPERLLLQCPNLKNVYASGCQDMLIGAIRNQVLNEFAAVEPSLPCKRLADGSKRVQLPQFLKQQPSKDNKLIELSQTQCTVHLGS

SEQ ID NO: 110792 - DNA, 1778 bp, Zea mays subsp. mays
  misc_feature (1)..(1778): Ceres Seq. ID no. 15179320
atcttcccatacgagctgtgtttctccaagttcgctgctggccatatcgacgtcgtcatcctcgatccagacgagtgcgtgtgccatctccacgggtcttcgacagatttagcaagaatgtttggaagaggatctcctaggatgaacttgatccaagctgcaactatgaaaaaaatatcccccagatctactactaacaagcgcaagaagagaacatcaccaaaaggtattttgttacctattcttgcttattttcttgtaatagttggtcgtcacatgctttattttcaagaagagaacatcacatgctttattttcttgtaatagttggtcgtcttagagcaaactggaatagtggactagaaaagggtttagttgaaattcttcaagatcacaacaatgattgttataagggtcaaaatgggtggtcatcggaagcatggaatagaattgtcaagttattccatgagaaattctcttatgtcacatttacaaaatgccaaatccaagataaagagaaagagttaaagagagactacaaggctcttaaagaggcaaggcaacaaagcggggtatcatgggatgagaggttgtgtagaatagaagcagaagaacccatttggaataacctcaccactagtaacgagagacttaagaagtttcggactaaatctttcccactatttgaggctttaggagagctatatgatggaaatattgctgagggaaccatgaattttacttctattgagccttctcgacctcctgtcacacaaccttgtcaaggtgctgctacacagccttctcaagctgctttcacacttacacaaccttctcaaatcgctttcacacaaccttctctagctgctttcgcacgaccttctcgaaccgcttttagacatccttctctagccgctttcccacagccttctcaagccgcttttgcacagccttctcaaaccattttcacacagccttctgaagccactttcacacagccttctgaagccactttcacacagccttctgaagccactttcacacagccttctcaagccgctttcacacaaccttctcaagctaatatctcacaagccatttgtgatgaagatgatgagctcagagtattggatccaccagcccctgcatcagtgagcaaaagggcaaaaaatgttggtactggtaattcaagaacaagaattaacaagcgtacacaagatgggaatgtggttgagatgatgggaaggtttctagaaatgaaagaaaaacaagctgaggcggatgaaagggccacaactaatgcaaatgaggatgatttccctattcaaacatgcattgctattgtggatggaatggaagagttttctgatgatgagaaggttgattcttatgatgtttttaaggatgcccaaaaccgggccattttcatgactgccaaagatgctacgcgcataaaatggttgaggaagaagattgcaagaacatgatatgatatatgaagctaaagtaatgaaggatgattttgtagtatcgtccagcataaagaaagaaagctgcaatttgtgctattgtcagagatggatatttaactttagcaatttgcaactcttaagtaatctgttaaattaaagatgagatcttgcagacttttcttattacctaatggattctcttattagctgattcaaatctaatcatgcatattgtagtaaggactatgtatgttgaatcaatgactctggttcaattttaaatatcacatgtgttttaagtttctc

SEQ ID NO: 110793 - protein, 393 aa, Zea mays subsp. mays
  misc_feature (1)..(393): Ceres Seq. ID no. 15179321
  misc_feature (158)..(252): Pfam Name: Cornifin (SPRR) family Pfam Description: Cornifin (SPRR) family
  misc_feature (278)..(392): Homolog of NCBI NO: 21741991 NR Description: OSJNBa0060P14.2 [Oryza sativa (japonica
  misc_feature (12)..(153): Homolog of NCBI NO: 21741991 NR Description: OSJNBa0060P14.2 [Oryza sativa (japonica
  misc_feature (208)..(390): Homolog of NCBI NO: 37535088 NR Description: hypothetical protein [Oryza sativa (japonica
  misc_feature (10)..(162): Homolog of NCBI NO: 37535590 NR Description: hypothetical protein [Oryza sativa (japonica
  misc_feature (237)..(391): Homolog of NCBI NO: 37535590 NR Description: hypothetical protein [Oryza sativa (japonica
  misc_feature (341)..(387): Homolog of NCBI NO: 34907580 NR Description: B1078G07.31 [Oryza sativa (japonica
  misc_feature (12)..(150): Homolog of NCBI NO: 34907580 NR Description: B1078G07.31 [Oryza sativa (japonica
  misc_feature (85)..(178): Homolog of NCBI NO: 38344751 NR Description: OSJNBa0089K21.9 [Oryza sativa (japonica
  misc_feature (7)..(84): Homolog of NCBI NO: 38344751 NR Description: OSJNBa0089K21.9 [Oryza sativa (japonica
  misc_feature (208)..(390): Homolog of NCBI NO: 38344751 NR Description: OSJNBa0089K21.9 [Oryza sativa (japonica
MLYFLVIVGRLRANWNSGLEKGLVEILQDHNNDCYKGQNGWSSEAWNRIVKLFHEKFSYVTFTKCQIQDKEKELKRDYKALKEARQQSGVSWDERLCRIEAEEPIWNNLTTSNERLKKFRTKSFPLFEALGELYDGNIAEGTMNFTSIEPSRPPVTQPCQGAATQPSQAAFTLTQPSQIAFTQPSLAAFARPSRTAFRHPSLAAFPQPSQAAFAQPSQTIFTQPSEATFTQPSEATFTQPSEATFTQPSQAAFTQPSQANISQAICDEDDELRVLDPPAPASVSKRAKNVGTGNSRTRINKRTQDGNVVEMMGRFLEMKEKQAEADERATTNANEDDFPIQTCIAIVDGMEEFSDDEKVDSYDVFKDAQNRAIFMTAKDATRIKWLRKKIART

SEQ ID NO: 110794 - protein, 251 aa, Zea mays subsp. mays
  misc_feature (1)..(251): Ceres Seq. ID no. 15179322
  misc_feature (16)..(110): Pfam Name: Cornifin (SPRR) family Pfam Description: Cornifin (SPRR) family
  misc_feature (1)..(100): Homolog of NCBI NO: 37535236 NR Description: hypothetical protein [Oryza sativa (japonica
  misc_feature (1)..(100): Homolog of NCBI NO: 34915330 NR Description: hypothetical protein~similar to Oryza sativa
  misc_feature (136)..(250): Homolog of NCBI NO: 21741991 NR Description: OSJNBa0060P14.2 [Oryza sativa (japonica
  misc_feature (1)..(11): Homolog of NCBI NO: 21741991 NR Description: OSJNBa0060P14.2 [Oryza sativa (japonica
  misc_feature (66)..(248): Homolog of NCBI NO: 37535088 NR Description: hypothetical protein [Oryza sativa (japonica
  misc_feature (1)..(20): Homolog of NCBI NO: 37535590 NR Description: hypothetical protein [Oryza sativa (japonica
  misc_feature (95)..(249): Homolog of NCBI NO: 37535590 NR Description: hypothetical protein [Oryza sativa (japonica
  misc_feature (199)..(245): Homolog of NCBI NO: 34907580 NR Description: B1078G07.31 [Oryza sativa (japonica
  misc_feature (1)..(36): Homolog of NCBI NO: 38344751 NR Description: OSJNBa0089K21.9 [Oryza sativa (japonica
  misc_feature (66)..(248): Homolog of NCBI NO: 38344751 NR Description: OSJNBa0089K21.9 [Oryza sativa (japonica
MNFTSIEPSRPPVTQPCQGAATQPSQAAFTLTQPSQIAFTQPSLAAFARPSRTAFRHPSLAAFPQPSQAAFAQPSQTIFTQPSEATFTQPSEATFTQPSEATFTQPSQAAFTQPSQANISQAICDEDDELRVLDPPAPASVSKRAKNVGTGNSRTRINKRTQDGNVVEMMGRFLEMKEKQAEADERATTNANEDDFPIQTCIAIVDGMEEFSDDEKVDSYDVFKDAQNRAIFMTAKDATRIKWLRKKIART

SEQ ID NO: 110795 - DNA, 612 bp, Zea mays subsp. mays
  misc_feature (1)..(612): Ceres Seq. ID no. 12483999
aggccaccaaaggtaccttgcaatcacaacgaacagaagctctcgatctcaccgacaccgaggaagaagagatcaatggcgtccgagcagggagtcgtgatcgcgtgccacagcaaggctgagttcgacgcccacatgaccaaggcccaggaagccggcaagctggtggtcatcgacttcactgccgcctggtgcggtccatgccgcgccatcgccccactgttcgtcgaacacgccaagaagttcactcaggtcgtcttcctgaaggtggacgtggacgaagtgaaggaagtcaccgcggcctacgaggtcgaggcgatgccgaccttccacttcgtcaagaacggcaagacggtcgcgaccatcgtgggtgccaggaaggacgagctcctggcccagatcgagaagcatgccgcgcctgcgcctgcgtctgcgtctgcctaaaggagatcagtcgtcgccgtcaataagggccagcacgtatggctgtaaatgttgtcgttatcagttctggctttgtcgtttgtgggcgattgtgaactagtagtatgtttgtttctatccgagccggaggcgatacttanccatggatacttgttgtnagttcgttcc

SEQ ID NO: 110796 - protein, 147 aa, Zea mays subsp. mays
  misc_feature (1)..(147): Ceres Seq. ID no. 12484000
  misc_feature (27)..(139): Homolog of NCBI NO: 12082335 NR Description: thioredoxin h [Oryza sativa (japonica
  misc_feature (28)..(138): Homolog of NCBI NO: 11135312 NR Description: Thioredoxin H-type (TRX-H)
  misc_feature (28)..(147): Homolog of NCBI NO: 16588843 NR Description: thioredoxin H [Prunus persica]
  misc_feature (27)..(143): Homolog of NCBI NO: 13624884 NR Description: thioredoxin h [Pisum sativum]
  misc_feature (27)..(139): Homolog of NCBI NO: 33621084 NR Description: thioredoxin H3 [Ipomoea batatas]
  misc_feature (26)..(139): Homolog of NCBI NO: 15230385 NR Description: thioredoxin h; protein id: At3g51030.1, supported
  misc_feature (27)..(147): Homolog of NCBI NO: 40287476 NR Description: thioredoxin [Capsicum annuum]
  misc_feature (27)..(145): Homolog of NCBI NO: 267124 NR Description: Thioredoxin H-type 1 (TRX-H1)
  misc_feature (26)..(134): Homolog of NCBI NO: 27461140 NR Description: thioredoxin H [Triticum aestivum]
  misc_feature (26)..(147): Homolog of NCBI NO: 3915131 NR Description: Thioredoxin H-type (TRX-H) (Phloem sap 13 kDa
RPPKVPCNHNEQKLSISPTPRKKRSMASEQGVVIACHSKAEFDAHMTKAQEAGKLVVIDFTAAWCGPCRAIAPLFVEHAKKFTQVVFLKVDVDEVKEVTAAYEVEAMPTFHFVKNGKTVATIVGARKDELLAQIEKHAAPAPASASA

SEQ ID NO: 110797 - protein, 122 aa, Zea mays subsp. mays
  misc_feature (1)..(122): Ceres Seq. ID no. 12484001
  misc_feature (2)..(114): Homolog of NCBI NO: 12082335 NR Description: thioredoxin h [Oryza sativa (japonica
  misc_feature (3)..(113): Homolog of NCBI NO: 11135312 NR Description: Thioredoxin H-type (TRX-H)
  misc_feature (3)..(122): Homolog of NCBI NO: 16588843 NR Description: thioredoxin H [Prunus persica]
  misc_feature (2)..(118): Homolog of NCBI NO: 13624884 NR Description: thioredoxin h [Pisum sativum]
  misc_feature (2)..(114): Homolog of NCBI NO: 33621084 NR Description: thioredoxin H3 [Ipomoea batatas]
  misc_feature (1)..(114): Homolog of NCBI NO: 15230385 NR Description: thioredoxin h; protein id: At3g51030.1, supported
  misc_feature (2)..(122): Homolog of NCBI NO: 40287476 NR Description: thioredoxin [Capsicum annuum]
  misc_feature (2)..(120): Homolog of NCBI NO: 267124 NR Description: Thioredoxin H-type 1 (TRX-H1)
  misc_feature (1)..(109): Homolog of NCBI NO: 27461140 NR Description: thioredoxin H [Triticum aestivum]
  misc_feature (1)..(122): Homolog of NCBI NO: 3915131 NR Description: Thioredoxin H-type (TRX-H) (Phloem sap 13 kDa
MASEQGVVIACHSKAEFDAHMTKAQEAGKLVVIDFTAAWCGPCRAIAPLFVEHAKKFTQVVFLKVDVDEVKEVTAAYEVEAMPTFHFVKNGKTVATIVGARKDELLAQIEKHAAPAPASASA

SEQ ID NO: 110798 - protein, 102 aa, Zea mays subsp. mays
  misc_feature (1)..(102): Ceres Seq. ID no. 12484002
  misc_feature (1)..(94): Homolog of NCBI NO: 12082335 NR Description: thioredoxin h [Oryza sativa (japonica
  misc_feature (1)..(93): Homolog of NCBI NO: 11135312 NR Description: Thioredoxin H-type (TRX-H)
  misc_feature (1)..(102): Homolog of NCBI NO: 16588843 NR Description: thioredoxin H [Prunus persica]
  misc_feature (1)..(98): Homolog of NCBI NO: 13624884 NR Description: thioredoxin h [Pisum sativum]
  misc_feature (1)..(94): Homolog of NCBI NO: 33621084 NR Description: thioredoxin H3 [Ipomoea batatas]
  misc_feature (1)..(94): Homolog of NCBI NO: 15230385 NR Description: thioredoxin h; protein id: At3g51030.1, supported
  misc_feature (1)..(102): Homolog of NCBI NO: 40287476 NR Description: thioredoxin [Capsicum annuum]
  misc_feature (1)..(100): Homolog of NCBI NO: 267124 NR Description: Thioredoxin H-type 1 (TRX-H1)
  misc_feature (1)..(89): Homolog of NCBI NO: 27461140 NR Description: thioredoxin H [Triticum aestivum]
  misc_feature (1)..(102): Homolog of NCBI NO: 3915131 NR Description: Thioredoxin H-type (TRX-H) (Phloem sap 13 kDa
MTKAQEAGKLVVIDFTAAWCGPCRAIAPLFVEHAKKFTQVVFLKVDVDEVKEVTAAYEVEAMPTFHFVKNGKTVATIVGARKDELLAQIEKHAAPAPASASA

SEQ ID NO: 110799 - DNA, 823 bp, Zea mays subsp. mays
  misc_feature (1)..(823): Ceres Seq. ID no. 15175556
aagcgaggcggcggccccgcgttctccgtctccgtctccgtccgcccggcgtaaagaaaagcctccctcaccacagccgccacgccatggccgaggagaccgacaccaggcctgcctccgcgagctcccgaggccgccccgcgcccgaggacgacgacagggaggagggcgagatcaccgacatcgcctgcgctccttccccgcccgccacgcacccgctcgagcactcctggaccttctggttcgacaacccgcagagcaagtccaagcaggccgcctgggggagctccatccgcccaatacacaccttctccaccgtcgaggaattctgggggctttacaataacattaatcaccctagcaaattgatcgtgggagctgatttccattgcttcaagaacaagatcgagccaaaatgggaagaccctatttgtgcgaatggtggtaaaggtgtgtattgggcggatggagctcgacggccgcaacatcaccgttaacgaggcccagtcccgcggcggccgtggaggcggcggtggcggatacggtggcgggcgccgtgatggaggcggctacggcggtggcggtggaggctacggcggtggtcgtggaggctacggcggcggtgggggatacggtggtgcaaaccgcggcggcggctacggcaacaacgacgggaactggaggaactgagcggtggggtccgctgaggcctagttatcttgttcgcttctgctaccgtgttcaccctagtctagagggggtttatcttcgtctgtggtcgtctcgtgtccgtatgtttcgtttcgtgttcgttgttgttgtt

SEQ ID NO: 110800 - protein, 164 aa, Zea mays subsp. mays
  misc_feature (1)..(164): Ceres Seq. ID no. 15175557
  misc_feature (29)..(149): Pfam Name: Eukaryotic initiation factor 4E Pfam Description: Eukaryotic initiation factor 4E
  misc_feature (50)..(148): Homolog of NCBI NO: 7862169 NR Description: eIF4E [Lycopersicon esculentum]
  misc_feature (49)..(149): Homolog of NCBI NO: 37813067 NR Description: eukaryotic translation initiation factor 4E
  misc_feature (28)..(148): Homolog of NCBI NO: 38565045 NR Description: eukaryotic translation initiation factor 4E
  misc_feature (28)..(148): Homolog of NCBI NO: 25176246 NR Description: eucaryotic initiation factor 4E [Capsicum annuum]
  misc_feature (28)..(148): Homolog of NCBI NO: 25176244 NR Description: eucaryotic initiation factor 4E [Capsicum annuum]
  misc_feature (55)..(149): Homolog of NCBI NO: 283021 NR Description: translation initiation factor eIF-4F chain p26 -
  misc_feature (28)..(148): Homolog of NCBI NO: 25176242 NR Description: eucaryotic initiation factor 4E [Capsicum annuum]
  misc_feature (29)..(149): Homolog of NCBI NO: 30923212 NR Description: Eukaryotic translation initiation factor 4E (eIF4E) (mRNA cap-binding protein) (eIF-4F 25 kDa subunit)
  misc_feature (29)..(152): Homolog of NCBI NO: 34905982 NR Description: eukaryotic translation initiation factor 4E
  misc_feature (29)..(149): Homolog of NCBI NO: 6016334 NR Description: EUKARYOTIC TRANSLATION INITIATION FACTOR 4E (EIF4E) (MRNA CAP-BINDING PROTEIN) (EIF-4F 25 KD SUBUNIT) (EIF-4F
ARRRPRVLRLRLRPPGVKKSLPHHSRHAMAEETDTRPASASSRGRPAPEDDDREEGEITDIACAPSPPATHPLEHSWTFWFDNPQSKSKQAAWGSSIRPIHTFSTVEEFWGLYNNINHPSKLIVGADFHCFKNKIEPKWEDPICANGGKGVYWADGARRPQHHR

SEQ ID NO: 110801 - protein, 136 aa, Zea mays subsp. mays
  misc_feature (1)..(136): Ceres Seq. ID no. 15175558
  misc_feature (1)..(121): Pfam Name: Eukaryotic initiation factor 4E Pfam Description: Eukaryotic initiation factor 4E
  misc_feature (22)..(120): Homolog of NCBI NO: 7862169 NR Description: eIF4E [Lycopersicon esculentum]
  misc_feature (21)..(121): Homolog of NCBI NO: 37813067 NR Description: eukaryotic translation initiation factor 4E
  misc_feature (1)..(120): Homolog of NCBI NO: 38565045 NR Description: eukaryotic translation initiation factor 4E
  misc_feature (1)..(120): Homolog of NCBI NO: 25176246 NR Description: eucaryotic initiation factor 4E [Capsicum annuum]
  misc_feature (1)..(120): Homolog of NCBI NO: 25176244 NR Description: eucaryotic initiation factor 4E [Capsicum annuum]
  misc_feature (27)..(121): Homolog of NCBI NO: 283021 NR Description: translation initiation factor eIF-4F chain p26 -
  misc_feature (1)..(120): Homolog of NCBI NO: 25176242 NR Description: eucaryotic initiation factor 4E [Capsicum annuum]
  misc_feature (1)..(121): Homolog of NCBI NO: 30923212 NR Description: Eukaryotic translation initiation factor 4E (eIF4E) (mRNA cap-binding protein) (eIF-4F 25 kDa subunit)
  misc_feature (1)..(124): Homolog of NCBI NO: 34905982 NR Description: eukaryotic translation initiation factor 4E
  misc_feature (1)..(121): Homolog of NCBI NO: 6016334 NR Description: EUKARYOTIC TRANSLATION INITIATION FACTOR 4E (EIF4E) (MRNA CAP-BINDING PROTEIN) (EIF-4F 25 KD SUBUNIT) (EIF-4F
MAEETDTRPASASSRGRPAPEDDDREEGEITDIACAPSPPATHPLEHSWTFWFDNPQSKSKQAAWGSSIRPIHTFSTVEEFWGLYNNINHPSKLIVGADFHCFKNKIEPKWEDPICANGGKGVYWADGARRPQHHR

SEQ ID NO: 110802 - protein, 114 aa, Zea mays subsp. mays
  misc_feature (1)..(114): Ceres Seq. ID no. 15175559
SEAAAPRSPSPSPSARRKEKPPSPQPPRHGRGDRHQACLRELPRPPRARGRRQGGGRDHRHRLRSFPARHAPARALLDLLVRQPAEQVQAGRLGELHPPNTHLLHRRGILGALQ

SEQ ID NO: 110803 - DNA, 575 bp, Zea mays subsp. mays
  misc_feature (1)..(575): Ceres Seq. ID no. 15175988
tccaacctacccagcctcggccagccacctccccgtcgctctcacgctcttcgtgcccgccgcctcccctcttcccctccacctcactcctcccgtctgacgcacatggcctccatcgccggatcttccgctctctccttcgccatgcctgtcaaggcaatcaactcaaattctctagccttctccccggtgaggaagggtaacacattcctccgcctgcaaccagtgcctatgagatctgtttcctgcgctgccaagaaggatacggtggacacgttcatgagcgtgtactacaagtccaagaaggggcgcaagacggagaaggaggtgcaggaggcggaggcggccatactggagccggcctacgcggacgaggaggcctaaaagctcgtggtcgttttgcttagcccattttaattagaacttgatggatgtagtgtgtgtctgtctcaagtcattttaattagaactcttaaagctcgtggtcggtcggtcagtcagtcagtcattgtcgttgatgtccagcgttgtgttttttttatattctctaatggaatctctcagattgattcggc

SEQ ID NO: 110804 - protein, 127 aa, Zea mays subsp. mays
  misc_feature (1)..(127): Ceres Seq. ID no. 15175989
  misc_feature (83)..(126): Homolog of NCBI NO: 602302 NR Description: diminuto
  misc_feature (83)..(124): Homolog of NCBI NO: 13194621 NR Description: brassinosteroid biosynthetic protein LKB [Pisum
  misc_feature (83)..(126): Homolog of NCBI NO: 19698879 NR Description: unknown protein [Arabidopsis thaliana]
  misc_feature (86)..(126): Homolog of NCBI NO: 21326148 NR Description: ovule/fiber cell elongation protein Ghfe1
  misc_feature (83)..(126): Homolog of NCBI NO: 15230955 NR Description: cell elongation protein (DWARF1) (DIMINUTO) (DIM)
  misc_feature (36)..(110): Homolog of NCBI NO: 113169 NR Description: Acyl carrier protein II, chloroplast precursor
  misc_feature (83)..(125): Homolog of NCBI NO: 37534052 NR Description: putative Cell elongation protein DIMINUTO (Cell
  misc_feature (36)..(99): Homolog of NCBI NO: 113172 NR Description: Acyl carrier protein III, chloroplast precursor
  misc_feature (48)..(99): Homolog of NCBI NO: 7442270 NR Description: acyl carrier protein - maize
SNLPSLGQPPPRRSHALRARRLPSSPPPHSSRLTHMASIAGSSALSFAMPVKAINSNSLAFSPVRKGNTFLRLQPVPMRSVSCAAKKDTVDTFMSVYYKSKKGRKTEKEVQEAEAAILEPAYADEEA

SEQ ID NO: 110805 - protein, 92 aa, Zea mays subsp. mays
  misc_feature (1)..(92): Ceres Seq. ID no. 15175990
  misc_feature (48)..(91): Homolog of NCBI NO: 602302 NR Description: diminuto
  misc_feature (48)..(89): Homolog of NCBI NO: 13194621 NR Description: brassinosteroid biosynthetic protein LKB [Pisum
  misc_feature (48)..(91): Homolog of NCBI NO: 19698879 NR Description: unknown protein [Arabidopsis thaliana]
  misc_feature (51)..(91): Homolog of NCBI NO: 21326148 NR Description: ovule/fiber cell elongation protein Ghfe1
  misc_feature (48)..(91): Homolog of NCBI NO: 15230955 NR Description: cell elongation protein (DWARF1) (DIMINUTO) (DIM)
  misc_feature (1)..(75): Homolog of NCBI NO: 113169 NR Description: Acyl carrier protein II, chloroplast precursor
  misc_feature (48)..(90): Homolog of NCBI NO: 37534052 NR Description: putative Cell elongation protein DIMINUTO (Cell
  misc_feature (1)..(64): Homolog of NCBI NO: 113172 NR Description: Acyl carrier protein III, chloroplast precursor
  misc_feature (13)..(64): Homolog of NCBI NO: 7442270 NR Description: acyl carrier protein - maize
MASIAGSSALSFAMPVKAINSNSLAFSPVRKGNTFLRLQPVPMRSVSCAAKKDTVDTFMSVYYKSKKGRKTEKEVQEAEAAILEPAYADEEA

SEQ ID NO: 110806 - protein, 79 aa, Zea mays subsp. mays
  misc_feature (1)..(79): Ceres Seq. ID no. 15175991
  misc_feature (35)..(78): Homolog of NCBI NO: 602302 NR Description: diminuto
  misc_feature (35)..(76): Homolog of NCBI NO: 13194621 NR Description: brassinosteroid biosynthetic protein LKB [Pisum
  misc_feature (35)..(78): Homolog of NCBI NO: 19698879 NR Description: unknown protein [Arabidopsis thaliana]
  misc_feature (38)..(78): Homolog of NCBI NO: 21326148 NR Description: ovule/fiber cell elongation protein Ghfe1
  misc_feature (35)..(78): Homolog of NCBI NO: 15230955 NR Description: cell elongation protein (DWARF1) (DIMINUTO) (DIM)
  misc_feature (1)..(62): Homolog of NCBI NO: 113169 NR Description: Acyl carrier protein II, chloroplast precursor
  misc_feature (35)..(77): Homolog of NCBI NO: 37534052 NR Description: putative Cell elongation protein DIMINUTO (Cell
  misc_feature (1)..(51): Homolog of NCBI NO: 113172 NR Description: Acyl carrier protein III, chloroplast precursor
  misc_feature (1)..(51): Homolog of NCBI NO: 7442270 NR Description: acyl carrier protein - maize
MPVKAINSNSLAFSPVRKGNTFLRLQPVPMRSVSCAAKKDTVDTFMSVYYKSKKGRKTEKEVQEAEAAILEPAYADEEA

SEQ ID NO: 110807 - DNA, 568 bp, Zea mays subsp. mays
  misc_feature (1)..(568): Ceres Seq. ID no. 12634179
  misc_feature: MA Experiment ID: 108503 Result: Up-regulated in Transcription
  misc_feature: MA Experiment 108503 PARAMETER Experiment Name: Zm_Drought_P Parameter: Age (day) Value: 8
  misc_feature: MA Experiment 108503 PARAMETER Experiment Name: Zm_Drought_P Parameter: Organism Value: Zea mays
  misc_feature: MA Experiment 108503 PARAMETER Experiment Name: Zm_Drought_P Parameter: Plant Line Value: 35A19
  misc_feature: MA Experiment 108503 PARAMETER Experiment Name: Zm_Drought_P Parameter: Timepoint (hr) Value: 6
  misc_feature: MA Experiment 108503 PARAMETER Experiment Name: Zm_Drought_P Parameter: Tissue Value: Aerial
  misc_feature: MA Experiment 108503 PARAMETER Experiment Name: Zm_Drought_P Parameter: Treatment Value: Drought vs. No Drought
  misc_feature: MA Experiment ID: 108504 Result: Up-regulated in Transcription
  misc_feature: MA Experiment 108504 PARAMETER Experiment Name: Zm_Drought_P Parameter: Age (day) Value: 8
  misc_feature: MA Experiment 108504 PARAMETER Experiment Name: Zm_Drought_P Parameter: Organism Value: Zea mays
  misc_feature: MA Experiment 108504 PARAMETER Experiment Name: Zm_Drought_P Parameter: Plant Line Value: 35A19
  misc_feature: MA Experiment 108504 PARAMETER Experiment Name: Zm_Drought_P Parameter: Timepoint (hr) Value: 12
  misc_feature: MA Experiment 108504 PARAMETER Experiment Name: Zm_Drought_P Parameter: Tissue Value: Aerial
  misc_feature: MA Experiment 108504 PARAMETER Experiment Name: Zm_Drought_P Parameter: Treatment Value: Drought vs. No Drought
  misc_feature: MA Experiment ID: 108539 Result: Up-regulated in Transcription
  misc_feature: MA Experiment 108539 PARAMETER Experiment Name: Zm_20percent_PEG_P Parameter: Age (day) Value: 8
  misc_feature: MA Experiment 108539 PARAMETER Experiment Name: Zm_20percent_PEG_P Parameter: Organism Value: Zea mays
  misc_feature: MA Experiment 108539 PARAMETER Experiment Name: Zm_20percent_PEG_P Parameter: Plant Line Value: 35A19
  misc_feature: MA Experiment 108539 PARAMETER Experiment Name: Zm_20percent_PEG_P Parameter: Timepoint (hr) Value: 1
  misc_feature: MA Experiment 108539 PARAMETER Experiment Name: Zm_20percent_PEG_P Parameter: Tissue Value: Aerial
  misc_feature: MA Experiment 108539 PARAMETER Experiment Name: Zm_20percent_PEG_P Parameter: Treatment Value: 20percent PEG vs. No Treatment
  misc_feature: MA Experiment ID: 108540 Result: Up-regulated in Transcription
  misc_feature: MA Experiment 108540 PARAMETER Experiment Name: Zm_20percent_PEG_P Parameter: Age (day) Value: 8
  misc_feature: MA Experiment 108540 PARAMETER Experiment Name: Zm_20percent_PEG_P Parameter: Organism Value: Zea mays
  misc_feature: MA Experiment 108540 PARAMETER Experiment Name: Zm_20percent_PEG_P Parameter: Plant Line Value: 35A19
  misc_feature: MA Experiment 108540 PARAMETER Experiment Name: Zm_20percent_PEG_P Parameter: Timepoint (hr) Value: 6
  misc_feature: MA Experiment 108540 PARAMETER Experiment Name: Zm_20percent_PEG_P Parameter: Tissue Value: Aerial
  misc_feature: MA Experiment 108540 PARAMETER Experiment Name: Zm_20percent_PEG_P Parameter: Treatment Value: 20percent PEG vs. No Treatment
  misc_feature: MA Experiment ID: 108547 Result: Up-regulated in Transcription
  misc_feature: MA Experiment 108547 PARAMETER Experiment Name: Zm_Imbibed_Seeds_P Parameter: Age (day) Value: 4 vs. 2
  misc_feature: MA Experiment 108547 PARAMETER Experiment Name: Zm_Imbibed_Seeds_P Parameter: Organism Value: Zea mays
  misc_feature: MA Experiment 108547 PARAMETER Experiment Name: Zm_Imbibed_Seeds_P Parameter: Plant Line Value: 35A19
  misc_feature: MA Experiment 108547 PARAMETER Experiment Name: Zm_Imbibed_Seeds_P Parameter: Tissue Value: Aerial vs. Embryo
  misc_feature: MA Experiment ID: 108556 Result: Up-regulated in Transcription
  misc_feature: MA Experiment 108556 PARAMETER Experiment Name: Zm_Drought_P Parameter: Age (day) Value: 9
  misc_feature: MA Experiment 108556 PARAMETER Experiment Name: Zm_Drought_P Parameter: Organism Value: Zea mays
  misc_feature: MA Experiment 108556 PARAMETER Experiment Name: Zm_Drought_P Parameter: Plant Line Value: 35A19
  misc_feature: MA Experiment 108556 PARAMETER Experiment Name: Zm_Drought_P Parameter: Timepoint (hr) Value: 24
  misc_feature: MA Experiment 108556 PARAMETER Experiment Name: Zm_Drought_P Parameter: Tissue Value: Aerial
  misc_feature: MA Experiment 108556 PARAMETER Experiment Name: Zm_Drought_P Parameter: Treatment Value: Drought vs. No Drought
  misc_feature: MA Experiment ID: 108597 Result: Up-regulated in Transcription
  misc_feature: MA Experiment 108597 PARAMETER Experiment Name: Zm_100uM_ABA_P Parameter: Age (day) Value: 9
  misc_feature: MA Experiment 108597 PARAMETER Experiment Name: Zm_100uM_ABA_P Parameter: Organism Value: Zea mays
  misc_feature: MA Experiment 108597 PARAMETER Experiment Name: Zm_100uM_ABA_P Parameter: Plant Line Value: 35A19
  misc_feature: MA Experiment 108597 PARAMETER Experiment Name: Zm_100uM_ABA_P Parameter: Timepoint (hr) Value: 24
  misc_feature: MA Experiment 108597 PARAMETER Experiment Name: Zm_100uM_ABA_P Parameter: Tissue Value: Aerial
  misc_feature: MA Experiment 108597 PARAMETER Experiment Name: Zm_100uM_ABA_P Parameter: Treatment Value: 100uM ABA vs. No Treatment
  misc_feature: MA Experiment ID: 20000478 Result: Up-regulated in Transcription
  misc_feature: MA Experiment 20000478 PARAMETER Experiment Name: Zm_5mM_SA_P Parameter: Age (day) Value: 11
  misc_feature: MA Experiment 20000478 PARAMETER Experiment Name: Zm_5mM_SA_P Parameter: Organism Value: Zea mays
  misc_feature: MA Experiment 20000478 PARAMETER Experiment Name: Zm_5mM_SA_P Parameter: Plant Line Value: 35A19
  misc_feature: MA Experiment 20000478 PARAMETER Experiment Name: Zm_5mM_SA_P Parameter: Timepoint (hr) Value: 72
  misc_feature: MA Experiment 20000478 PARAMETER Experiment Name: Zm_5mM_SA_P Parameter: Tissue Value: Aerial
  misc_feature: MA Experiment 20000478 PARAMETER Experiment Name: Zm_5mM_SA_P Parameter: Treatment Value: 5mM SA vs. No Treatment
  misc_feature: MA Experiment ID: 20000479 Result: Up-regulated in Transcription
  misc_feature: MA Experiment 20000479 PARAMETER Experiment Name: Zm_Drought_P Parameter: Age (day) Value: 10
  misc_feature: MA Experiment 20000479 PARAMETER Experiment Name: Zm_Drought_P Parameter: Organism Value: Zea mays
  misc_feature: MA Experiment 20000479 PARAMETER Experiment Name: Zm_Drought_P Parameter: Plant Line Value: 35A19
  misc_feature: MA Experiment 20000479 PARAMETER Experiment Name: Zm_Drought_P Parameter: Timepoint (hr) Value: 48
  misc_feature: MA Experiment 20000479 PARAMETER Experiment Name: Zm_Drought_P Parameter: Tissue Value: Aerial
  misc_feature: MA Experiment 20000479 PARAMETER Experiment Name: Zm_Drought_P Parameter: Treatment Value: Drought vs. No Drought
  misc_feature: MA Experiment ID: 20000480 Result: Up-regulated in Transcription
  misc_feature: MA Experiment 20000480 PARAMETER Experiment Name: Zm_Drought_P Parameter: Age (day) Value: 11
  misc_feature: MA Experiment 20000480 PARAMETER Experiment Name: Zm_Drought_P Parameter: Organism Value: Zea mays
  misc_feature: MA Experiment 20000480 PARAMETER Experiment Name: Zm_Drought_P Parameter: Plant Line Value: 35A19
  misc_feature: MA Experiment 20000480 PARAMETER Experiment Name: Zm_Drought_P Parameter: Timepoint (hr) Value: 72
  misc_feature: MA Experiment 20000480 PARAMETER Experiment Name: Zm_Drought_P Parameter: Tissue Value: Aerial
  misc_feature: MA Experiment 20000480 PARAMETER Experiment Name: Zm_Drought_P Parameter: Treatment Value: Drought vs. No Drought
atttcccatctctctctgcgccgtcccgtgctccctccgctagttctcccaattccttccccacctcctcggtcgtcgcctcccccagagagcaggagccgcctcgtccctgccggtcccgaccccgacccccatcccgtccgcgtccaacgccatgaatcccgagtacgactacctcttcaagctgctcctcatcggggactccggtgttgggaagtcttgcctgctgctgaggtttgcggatgattcatggcgttggacgggacgggacggaacggaagcctacgatcgactgtacatacaggggttgggacttgggagggagctcgggttcttgttgggttttcctttgggtggagagcgagggagcgcagtcgagagccagcgagcagtctctcgtgcagtgcagtgcagtgcagtgcagctccggcgtagatgagattgtattgtgaccaagccgggagggaaagcagggaggggaggacaaagatgttttgtcacgtttcaggctccggccatcgccggagtttgtccggggaatatatcgatttcctacagaaatccgcgc

SEQ ID NO: 110808 - protein, 94 aa, Zea mays subsp. mays
  misc_feature (1)..(94): Ceres Seq. ID no. 12634180
  misc_feature (1)..(33): Homolog of NCBI NO: 730510 NR Description: RAS-RELATED PROTEIN RIC1
  misc_feature (1)..(33): Homolog of NCBI NO: 466172 NR Description: GTP-BINDING PROTEIN YPTM2
  misc_feature (1)..(33): Homolog of NCBI NO: 303750 NR Description: GTP-binding protein [Pisum sativum]
  misc_feature (1)..(33): Homolog of NCBI NO: 303732 NR Description: GTP-binding protein [Pisum sativum]
  misc_feature (1)..(33): Homolog of NCBI NO: 39588485 NR Description: Hypothetical protein CBG01077 [Caenorhabditis
  misc_feature (1)..(33): Homolog of NCBI NO: 17558550 NR Description: RAB family RAB-1 (22.5 kD) (rab-1)
  misc_feature (1)..(33): Homolog of NCBI NO: 1619841 NR Description: rab1-like [Caenorhabditis elegans]
  misc_feature (1)..(33): Homolog of NCBI NO: 5902803 NR Description: Ras-related protein ARA-5
  misc_feature (1)..(33): Homolog of NCBI NO: 34906164 NR Description: putative GTP-binding protein
  misc_feature (1)..(94): Homolog of NCBI NO: 4886443 NR Description: hypothetical protein [Homo sapiens]
MNPEYDYLFKLLLIGDSGVGKSCLLLRFADDSWRWTGRDGTEAYDRLYIQGLGLGRELGFLLGFPLGGERGSAVESQRAVSRAVQCSAVQLRRR

SEQ ID NO: 110809 - protein, 81 aa, Zea mays subsp. mays
  misc_feature (1)..(81): Ceres Seq. ID no. 12634181
ISHLSLRRPVLPPLVLPIPSPPPRSSPPPESRSRLVPAGPDPDPHPVRVQRHESRVRLPLQAAPHRGLRCWEVLPAAEVCG

SEQ ID NO: 110810 - protein, 69 aa, Zea mays subsp. mays
  misc_feature (1)..(69): Ceres Seq. ID no. 12634182
MIHGVGRDGTERKPTIDCTYRGWDLGGSSGSCWVFLWVESEGAQSRASEQSLVQCSAVQCSSGVDEIVL

SEQ ID NO: 110811 - DNA, 553 bp, Zea mays subsp. mays
  misc_feature (1)..(553): Ceres Seq. ID no. 12783705
aactcgcaattccgcattcgttccaactcctgagcactttctcctcgtcccagacaagccaatcgaagccgagatacgaccatggactccaccggcaccggagcagggggtaaggggaagaagggagcggccgggcgcaaggtcggcgggccaaggaagaagtcggtgtcgaggtccgtgaaggccggtctccagttccccgtcggccgcatcgggcgccgcgcccgccgcgctcctcttctccctcctcgcctactacctccactaagcgtgtgcgtgcttacgtacgcgcgcatggacgacgatggatccgtccaccgttgccattgcagttgcctcgctcgttcttggtgactgttgctgcggtggtcgacttggaagacgtcacctgcaccgctgtttccatatattattattgatgtgatctgatatgaatatatatgcatggtgacgggttgtgttaattacatagacgtgatttaatttatctatttgtgtcaagtcgttctgtaatcatgcgatgaaatatatgatttggttttccatttgtttg

SEQ ID NO: 110812 - protein, 90 aa, Zea mays subsp. mays
  misc_feature (1)..(90): Ceres Seq. ID no. 12783706
  misc_feature (9)..(50): Homolog of NCBI NO: 121974 NR Description: HISTONE H2A.2.1
  misc_feature (11)..(50): Homolog of NCBI NO: 122003 NR Description: HISTONE H2A
  misc_feature (8)..(46): Homolog of NCBI NO: 27529852 NR Description: H2A histone [Nicotiana tabacum]
  misc_feature (8)..(50): Homolog of NCBI NO: 15241857 NR Description: putative protein
  misc_feature (9)..(46): Homolog of NCBI NO: 7649159 NR Description: histone H2A [Euphorbia esula]
  misc_feature (8)..(46): Homolog of NCBI NO: 729669 NR Description: Histone H2A
  misc_feature (10)..(50): Homolog of NCBI NO: 122007 NR Description: Histone H2A
  misc_feature (8)..(46): Homolog of NCBI NO: 122006 NR Description: HISTONE H2A
  misc_feature (1)..(50): Homolog of NCBI NO: 34914498 NR Description: putative histone H2A [Oryza sativa (japonica
  misc_feature (1)..(50): Homolog of NCBI NO: 729671 NR Description: Histone H2A
MDSTGTGAGGKGKKGAAGRKVGGPRKKSVSRSVKAGLQFPVGRIGRRARRAPLLPPRLLPPLSVCVLTYARMDDDGSVHRCHCSCLARSW

SEQ ID NO: 110813 - protein, 59 aa, Zea mays subsp. mays
  misc_feature (1)..(59): Ceres Seq. ID no. 12783707
TRNSAFVPTPEHFLLVPDKPIEAEIRPWTPPAPEQGVRGRRERPGARSAGQGRSRCRGP

SEQ ID NO: 110814 - DNA, 914 bp, Zea mays subsp. mays
  misc_feature (1)..(914): Ceres Seq. ID no. 15175549
atatatccccactcttcgcctcctttctggagcagctagggttccgtcctcgatccgatccgccgagtgcacaccacctttccccactccgatcgaatcgatggccgccgagggcgagaagaagatgataaccctcaaaagctccgatggcgaggagttcgaggtggaagaggcggtggcgatggagtcgcagaccatccgccacatgatcgaggatgactgcgccgacaacggtatccctcttcctaacgtcaactccaagatcctatccaaggtaatcgagtactgcaacaagcacgtacatgccgccgccgccgccgccgccgcctcgaaggccggttccgacgacgtgggtgccgcctccgccaacagcaccgccgcctccggtgaggacctcaagaactgggatgcggaggaggatctggtggtggtggcggcggcggcggtgggacgagcggtcgttgccccgtggacgcgctgaagctgggcgtgtgcgccaacttgctgaacgggctgatcaacgcgaccctggggacgccgcccaggacgccgtgctgcacgctgatccaggggctggcggacctggaggcggcggtgtgcctctgcaccgtcctcagggccaacgtcctgggcatcaacctcaacctgcccatcaacctcagcctcctcgtcaactactgcggcaggcgcgtcccctcgggcttccagtgcttctgactatcacacgcccatcgatcgatcgatctgcaggctaaataatttgtccaagctagtatacgtacgttgatatatatatgatgtagtattatatatatgtccatgcatgcaatgcatctcgtcgtctatcgcatgttgttgttgttgttgttgtttttcgatgatcctgtctctgttataaatatcattattattgc

SEQ ID NO: 110815 - protein, 159 aa, Zea mays subsp. mays
  misc_feature (1)..(159): Ceres Seq. ID no. 15175550
  misc_feature (41)..(100): Pfam Name: Skp1 family, tetramerisation domain Pfam Description: Skp1 family, tetramerisation domain
  misc_feature (41)..(138): Homolog of NCBI NO: 18958253 NR Description: kinetochore protein [Brassica juncea]
  misc_feature (40)..(144): Homolog of NCBI NO: 18400912 NR Description: E3 ubiquitin ligase SCF complex subunit SKP1/ASK1
  misc_feature (41)..(138): Homolog of NCBI NO: 18958259 NR Description: kinetochore protein [Brassica juncea]
  misc_feature (41)..(138): Homolog of NCBI NO: 18958257 NR Description: kinetochore protein [Brassica juncea]
  misc_feature (40)..(138): Homolog of NCBI NO: 18394828 NR Description: SKP1, putative [Arabidopsis thaliana]
  misc_feature (41)..(138): Homolog of NCBI NO: 18422184 NR Description: E3 ubiquitin ligase SCF complex subunit,
  misc_feature (41)..(138): Homolog of NCBI NO: 3719211 NR Description: UIP2 [Arabidopsis thaliana]
  misc_feature (38)..(138): Homolog of NCBI NO: 40644754 NR Description: putative SKP1 protein [Triticum aestivum]
  misc_feature (38)..(138): Homolog of NCBI NO: 7378764 NR Description: putative kinetochore protein [Hordeum vulgare
  misc_feature (38)..(138): Homolog of NCBI NO: 32330695 NR Description: SKP1/ASK1-like protein [Triticum aestivum]
YIPTLRLLSGAARVPSSIRSAECTPPFPTPIESMAAEGEKKMITLKSSDGEEFEVEEAVAMESQTIRHMIEDDCADNGIPLPNVNSKILSKVIEYCNKHVHAAAAAAAASKAGSDDVGAASANSTAASGEDLKNWDAEEDLVVVAAAAVGRAVVAPWTR

SEQ ID NO: 110816 - protein, 150 aa, Zea mays subsp. mays
  misc_feature (1)..(150): Ceres Seq. ID no. 15175551
  misc_feature (1)..(34): Homolog of NCBI NO: 25453525 NR Description: cell wall-plasma membrane linker protein homolog
  misc_feature (1)..(28): Homolog of NCBI NO: 34898430 NR Description: Similar to Zea mays PRP gene.(X60432)
  misc_feature (1)..(28): Homolog of NCBI NO: 283044 NR Description: hybrid proline-rich protein - maize
  misc_feature (1)..(26): Homolog of NCBI NO: 283044 NR Description: hybrid proline-rich protein - maize
  misc_feature (1)..(28): Homolog of NCBI NO: 283044 NR Description: hybrid proline-rich protein - maize
  misc_feature (1)..(28): Homolog of NCBI NO: 283044 NR Description: hybrid proline-rich protein - maize
  misc_feature (1)..(29): Homolog of NCBI NO: 34898430 NR Description: Similar to Zea mays PRP gene.(X60432)
  misc_feature (1)..(35): Homolog of NCBI NO: 1709767 NR Description: 36.4 KD PROLINE-RICH PROTEIN
  misc_feature (1)..(35): Homolog of NCBI NO: 19521 NR Description: proline rich protein [Lycopersicon esculentum]
  misc_feature (1)..(29): Homolog of NCBI NO: 7446488 NR Description: cytokinin-induced proline rich protein - southern
MPPPPPPPPRRPVPTTWVPPPPTAPPPPVRTSRTGMRRRIWWWWRRRRWDERSLPRGRAEAGRVRQLAERADQRDPGDAAQDAVLHADPGAGGPGGGGVPLHRPQGQRPGHQPQPAHQPQPPRQLLRQARPLGLPVLLTITRPSIDRSAG

SEQ ID NO: 110817 - protein, 126 aa, Zea mays subsp. mays
  misc_feature (1)..(126): Ceres Seq. ID no. 15175552
  misc_feature (8)..(67): Pfam Name: Skp1 family, tetramerisation domain Pfam Description: Skp1 family, tetramerisation domain
  misc_feature (8)..(105): Homolog of NCBI NO: 18958253 NR Description: kinetochore protein [Brassica juncea]
  misc_feature (7)..(111): Homolog of NCBI NO: 18400912 NR Description: E3 ubiquitin ligase SCF complex subunit SKP1/ASK1
  misc_feature (8)..(105): Homolog of NCBI NO: 18958259 NR Description: kinetochore protein [Brassica juncea]
  misc_feature (8)..(105): Homolog of NCBI NO: 18958257 NR Description: kinetochore protein [Brassica juncea]
  misc_feature (7)..(105): Homolog of NCBI NO: 18394828 NR Description: SKP1, putative [Arabidopsis thaliana]
  misc_feature (8)..(105): Homolog of NCBI NO: 18422184 NR Description: E3 ubiquitin ligase SCF complex subunit,
  misc_feature (8)..(105): Homolog of NCBI NO: 3719211 NR Description: UIP2 [Arabidopsis thaliana]
  misc_feature (5)..(105): Homolog of NCBI NO: 40644754 NR Description: putative SKP1 protein [Triticum aestivum]
  misc_feature (5)..(105): Homolog of NCBI NO: 7378764 NR Description: putative kinetochore protein [Hordeum vulgare
  misc_feature (5)..(105): Homolog of NCBI NO: 32330695 NR Description: SKP1/ASK1-like protein [Triticum aestivum]
MAAEGEKKMITLKSSDGEEFEVEEAVAMESQTIRHMIEDDCADNGIPLPNVNSKILSKVIEYCNKHVHAAAAAAAASKAGSDDVGAASANSTAASGEDLKNWDAEEDLVVVAAAAVGRAVVAPWTR

SEQ ID NO: 110818 - DNA, 749 bp, Zea mays subsp. mays
  misc_feature (1)..(749): Ceres Seq. ID no. 13598962
accacactccactgctctcctccactccactgcctcccatccctgctgctccctctcccatcccggttccatcatgggcggcctctcggtgatcgcaccgcccgcgcgggactcggcttccccgcagcaccggcgcgcgcgccgcgcgttcctcgtgtccaactacctcatcctgggctgcgcctccgggtgcggcttcctcacgctctcgctccgcctggccccctccgtcgacggcttcctcctcatcctgctgcacgcgctcacggtggccgggcggagcgagagcgagcaggaccgcaagaggcggacacagcttcaggaagaatgggactcatgggttgccaagtggaagcagatgcatgaggaggagcgtgcttacaggagggagctcagggatggggaggccagcgacgacgaggaagagtatgaggccaaggaagttgaggtggaggaagtcgttgatgtccgtcaagaagttcttgcattcgacctagatcaggagtgaaaacacttattatagaatctgttgatttctttcctgttggtgttaaagttcattggggtcgcattgcataataggccctagtgatcaagtgcgcaatttactgatcgttgtactgcttatttgtacacttgctgcttgaattgttggatcatgtgtttagatatcaaattttgctgctggattactaaaaaaaaaaaaaaaaaatatcgataccnnncgacnntcgagggggggcccnnnt

SEQ ID NO: 110819 - protein, 168 aa, Zea mays subsp. mays
  misc_feature (1)..(168): Ceres Seq. ID no. 15222467
  misc_feature (31)..(91): Homolog of NCBI NO: 18396262 NR Description: expressed protein [Arabidopsis thaliana]
  misc_feature (38)..(91): Homolog of NCBI NO: 21703131 NR Description: AT5g16250/T21H19_170 [Arabidopsis thaliana]
  misc_feature (38)..(91): Homolog of NCBI NO: 21553926 NR Description: unknown [Arabidopsis thaliana]
  misc_feature (38)..(91): Homolog of NCBI NO: 15237310 NR Description: expressed protein [Arabidopsis thaliana]
  misc_feature (96)..(161): Homolog of NCBI NO: 7689383 NR Description: eIF3b [Arabidopsis thaliana]
  misc_feature (96)..(161): Homolog of NCBI NO: 18420952 NR Description: eukaryotic translation initiation factor 3b
  misc_feature (96)..(161): Homolog of NCBI NO: 18421140 NR Description: eukaryotic translation initiation factor 3
  misc_feature (96)..(168): Homolog of NCBI NO: 6685536 NR Description: Eukaryotic translation initiation factor 3
  misc_feature (96)..(168): Homolog of NCBI NO: 37537002 NR Description: putative eukaryotic initiation factor subunit
  misc_feature (25)..(91): Homolog of NCBI NO: 38345379 NR Description: OSJNBa0067K08.8 [Oryza sativa (japonica
PHSTALLHSTASHPCCSLSHPGSIMGGLSVIAPPARDSASPQHRRARRAFLVSNYLILGCASGCGFLTLSLRLAPSVDGFLLILLHALTVAGRSESEQDRKRRTQLQEEWDSWVAKWKQMHEEERAYRRELRDGEASDDEEEYEAKEVEVEEVVDVRQEVLAFDLDQE

SEQ ID NO: 110820 - protein, 144 aa, Zea mays subsp. mays
  misc_feature (1)..(144): Ceres Seq. ID no. 15222468
  misc_feature (7)..(67): Homolog of NCBI NO: 18396262 NR Description: expressed protein [Arabidopsis thaliana]
  misc_feature (14)..(67): Homolog of NCBI NO: 21553926 NR Description: unknown [Arabidopsis thaliana]
  misc_feature (14)..(67): Homolog of NCBI NO: 21703131 NR Description: AT5g16250/T21H19_170 [Arabidopsis thaliana]
  misc_feature (14)..(67): Homolog of NCBI NO: 15237310 NR Description: expressed protein [Arabidopsis thaliana]
  misc_feature (72)..(137): Homolog of NCBI NO: 7689383 NR Description: eIF3b [Arabidopsis thaliana]
  misc_feature (72)..(137): Homolog of NCBI NO: 18420952 NR Description: eukaryotic translation initiation factor 3b
  misc_feature (72)..(137): Homolog of NCBI NO: 18421140 NR Description: eukaryotic translation initiation factor 3
  misc_feature (72)..(144): Homolog of NCBI NO: 6685536 NR Description: Eukaryotic translation initiation factor 3
  misc_feature (72)..(144): Homolog of NCBI NO: 37537002 NR Description: putative eukaryotic initiation factor subunit
  misc_feature (1)..(67): Homolog of NCBI NO: 38345379 NR Description: OSJNBa0067K08.8 [Oryza sativa (japonica
MGGLSVIAPPARDSASPQHRRARRAFLVSNYLILGCASGCGFLTLSLRLAPSVDGFLLILLHALTVAGRSESEQDRKRRTQLQEEWDSWVAKWKQMHEEERAYRRELRDGEASDDEEEYEAKEVEVEEVVDVRQEVLAFDLDQE

SEQ ID NO: 110821 - protein, 121 aa, Zea mays subsp. mays
  misc_feature (1)..(121): Ceres Seq. ID no. 15222469
TTLHCSPPLHCLPSLLLPLPSRFHHGRPLGDRTARAGLGFPAAPARAPRVPRVQLPHPGLRLRVRLPHALAPPGPLRRRLPPHPAARAHGGRAERERAGPQEADTASGRMGLMGCQVEADA

SEQ ID NO: 110822 - DNA, 3034 bp, Zea mays subsp. mays
  misc_feature (1)..(3034): Ceres Seq. ID no. 15176878
acctgccttttcttcttcaagcgtgcacattccttccccacttctctctctctctctctctcgtgacgacggcgacggcaacgactggggcgaccgtcgctgccgccctacttgccggttgctcggatcttcttcggcccgttagccgtcgacgagcaccaccaggtacgccaaccccttcatcttctcttcctgctgtgcgaaactgaggacccaaaccctaacctactatttgtttttcggatctgatctatgcatgcattacgcctactaacttcgattgctctgcaaaaataatcggtgtatacatgagtagacccacgtcccgggcaaaattctgaagcccattgttgatgtgggcatattagcaaatctctcgtgttcaccccagcttaaaaatataagctgtttggtgccgctcgtgtatttaccatgtttttgctactattgattgtgccagggcaaccagatacttcagtggcttcgcaaggatgtcctggtgcactattgagtctgatcctggtgagttttcgcatggtctcatcaatgactatatgtgctgttccttgtcattttcgattcgtgggaggtgtatggcatgttagcgtgcgggtaggatactcccttattttttcccctgcccgtccacctctgcatatcatgcaatttctgtgttttgcttataagtgtagtgggctcggttatacccgagttatcttcaaggggacaattttcctttagtcatgatgattgcattcatcgtctttttaagtcattcagcatgtgctcttcaccgttcctaatagtagcgttaggaaaccaacttatgtcatcagtcgtcacacttttgaatgatctaccaacccattggtatctctgttctttggcatattacttcccccctactttcacgaaacagcaaactgttgatgagttgaaacacattttgttatgcttactcccatttgtacttctgagttctgtcttagttgttcttactggtgtttgaaaccattgcttatgttatacttgagcaggtgtgttcactgagctgattcagcaaatgcaagtgaaaggtgtacaggttagcttccagggctctgttgcgttccttgcctgaactgcttgttttgtagcaactgtttttttcctcatccattgaactattattgtatctgcaatggcattatgcgctcgacctgttcattcactagtgtacactagttcttctgaagttttgtttcttgctcatgttctgaaactcacatcaacctggaactctcatttttggaagtgccttactgccatattatatgactgtaggataagcataataatatgtagctgattgtaatcttgtttgtcaacaggatcttgaagacatgcactttagtttaaggtagaataactgataatttgttgtcaatagttgctctttttttacctttatgcaacggtcaactcaatttgaaatggggagggtccttgtattatcaaaaagtaagggaggccttgagtgaggcttattctacatttgtttattcacttgcattcgtttagtatgggacctctagtcacatgacaacatgccagctaccaattatatttgtttgaggtcatgcttttatttcttgagtttgataatgttggtacttaagttacaataataatatatatagaacaggtgcctctagaaatatgtgacgatcatttttttgtcaagttatccatagaaaaaaaatttgaacccagaaatttatatgtttgggatgttctttaaacaggtggaagagctttactctctcgatgtgggctctcttagtcaactgcggtgagaatctttattatttatgtcgtcattatctgcaatctgaatgccttgaacacatatttgtcctctccacttttcttaggccagtatatgggctaatttttctcttcaagtggatacccggggagaaggatgaacggcctgttgtcagagatcctaacccaaaccttttctttgcgcaccaagttagttctgttctgtttctgtccctttagctaaccacgtttgctactctgtgcttaacaataacaggatatccttttacttattttcaggtcatcactaatgcatgtgctactcaagctattctctcagttctcatgaatcgccctgaaattgacattggcccagaattatctcaattgaaggaattcacaggagcttttacaccagatctgaagggcttggctattagcaacagcgaatctatccggacagctcataacagctttgcaaggccagagccatttatttctgatgagcagagggccgcaactaaggatgatgatgtttaccatttcataagctatttaccttttgaaggtgtcctgtatgagctggatggactgaaggaagggcctgtgaatcttgggcagtgcgatggtgctgatgatcttgattggctacggatggtgcagccagttattcaagaaaggattgagcgctactcacaaagcgagatcaggttcaatctcatggccatcataaagaacaggaaagaggtgtacagtgctgagcttgaggaactggagaagagaagggagcagattttgcaggagatgaataatgcttcctccacagaatccttgagcagttcgcttacggaggtgatatcggcaatcgaaactgtcacggagaaggtcatcatggaagaagagaagttcaagaagtggaagaaggagaacattcggaggaaacataactacatccctttcttgttcaacttgctgaagatgcttgcagagaagcagcagctaaaacctctggtcgagaaggccaaacagcaaaagtcagcaagcccgagcacgagttgatggtgaaatgtcaatagactggtagcttttgccgatgtcttctgagcgtcgtgttatcttatcagatacattgccaagtcggcagctcagataaattatgaccgatgttatttataccatgttgcacgccgtgatgtatcagcagctatgccatttttttttgcagagc

SEQ ID NO: 110823 - protein, 237 aa, Zea mays subsp. mays
  misc_feature (1)..(237): Ceres Seq. ID no. 15176879
  misc_feature (1)..(232): Homolog of NCBI NO: 30584639 NR Description: Homo sapiens ubiquitin carboxyl-terminal
  misc_feature (1)..(232): Homolog of NCBI NO: 15930175 NR Description: Unknown (protein for MGC:9314) [Homo sapiens]
  misc_feature (1)..(232): Homolog of NCBI NO: 18203632 NR Description: Ubiquitin carboxyl-terminal hydrolase isozyme L5 (Ubiquitin thiolesterase L5) (Ubiquitin C-terminal hydrolase
  misc_feature (1)..(232): Homolog of NCBI NO: 12841686 NR Description: unnamed protein product [Mus musculus]
  misc_feature (1)..(232): Homolog of NCBI NO: 7706753 NR Description: ubiquitin C-terminal hydrolase UCH37
  misc_feature (1)..(232): Homolog of NCBI NO: 27806179 NR Description: ubiquitin carboxyl-terminal hydrolase L5
  misc_feature (1)..(225): Homolog of NCBI NO: 15237324 NR Description: ubiquitin C-terminal hydrolase-related protein
  misc_feature (1)..(233): Homolog of NCBI NO: 15724238 NR Description: F5I14.29/F5I14.29 [Arabidopsis thaliana]
  misc_feature (1)..(233): Homolog of NCBI NO: 18408331 NR Description: expressed protein [Arabidopsis thaliana]
  misc_feature (1)..(233): Homolog of NCBI NO: 6686411 NR Description: F1E22.3 [Arabidopsis thaliana]
MNRPEIDIGPELSQLKEFTGAFTPDLKGLAISNSESIRTAHNSFARPEPFISDEQRAATKDDDVYHFISYLPFEGVLYELDGLKEGPVNLGQCDGADDLDWLRMVQPVIQERIERYSQSEIRFNLMAIIKNRKEVYSAELEELEKRREQILQEMNNASSTESLSSSLTEVISAIETVTEKVIMEEEKFKKWKKENIRRKHNYIPFLFNLLKMLAEKQQLKPLVEKAKQQKSASPSTS

SEQ ID NO: 110824 - protein, 134 aa, Zea mays subsp. mays
  misc_feature (1)..(134): Ceres Seq. ID no. 15176880
  misc_feature (1)..(129): Homolog of NCBI NO: 30584639 NR Description: Homo sapiens ubiquitin carboxyl-terminal
  misc_feature (1)..(129): Homolog of NCBI NO: 15930175 NR Description: Unknown (protein for MGC:9314) [Homo sapiens]
  misc_feature (1)..(129): Homolog of NCBI NO: 18203632 NR Description: Ubiquitin carboxyl-terminal hydrolase isozyme L5 (Ubiquitin thiolesterase L5) (Ubiquitin C-terminal hydrolase
  misc_feature (1)..(129): Homolog of NCBI NO: 12841686 NR Description: unnamed protein product [Mus musculus]
  misc_feature (1)..(129): Homolog of NCBI NO: 7706753 NR Description: ubiquitin C-terminal hydrolase UCH37
  misc_feature (1)..(129): Homolog of NCBI NO: 27806179 NR Description: ubiquitin carboxyl-terminal hydrolase L5
  misc_feature (1)..(122): Homolog of NCBI NO: 15237324 NR Description: ubiquitin C-terminal hydrolase-related protein
  misc_feature (1)..(130): Homolog of NCBI NO: 15724238 NR Description: F5I14.29/F5I14.29 [Arabidopsis thaliana]
  misc_feature (1)..(130): Homolog of NCBI NO: 18408331 NR Description: expressed protein [Arabidopsis thaliana]
  misc_feature (1)..(130): Homolog of NCBI NO: 6686411 NR Description: F1E22.3 [Arabidopsis thaliana]
MVQPVIQERIERYSQSEIRFNLMAIIKNRKEVYSAELEELEKRREQILQEMNNASSTESLSSSLTEVISAIETVTEKVIMEEEKFKKWKKENIRRKHNYIPFLFNLLKMLAEKQQLKPLVEKAKQQKSASPSTS

SEQ ID NO: 110825 - DNA, 1061 bp, Zea mays subsp. mays
  misc_feature (1)..(1061): Ceres Seq. ID no. 14312747
aggaaaaccaaccaccactcccaccaccctccgcctccgcctgcgccacagctgccgattcgaaagccctcgtcctgacccctcgcaaaaccctagctccaaccaccatgaagggcaaggccaacgcctccaagaaggatgaggccaggctccgggccggcggcggtggcccgatgggcggaatgctgcctcaacaaggcatgatgaggcctcctaacattcttggtggtgctggtgccggcttccccagcacggcccagatgggcggcggacctatgggcatgccggttggccacccgcacatgggtattatgcagcagggcggcggtggcggtggtggtggcatgccgggcctggggttccacccgggattgggcggcggcggaatgcattctggggcggatatgcttcaggccgccgcggcatccgggaaccccgtggcgcagcagcagtacatggccttgatgcagcagcagcagcagcagatgatgatgatgcagcagcagcaacagcagcacgggaacggcggtttaggatacccggcggcaatgggctacggctatggccggccaccgatgcattacccaatgggctacccagtgctgcccccgcactcgcatgctgagccttacaacatcttcagcgacgagaacgccaacagctgctcactgatgtgatcagcaattccgcatggaatggccctgttccaagtaaaccatctcaaggagctcaatgtcaccgctgatcaccgacagacatcgccatggttgaagcgccgtgaatcaatcaacaatcagtatgcttggggatgagtcctagctagaaccctgtccctttcctgctccttccccccctttctctagcttattttcgccttgctttaaaaaaaaaggaacttccttgaatgcgaagttaggtatagtaattatgaggtttccataagggaggggaggagagaggagacgatagggacttcgtacggggtcgttcgcttgtgggttcttccctcctggcttcattaaggtggactaatggtagaacaatgttgtcaatctcagtcg

SEQ ID NO: 110826 - protein, 224 aa, Zea mays subsp. mays
  misc_feature (1)..(224): Ceres Seq. ID no. 14312748
  misc_feature (138)..(210): Pfam Name: Atrophin-1 family Pfam Description: Atrophin-1 family
  misc_feature (37)..(210): Homolog of NCBI NO: 18397481 NR Description: heavy-metal-associated domain-containing protein
  misc_feature (3)..(199): Homolog of NCBI NO: 31206687 NR Description: ENSANGP00000010576 [Anopheles gambiae]
  misc_feature (53)..(224): Homolog of NCBI NO: 30687142 NR Description: heavy-metal-associated domain-containing protein
  misc_feature (36)..(210): Homolog of NCBI NO: 15239643 NR Description: heavy-metal-associated domain-containing protein
  misc_feature (36)..(210): Homolog of NCBI NO: 27754558 NR Description: unknown protein [Arabidopsis thaliana]
  misc_feature (65)..(173): Homolog of NCBI NO: 31199749 NR Description: ENSANGP00000021618 [Anopheles gambiae]
  misc_feature (53)..(224): Homolog of NCBI NO: 18397481 NR Description: heavy-metal-associated domain-containing protein
  misc_feature (54)..(224): Homolog of NCBI NO: 30679432 NR Description: glycine-rich protein [Arabidopsis thaliana]
  misc_feature (54)..(224): Homolog of NCBI NO: 6729032 NR Description: unknown protein [Arabidopsis thaliana]
ENQPPLPPPSASACATAADSKALVLTPRKTLAPTTMKGKANASKKDEARLRAGGGGPMGGMLPQQGMMRPPNILGGAGAGFPSTAQMGGGPMGMPVGHPHMGIMQQGGGGGGGGMPGLGFHPGLGGGGMHSGADMLQAAAASGNPVAQQQYMALMQQQQQQMMMMQQQQQQHGNGGLGYPAAMGYGYGRPPMHYPMGYPVLPPHSHAEPYNIFSDENANSCSLM

SEQ ID NO: 110827 - protein, 189 aa, Zea mays subsp. mays
  misc_feature (1)..(189): Ceres Seq. ID no. 14312749
  misc_feature (103)..(175): Pfam Name: Atrophin-1 family Pfam Description: Atrophin-1 family
  misc_feature (2)..(175): Homolog of NCBI NO: 18397481 NR Description: heavy-metal-associated domain-containing protein
  misc_feature (1)..(164): Homolog of NCBI NO: 31206687 NR Description: ENSANGP00000010576 [Anopheles gambiae]
  misc_feature (18)..(189): Homolog of NCBI NO: 30687142 NR Description: heavy-metal-associated domain-containing protein
  misc_feature (1)..(175): Homolog of NCBI NO: 15239643 NR Description: heavy-metal-associated domain-containing protein
  misc_feature (1)..(175): Homolog of NCBI NO: 27754558 NR Description: unknown protein [Arabidopsis thaliana]
  misc_feature (30)..(138): Homolog of NCBI NO: 31199749 NR Description: ENSANGP00000021618 [Anopheles gambiae]
  misc_feature (18)..(189): Homolog of NCBI NO: 18397481 NR Description: heavy-metal-associated domain-containing protein
  misc_feature (19)..(189): Homolog of NCBI NO: 30679432 NR Description: glycine-rich protein [Arabidopsis thaliana]
  misc_feature (19)..(189): Homolog of NCBI NO: 6729032 NR Description: unknown protein [Arabidopsis thaliana]
MKGKANASKKDEARLRAGGGGPMGGMLPQQGMMRPPNILGGAGAGFPSTAQMGGGPMGMPVGHPHMGIMQQGGGGGGGGMPGLGFHPGLGGGGMHSGADMLQAAAASGNPVAQQQYMALMQQQQQQMMMMQQQQQQHGNGGLGYPAAMGYGYGRPPMHYPMGYPVLPPHSHAEPYNIFSDENANSCSLM

SEQ ID NO: 110828 - protein, 167 aa, Zea mays subsp. mays
  misc_feature (1)..(167): Ceres Seq. ID no. 14312750
  misc_feature (81)..(153): Pfam Name: Atrophin-1 family Pfam Description: Atrophin-1 family
  misc_feature (1)..(153): Homolog of NCBI NO: 18397481 NR Description: heavy-metal-associated domain-containing protein
  misc_feature (1)..(142): Homolog of NCBI NO: 31206687 NR Description: ENSANGP00000010576 [Anopheles gambiae]
  misc_feature (1)..(167): Homolog of NCBI NO: 30687142 NR Description: heavy-metal-associated domain-containing protein
  misc_feature (1)..(153): Homolog of NCBI NO: 15239643 NR Description: heavy-metal-associated domain-containing protein
  misc_feature (1)..(153): Homolog of NCBI NO: 27754558 NR Description: unknown protein [Arabidopsis thaliana]
  misc_feature (8)..(116): Homolog of NCBI NO: 31199749 NR Description: ENSANGP00000021618 [Anopheles gambiae]
  misc_feature (1)..(167): Homolog of NCBI NO: 18397481 NR Description: heavy-metal-associated domain-containing protein
  misc_feature (1)..(167): Homolog of NCBI NO: 30679432 NR Description: glycine-rich protein [Arabidopsis thaliana]
  misc_feature (1)..(167): Homolog of NCBI NO: 6729032 NR Description: unknown protein [Arabidopsis thaliana]
MGGMLPQQGMMRPPNILGGAGAGFPSTAQMGGGPMGMPVGHPHMGIMQQGGGGGGGGMPGLGFHPGLGGGGMHSGADMLQAAAASGNPVAQQQYMALMQQQQQQMMMMQQQQQQHGNGGLGYPAAMGYGYGRPPMHYPMGYPVLPPHSHAEPYNIFSDENANSCSLM

SEQ ID NO: 110829 - DNA, 1489 bp, Zea mays subsp. mays
  misc_feature (1)..(1489): Ceres Seq. ID no. 15179287
aaaaaaaaggttaaatttacccgttccggcggccgaccgtgcacgacctggccgcctgggcgcctggcgagtggcgaccgtctgcctgccctgcacgcccacttgccgccgccccggcttcgccactaccgccatcccgaccggctcgcgcgccaccgccatctcctcctgcgctcgccttgctgccgcggccgcccccaccacaaggacccagaggggctgccctcgatctgactgaccccacgggacaggatggacaaggggaaatcggtggtagccgagctgtcggcatcgtccagctcgctcccgtcgccctccttctatcctttctcaaagaaggctaaacctcggaaattggtcagcttgtgcctgggcacccttggtcagcatcttgaagatatcatcactgatatttcagaatttgctgccttatttccaccccacataacgttggcaattatgtctattgcaaggagaaaaagcctcctgaatgataaagttttgacttctcttgctgaaagctcctggcaaatcctagatatatctggatctgatgttactgatgctggtttggctactgtagcaaatgtttgtagtaatttacgggcagttgatattagttgctgtgaaaaaattactactgctggtgtgtctgagattgtatgccactgcccatccttggagatattgagatgtggaggctgtccaagaagtgaagtaacggcacggaggtgcttgaatctcttgaaacccaaattgaatgctcttgaagaggactcatgggaggaacttgatacactagatataggaggcggtgcagagtccttaagatggcttgtttggccaatgatagatgataagtcaaaggtgactctagctgtcgaatgccctcgtgttactgtcaacccacagccatcgctgttcaacctctccggatattccaaagtcccaatagaagcattgtcaagcgtaccactggaccattcagtggttgaggacattgatcccaaaacatgggctgtttctgctgctcctccaagacctgttgctccagtgaatccaaatgttccaagtgctccgcctgaaataccgatggcagaaaggttcaggctggcctatgtggagagggaagcgaggctggcacccaagagggccaagcgggaaaggcagcggcgtcggcgcgctgagagggactacatgatggttgacatcgacgcaaggtcggtcgcacttgctgctcaagcaagcaggaacctgcgcaagagctgattgtttcttgtctacgctatttgtggagacttgagagtagagaatcatgaggcaagaaatgctgttcaatccttctactttcaaggcaaagatagcatatatatatggacacagtattgtatagttgtattggcagtagcggtagcgtttacactgccatgtactagtaatagaaaaaaatctgagtgggaataacagggaaggcgtgccttatcaaacc

SEQ ID NO: 110830 - protein, 338 aa, Zea mays subsp. mays
  misc_feature (1)..(338): Ceres Seq. ID no. 15179288
  misc_feature (29)..(137): Homolog of NCBI NO: 7485340 NR Description: hypothetical protein F10M23.320 - Arabidopsis
  misc_feature (123)..(338): Homolog of NCBI NO: 7485340 NR Description: hypothetical protein F10M23.320 - Arabidopsis
  misc_feature (1)..(338): Homolog of NCBI NO: 30687441 NR Description: expressed protein [Arabidopsis thaliana]
MDKGKSVVAELSASSSSLPSPSFYPFSKKAKPRKLVSLCLGTLGQHLEDIITDISEFAALFPPHITLAIMSIARRKSLLNDKVLTSLAESSWQILDISGSDVTDAGLATVANVCSNLRAVDISCCEKITTAGVSEIVCHCPSLEILRCGGCPRSEVTARRCLNLLKPKLNALEEDSWEELDTLDIGGGAESLRWLVWPMIDDKSKVTLAVECPRVTVNPQPSLFNLSGYSKVPIEALSSVPLDHSVVEDIDPKTWAVSAAPPRPVAPVNPNVPSAPPEIPMAERFRLAYVEREARLAPKRAKRERQRRRRAERDYMMVDIDARSVALAAQASRNLRKS

SEQ ID NO: 110831 - protein, 269 aa, Zea mays subsp. mays
  misc_feature (1)..(269): Ceres Seq. ID no. 15179289
  misc_feature (1)..(68): Homolog of NCBI NO: 7485340 NR Description: hypothetical protein F10M23.320 - Arabidopsis
  misc_feature (54)..(269): Homolog of NCBI NO: 7485340 NR Description: hypothetical protein F10M23.320 - Arabidopsis
  misc_feature (1)..(269): Homolog of NCBI NO: 30687441 NR Description: expressed protein [Arabidopsis thaliana]
MSIARRKSLLNDKVLTSLAESSWQILDISGSDVTDAGLATVANVCSNLRAVDISCCEKITTAGVSEIVCHCPSLEILRCGGCPRSEVTARRCLNLLKPKLNALEEDSWEELDTLDIGGGAESLRWLVWPMIDDKSKVTLAVECPRVTVNPQPSLFNLSGYSKVPIEALSSVPLDHSVVEDIDPKTWAVSAAPPRPVAPVNPNVPSAPPEIPMAERFRLAYVEREARLAPKRAKRERQRRRRAERDYMMVDIDARSVALAAQASRNLRKS

SEQ ID NO: 110832 - DNA, 586 bp, Zea mays subsp. mays
  misc_feature (1)..(586): Ceres Seq. ID no. 13622600
atgttctgctgtcttgatgagctctacccgaaccacagaggccgtgcatgtcccggagggcgaccgtgcaggagcagatatcctcgcccttcatggactcgccgccgccgcacctcgacgcccccttcttcggggccgatctgatcccctccggccgcctccgtcggatgcgcgggtaccgctactcccccggaggcctcgaggaagagataatgatgtttcagacaagagttttactgggaggaatgaacatgtacgatcgctaccaggattggcgccttgatgtagataacatgacatacgaggagttggtcgagcttggagacagaattggatacgtcaacacagggctacgtgaggacgagattgctcgcagccttaggaaggccaagcacccatccttcggttccttgcgattcgcagcagaagtggaaaggaaatgcactatttgccaagaagaatttcagtcaaatgaagagatgggaaggctagtctgtggccatagctaccatgtgttgtgcatcaagcagtggctctctcagaagacacttgcccggtttgcaaactgccgtcagcaagaatgaaa

SEQ ID NO: 110833 - protein, 178 aa, Zea mays subsp. mays
  misc_feature (1)..(178): Ceres Seq. ID no. 13622601
  misc_feature (132)..(168): Pfam Name: Zinc finger, C3HC4 type (RING finger) Pfam Description: Zinc finger, C3HC4 type (RING finger)
  misc_feature (136)..(168): Homolog of NCBI NO: 34911396 NR Description: RING zinc finger protein-like
  misc_feature (53)..(167): Homolog of NCBI NO: 7486381 NR Description: hypothetical protein F3L17.20 - Arabidopsis
  misc_feature (37)..(168): Homolog of NCBI NO: 38344619 NR Description: OSJNBb0003A12.5 [Oryza sativa (japonica
  misc_feature (40)..(166): Homolog of NCBI NO: 21554695 NR Description: zinc-finger protein (C-terminal), putative
  misc_feature (29)..(168): Homolog of NCBI NO: 15220067 NR Description: zinc finger (C3HC4-type RING finger) protein
  misc_feature (1)..(166): Homolog of NCBI NO: 15219544 NR Description: RING zinc finger protein -related [Arabidopsis
  misc_feature (40)..(166): Homolog of NCBI NO: 15220912 NR Description: zinc-finger protein (C-terminal) -related
  misc_feature (57)..(166): Homolog of NCBI NO: 25511721 NR Description: F2H15.19 protein - Arabidopsis thaliana
  misc_feature (53)..(168): Homolog of NCBI NO: 11358785 NR Description: RING-H2 finger protein RHG1a
  misc_feature (1)..(113): Homolog of NCBI NO: 34911396 NR Description: RING zinc finger protein-like
MSRRATVQEQISSPFMDSPPPHLDAPFFGADLIPSGRLRRMRGYRYSPGGLEEEIMMFQTRVLLGGMNMYDRYQDWRLDVDNMTYEELVELGDRIGYVNTGLREDEIARSLRKAKHPSFGSLRFAAEVERKCTICQEEFQSNEEMGRLVCGHSYHVLCIKQWLSQKTLARFANCRQQE

SEQ ID NO: 110834 - protein, 163 aa, Zea mays subsp. mays
  misc_feature (1)..(163): Ceres Seq. ID no. 13622602
  misc_feature (117)..(153): Pfam Name: Zinc finger, C3HC4 type (RING finger) Pfam Description: Zinc finger, C3HC4 type (RING finger)
  misc_feature (38)..(152): Homolog of NCBI NO: 7486381 NR Description: hypothetical protein F3L17.20 - Arabidopsis
  misc_feature (38)..(153): Homolog of NCBI NO: 11358785 NR Description: RING-H2 finger protein RHG1a
  misc_feature (22)..(153): Homolog of NCBI NO: 38344619 NR Description: OSJNBb0003A12.5 [Oryza sativa (japonica
  misc_feature (42)..(151): Homolog of NCBI NO: 25511721 NR Description: F2H15.19 protein - Arabidopsis thaliana
  misc_feature (25)..(151): Homolog of NCBI NO: 21554695 NR Description: zinc-finger protein (C-terminal), putative
  misc_feature (25)..(151): Homolog of NCBI NO: 15220912 NR Description: zinc-finger protein (C-terminal) -related
  misc_feature (14)..(153): Homolog of NCBI NO: 15220067 NR Description: zinc finger (C3HC4-type RING finger) protein
  misc_feature (1)..(151): Homolog of NCBI NO: 15219544 NR Description: RING zinc finger protein -related [Arabidopsis
  misc_feature (121)..(153): Homolog of NCBI NO: 34911396 NR Description: RING zinc finger protein-like
  misc_feature (1)..(98): Homolog of NCBI NO: 34911396 NR Description: RING zinc finger protein-like
MDSPPPHLDAPFFGADLIPSGRLRRMRGYRYSPGGLEEEIMMFQTRVLLGGMNMYDRYQDWRLDVDNMTYEELVELGDRIGYVNTGLREDEIARSLRKAKHPSFGSLRFAAEVERKCTICQEEFQSNEEMGRLVCGHSYHVLCIKQWLSQKTLARFANCRQQE

SEQ ID NO: 110835 - protein, 138 aa, Zea mays subsp. mays
  misc_feature (1)..(138): Ceres Seq. ID no. 13622603
  misc_feature (92)..(128): Pfam Name: Zinc finger, C3HC4 type (RING finger) Pfam Description: Zinc finger, C3HC4 type (RING finger)
  misc_feature (13)..(127): Homolog of NCBI NO: 7486381 NR Description: hypothetical protein F3L17.20 - Arabidopsis
  misc_feature (13)..(128): Homolog of NCBI NO: 11358785 NR Description: RING-H2 finger protein RHG1a
  misc_feature (1)..(128): Homolog of NCBI NO: 38344619 NR Description: OSJNBb0003A12.5 [Oryza sativa (japonica
  misc_feature (17)..(126): Homolog of NCBI NO: 25511721 NR Description: F2H15.19 protein - Arabidopsis thaliana
  misc_feature (1)..(126): Homolog of NCBI NO: 21554695 NR Description: zinc-finger protein (C-terminal), putative
  misc_feature (1)..(126): Homolog of NCBI NO: 15220912 NR Description: zinc-finger protein (C-terminal) -related
  misc_feature (1)..(128): Homolog of NCBI NO: 15220067 NR Description: zinc finger (C3HC4-type RING finger) protein
  misc_feature (1)..(126): Homolog of NCBI NO: 15219544 NR Description: RING zinc finger protein -related [Arabidopsis
  misc_feature (96)..(128): Homolog of NCBI NO: 34911396 NR Description: RING zinc finger protein-like
  misc_feature (1)..(73): Homolog of NCBI NO: 34911396 NR Description: RING zinc finger protein-like
MRGYRYSPGGLEEEIMMFQTRVLLGGMNMYDRYQDWRLDVDNMTYEELVELGDRIGYVNTGLREDEIARSLRKAKHPSFGSLRFAAEVERKCTICQEEFQSNEEMGRLVCGHSYHVLCIKQWLSQKTLARFANCRQQE

SEQ ID NO: 110836 - DNA, 1417 bp, Zea mays subsp. mays
  misc_feature (1)..(1417): Ceres Seq. ID no. 15227053
aggactgtttctcttgttattagcttctcgtacgtgtgtgttctgttctgttcaccagaaagcaaactacttctttaagtgattccaacagcggaggccggaggccatgggcgcccggcaggcggcggcgttcctgctcggctgcgtcgccgcgctcaccgtcgtcgtgctgctgctgcagcgccgccccgaggagctcaccaccagggcaccactgctgcaagtcttcggaggggaagggggaggggcagggccgtcgtcgtcgccgtctcagtccagctcctcctactcaccaccaccagtagataccaatgccactgccgcagccggcgatccacgccttccgccgccgcccaaccatggcgaggacgaagacgaagaagaagaggagttccgcgggctcgcggcagcggtgtcgcgcgcggcgacggcggacgaccggacggtgatcatcacgtgcgtcaaccaggcgtgggcggcgcccggctcgctgctggacctgttcctggagagcttccgcgtgggcgacggcacggcgcccctgctgcgccacctgctcatcgtggccatggacgccgccgccatggcccggtgccgcgcgctccacccgcactgctacctctactccccggcccgcggcgtcgacttcgcgcccgccaagcccttcctgtccagggactacctggagctcgtctggagcaagctcaggctgcagcgccgcgtgctccgcctcggctacagcctcctcttcaccgacgccgacgtgctgtggctccgcaacccgctcaagcacgtcacggcgtacgccgacatgaccgtctcctgcgacgtcttcttcggcgacccggacggcgtcgacaacttccccaacacgggattcttccacgtcaggcccaacagccgcaccatcgccatggccgccgcgtggcaccgggcccgggacaggttcccgggcaagaacgagcagcccgtcttcaacgccatcaagaagggcctcgtcgccgacctcggcctccgcctgcagtacatagacccggccttcgtcgcgggcttctgcagctacggcagggacctcggcaaggtctgcaccatgcacgccaactgctgcgtcggcctccgcgccaagatcaccgacctccggaccctgctccacgactggaagaactacaccgccatgccgcactgggccaagcaccaggccaagtggaccgtccccggagcgtgcatccattgacggccacgacccatgatgcatcttcctagctacacgtcgatcgcaggaaaaggacactaactagtacaataccatggatgagatgaattcacatatattactctagcttatatgcgtccgaatcgtcagagcttgcgtcttgcgttgcgcctcccgaaagaaaaggaacacaatttagttatc

SEQ ID NO: 110837 - protein, 375 aa, Zea mays subsp. mays
  misc_feature (1)..(375): Ceres Seq. ID no. 15227054
  misc_feature (113)..(373): Homolog of NCBI NO: 6063544 NR Description: similar to Arabidopsis thaliana chromosome 2, BAC
  misc_feature (87)..(373): Homolog of NCBI NO: 23306127 NR Description: Putataive InsB from Escherichia coli
  misc_feature (107)..(373): Homolog of NCBI NO: 15235236 NR Description: hypothetical protein common family [Arabidopsis
  misc_feature (93)..(375): Homolog of NCBI NO: 34904674 NR Description: P0446G09.1 [Oryza sativa (japonica
  misc_feature (57)..(373): Homolog of NCBI NO: 19386741 NR Description: P0678F11.31 [Oryza sativa (japonica
  misc_feature (86)..(373): Homolog of NCBI NO: 19386738 NR Description: P0678F11.28 [Oryza sativa (japonica
  misc_feature (91)..(375): Homolog of NCBI NO: 19386795 NR Description: OJ1485_B09.3 [Oryza sativa (japonica
  misc_feature (8)..(375): Homolog of NCBI NO: 34897442 NR Description: putative regulatory protein
  misc_feature (1)..(375): Homolog of NCBI NO: 19386737 NR Description: P0678F11.26 [Oryza sativa (japonica
  misc_feature (26)..(375): Homolog of NCBI NO: 34897440 NR Description: putative regulatory protein
MGARQAAAFLLGCVAALTVVVLLLQRRPEELTTRAPLLQVFGGEGGGAGPSSSPSQSSSSYSPPPVDTNATAAAGDPRLPPPPNHGEDEDEEEEEFRGLAAAVSRAATADDRTVIITCVNQAWAAPGSLLDLFLESFRVGDGTAPLLRHLLIVAMDAAAMARCRALHPHCYLYSPARGVDFAPAKPFLSRDYLELVWSKLRLQRRVLRLGYSLLFTDADVLWLRNPLKHVTAYADMTVSCDVFFGDPDGVDNFPNTGFFHVRPNSRTIAMAAAWHRARDRFPGKNEQPVFNAIKKGLVADLGLRLQYIDPAFVAGFCSYGRDLGKVCTMHANCCVGLRAKITDLRTLLHDWKNYTAMPHWAKHQAKWTVPGACIH

SEQ ID NO: 110838 - protein, 221 aa, Zea mays subsp. mays
  misc_feature (1)..(221): Ceres Seq. ID no. 15227055
  misc_feature (1)..(219): Homolog of NCBI NO: 6063544 NR Description: similar to Arabidopsis thaliana chromosome 2, BAC
  misc_feature (1)..(219): Homolog of NCBI NO: 23306127 NR Description: Putataive InsB from Escherichia coli
  misc_feature (1)..(219): Homolog of NCBI NO: 15235236 NR Description: hypothetical protein common family [Arabidopsis
  misc_feature (1)..(221): Homolog of NCBI NO: 34904674 NR Description: P0446G09.1 [Oryza sativa (japonica
  misc_feature (1)..(219): Homolog of NCBI NO: 19386741 NR Description: P0678F11.31 [Oryza sativa (japonica
  misc_feature (1)..(219): Homolog of NCBI NO: 19386738 NR Description: P0678F11.28 [Oryza sativa (japonica
  misc_feature (1)..(221): Homolog of NCBI NO: 19386795 NR Description: OJ1485_B09.3 [Oryza sativa (japonica
  misc_feature (1)..(221): Homolog of NCBI NO: 34897442 NR Description: putative regulatory protein
  misc_feature (1)..(221): Homolog of NCBI NO: 19386737 NR Description: P0678F11.26 [Oryza sativa (japonica
  misc_feature (1)..(221): Homolog of NCBI NO: 34897440 NR Description: putative regulatory protein
MDAAAMARCRALHPHCYLYSPARGVDFAPAKPFLSRDYLELVWSKLRLQRRVLRLGYSLLFTDADVLWLRNPLKHVTAYADMTVSCDVFFGDPDGVDNFPNTGFFHVRPNSRTIAMAAAWHRARDRFPGKNEQPVFNAIKKGLVADLGLRLQYIDPAFVAGFCSYGRDLGKVCTMHANCCVGLRAKITDLRTLLHDWKNYTAMPHWAKHQAKWTVPGACIH

SEQ ID NO: 110839 - protein, 216 aa, Zea mays subsp. mays
  misc_feature (1)..(216): Ceres Seq. ID no. 15227056
  misc_feature (1)..(214): Homolog of NCBI NO: 6063544 NR Description: similar to Arabidopsis thaliana chromosome 2, BAC
  misc_feature (1)..(214): Homolog of NCBI NO: 23306127 NR Description: Putataive InsB from Escherichia coli
  misc_feature (1)..(214): Homolog of NCBI NO: 15235236 NR Description: hypothetical protein common family [Arabidopsis
  misc_feature (1)..(216): Homolog of NCBI NO: 34904674 NR Description: P0446G09.1 [Oryza sativa (japonica
  misc_feature (1)..(214): Homolog of NCBI NO: 19386741 NR Description: P0678F11.31 [Oryza sativa (japonica
  misc_feature (1)..(214): Homolog of NCBI NO: 19386738 NR Description: P0678F11.28 [Oryza sativa (japonica
  misc_feature (1)..(216): Homolog of NCBI NO: 19386795 NR Description: OJ1485_B09.3 [Oryza sativa (japonica
  misc_feature (1)..(216): Homolog of NCBI NO: 34897442 NR Description: putative regulatory protein
  misc_feature (1)..(216): Homolog of NCBI NO: 19386737 NR Description: P0678F11.26 [Oryza sativa (japonica
  misc_feature (1)..(216): Homolog of NCBI NO: 34897440 NR Description: putative regulatory protein
MARCRALHPHCYLYSPARGVDFAPAKPFLSRDYLELVWSKLRLQRRVLRLGYSLLFTDADVLWLRNPLKHVTAYADMTVSCDVFFGDPDGVDNFPNTGFFHVRPNSRTIAMAAAWHRARDRFPGKNEQPVFNAIKKGLVADLGLRLQYIDPAFVAGFCSYGRDLGKVCTMHANCCVGLRAKITDLRTLLHDWKNYTAMPHWAKHQAKWTVPGACIH

SEQ ID NO: 110840 - DNA, 671 bp, Zea mays subsp. mays
  misc_feature (1)..(671): Ceres Seq. ID no. 12593692
  misc_feature: MA Experiment ID: 108535 Result: Up-regulated in Transcription
  misc_feature: MA Experiment 108535 PARAMETER Experiment Name: Zm_Meristem_P Parameter: Age (day) Value: 8
  misc_feature: MA Experiment 108535 PARAMETER Experiment Name: Zm_Meristem_P Parameter: Organism Value: Zea mays
  misc_feature: MA Experiment 108535 PARAMETER Experiment Name: Zm_Meristem_P Parameter: Plant Line Value: 35A19
  misc_feature: MA Experiment 108535 PARAMETER Experiment Name: Zm_Meristem_P Parameter: Tissue Value: Root Meristem vs. Above Root Meristem
agagcctctggccgctgcccgaccccgacgccagctgcccagttcttcgccggcgacgagcactccaccagacgagaggggattccaagatgccgagggccaccagcgacgcgaagctcctgatccagtccctcggcaaggcgtacgctgccacaccaacaaatctcaagattattgacctctacgtgggttttgcggttgccactgcccttattcaggttgcttacatgggattggttgggtcgtttcccttcaactccttcctctcaggagtcctttcatgcataggaactgcagttcttgctgtttgcctccgcattcaagtgaacaaagacaacaaagaattcaaggaccttcccccagaaagggcctttgctgatttcgtcctatgcaatctggtgctccacctagtgatcatgaatttcctcggataagcaactgctgcaccatgttggttaaaggttttgtagccctaggttgtggttgctgattgtcgcctttaaatgtttggaactgtcgtgatcgtgatgtcgaatatccatatgatctgttgaaggattacttgtgtaagctgagtattcccggagggagctattagtcgaatggacagtttgcccagcgctgagaatgtaacctagcatgttctttatttgaagaataattcatttttc

SEQ ID NO: 110841 - protein, 143 aa, Zea mays subsp. mays
  misc_feature (1)..(143): Ceres Seq. ID no. 12593693
  misc_feature (32)..(143): Pfam Name: DAD family Pfam Description: DAD family
  misc_feature (30)..(143): Homolog of NCBI NO: 4106446 NR Description: defender against apoptotic death 1 homolog
  misc_feature (29)..(143): Homolog of NCBI NO: 25313138 NR Description: defender against cell death protein
  misc_feature (30)..(143): Homolog of NCBI NO: 20138029 NR Description: Defender against cell death 1 (DAD-1)
  misc_feature (32)..(143): Homolog of NCBI NO: 4126407 NR Description: homolog to defender against apoptotic death 1
  misc_feature (33)..(143): Homolog of NCBI NO: 29423681 NR Description: DAD1 [Petunia x hybrida]
  misc_feature (33)..(143): Homolog of NCBI NO: 20138057 NR Description: Defender against cell death 1 (DAD-1)
  misc_feature (30)..(143): Homolog of NCBI NO: 20138097 NR Description: Defender against cell death 1 (DAD-1)
  misc_feature (30)..(143): Homolog of NCBI NO: 20138059 NR Description: Defender against cell death 1 (DAD-1)
  misc_feature (30)..(143): Homolog of NCBI NO: 20138058 NR Description: Defender against cell death 2 (DAD-2)
  misc_feature (30)..(143): Homolog of NCBI NO: 6014901 NR Description: DEFENDER AGAINST CELL DEATH 1 (DAD-1) (DEFENDER
SLWPLPDPDASCPVLRRRRALHQTRGDSKMPRATSDAKLLIQSLGKAYAATPTNLKIIDLYVGFAVATALIQVAYMGLVGSFPFNSFLSGVLSCIGTAVLAVCLRIQVNKDNKEFKDLPPERAFADFVLCNLVLHLVIMNFLG

SEQ ID NO: 110842 - protein, 114 aa, Zea mays subsp. mays
  misc_feature (1)..(114): Ceres Seq. ID no. 12593694
  misc_feature (3)..(114): Pfam Name: DAD family Pfam Description: DAD family
  misc_feature (1)..(114): Homolog of NCBI NO: 4106446 NR Description: defender against apoptotic death 1 homolog
  misc_feature (1)..(114): Homolog of NCBI NO: 25313138 NR Description: defender against cell death protein
  misc_feature (1)..(114): Homolog of NCBI NO: 20138029 NR Description: Defender against cell death 1 (DAD-1)
  misc_feature (3)..(114): Homolog of NCBI NO: 4126407 NR Description: homolog to defender against apoptotic death 1
  misc_feature (4)..(114): Homolog of NCBI NO: 29423681 NR Description: DAD1 [Petunia x hybrida]
  misc_feature (4)..(114): Homolog of NCBI NO: 20138057 NR Description: Defender against cell death 1 (DAD-1)
  misc_feature (1)..(114): Homolog of NCBI NO: 20138097 NR Description: Defender against cell death 1 (DAD-1)
  misc_feature (1)..(114): Homolog of NCBI NO: 20138059 NR Description: Defender against cell death 1 (DAD-1)
  misc_feature (1)..(114): Homolog of NCBI NO: 20138058 NR Description: Defender against cell death 2 (DAD-2)
  misc_feature (1)..(114): Homolog of NCBI NO: 6014901 NR Description: DEFENDER AGAINST CELL DEATH 1 (DAD-1) (DEFENDER
MPRATSDAKLLIQSLGKAYAATPTNLKIIDLYVGFAVATALIQVAYMGLVGSFPFNSFLSGVLSCIGTAVLAVCLRIQVNKDNKEFKDLPPERAFADFVLCNLVLHLVIMNFLG

SEQ ID NO: 110843 - DNA, 1378 bp, Zea mays subsp. mays
  misc_feature (1)..(1378): Ceres Seq. ID no. 14303290
  misc_feature: MA Experiment ID: 108522 Result: Down-regulated in Transcription
  misc_feature: MA Experiment 108522 PARAMETER Experiment Name: Zm_42deg_Heat_P Parameter: Age (day) Value: 8
  misc_feature: MA Experiment 108522 PARAMETER Experiment Name: Zm_42deg_Heat_P Parameter: Organism Value: Zea mays
  misc_feature: MA Experiment 108522 PARAMETER Experiment Name: Zm_42deg_Heat_P Parameter: Plant Line Value: 35A19
  misc_feature: MA Experiment 108522 PARAMETER Experiment Name: Zm_42deg_Heat_P Parameter: Temperature (deg C) Value: 42 vs. 22
  misc_feature: MA Experiment 108522 PARAMETER Experiment Name: Zm_42deg_Heat_P Parameter: Timepoint (hr) Value: 1
  misc_feature: MA Experiment 108522 PARAMETER Experiment Name: Zm_42deg_Heat_P Parameter: Tissue Value: Aerial
  misc_feature: MA Experiment ID: 108523 Result: Down-regulated in Transcription
  misc_feature: MA Experiment 108523 PARAMETER Experiment Name: Zm_42deg_Heat_P Parameter: Age (day) Value: 8
  misc_feature: MA Experiment 108523 PARAMETER Experiment Name: Zm_42deg_Heat_P Parameter: Organism Value: Zea mays
  misc_feature: MA Experiment 108523 PARAMETER Experiment Name: Zm_42deg_Heat_P Parameter: Plant Line Value: 35A19
  misc_feature: MA Experiment 108523 PARAMETER Experiment Name: Zm_42deg_Heat_P Parameter: Temperature (deg C) Value: 42 vs. 22
  misc_feature: MA Experiment 108523 PARAMETER Experiment Name: Zm_42deg_Heat_P Parameter: Timepoint (hr) Value: 6
  misc_feature: MA Experiment 108523 PARAMETER Experiment Name: Zm_42deg_Heat_P Parameter: Tissue Value: Aerial
  misc_feature: MA Experiment ID: 108527 Result: Down-regulated in Transcription
  misc_feature: MA Experiment 108527 PARAMETER Experiment Name: Zm_5mM_NO_P Parameter: Age (day) Value: 8
  misc_feature: MA Experiment 108527 PARAMETER Experiment Name: Zm_5mM_NO_P Parameter: Organism Value: Zea mays
  misc_feature: MA Experiment 108527 PARAMETER Experiment Name: Zm_5mM_NO_P Parameter: Plant Line Value: 35A19
  misc_feature: MA Experiment 108527 PARAMETER Experiment Name: Zm_5mM_NO_P Parameter: Timepoint (hr) Value: 6
  misc_feature: MA Experiment 108527 PARAMETER Experiment Name: Zm_5mM_NO_P Parameter: Tissue Value: Aerial
  misc_feature: MA Experiment 108527 PARAMETER Experiment Name: Zm_5mM_NO_P Parameter: Treatment Value: 5mM NO vs. No Treatment
  misc_feature: MA Experiment ID: 108535 Result: Down-regulated in Transcription
  misc_feature: MA Experiment 108535 PARAMETER Experiment Name: Zm_Meristem_P Parameter: Age (day) Value: 8
  misc_feature: MA Experiment 108535 PARAMETER Experiment Name: Zm_Meristem_P Parameter: Organism Value: Zea mays
  misc_feature: MA Experiment 108535 PARAMETER Experiment Name: Zm_Meristem_P Parameter: Plant Line Value: 35A19
  misc_feature: MA Experiment 108535 PARAMETER Experiment Name: Zm_Meristem_P Parameter: Tissue Value: Root Meristem vs. Above Root Meristem
  misc_feature: MA Experiment ID: 108543 Result: Up-regulated in Transcription
  misc_feature: MA Experiment ID: 108545 Result: Down-regulated in Transcription
  misc_feature: MA Experiment 108545 PARAMETER Experiment Name: Zm_Imbibed_Seeds_P Parameter: Age (day) Value: 3 vs. 2
  misc_feature: MA Experiment 108545 PARAMETER Experiment Name: Zm_Imbibed_Seeds_P Parameter: Organism Value: Zea mays
  misc_feature: MA Experiment 108545 PARAMETER Experiment Name: Zm_Imbibed_Seeds_P Parameter: Plant Line Value: 35A19
  misc_feature: MA Experiment 108545 PARAMETER Experiment Name: Zm_Imbibed_Seeds_P Parameter: Tissue Value: Aerial vs. Embryo
  misc_feature: MA Experiment ID: 108556 Result: Down-regulated in Transcription
  misc_feature: MA Experiment 108556 PARAMETER Experiment Name: Zm_Drought_P Parameter: Age (day) Value: 9
  misc_feature: MA Experiment 108556 PARAMETER Experiment Name: Zm_Drought_P Parameter: Organism Value: Zea mays
  misc_feature: MA Experiment 108556 PARAMETER Experiment Name: Zm_Drought_P Parameter: Plant Line Value: 35A19
  misc_feature: MA Experiment 108556 PARAMETER Experiment Name: Zm_Drought_P Parameter: Timepoint (hr) Value: 24
  misc_feature: MA Experiment 108556 PARAMETER Experiment Name: Zm_Drought_P Parameter: Tissue Value: Aerial
  misc_feature: MA Experiment 108556 PARAMETER Experiment Name: Zm_Drought_P Parameter: Treatment Value: Drought vs. No Drought
  misc_feature: MA Experiment ID: 20000477 Result: Down-regulated in Transcription
  misc_feature: MA Experiment 20000477 PARAMETER Experiment Name: Zm_5mM_SA_P Parameter: Age (day) Value: 10
  misc_feature: MA Experiment 20000477 PARAMETER Experiment Name: Zm_5mM_SA_P Parameter: Organism Value: Zea mays
  misc_feature: MA Experiment 20000477 PARAMETER Experiment Name: Zm_5mM_SA_P Parameter: Plant Line Value: 35A19
  misc_feature: MA Experiment 20000477 PARAMETER Experiment Name: Zm_5mM_SA_P Parameter: Timepoint (hr) Value: 48
  misc_feature: MA Experiment 20000477 PARAMETER Experiment Name: Zm_5mM_SA_P Parameter: Tissue Value: Aerial
  misc_feature: MA Experiment 20000477 PARAMETER Experiment Name: Zm_5mM_SA_P Parameter: Treatment Value: 5mM SA vs. No Treatment
  misc_feature: MA Experiment ID: 20000478 Result: Down-regulated in Transcription
  misc_feature: MA Experiment 20000478 PARAMETER Experiment Name: Zm_5mM_SA_P Parameter: Age (day) Value: 11
  misc_feature: MA Experiment 20000478 PARAMETER Experiment Name: Zm_5mM_SA_P Parameter: Organism Value: Zea mays
  misc_feature: MA Experiment 20000478 PARAMETER Experiment Name: Zm_5mM_SA_P Parameter: Plant Line Value: 35A19
  misc_feature: MA Experiment 20000478 PARAMETER Experiment Name: Zm_5mM_SA_P Parameter: Timepoint (hr) Value: 72
  misc_feature: MA Experiment 20000478 PARAMETER Experiment Name: Zm_5mM_SA_P Parameter: Tissue Value: Aerial
  misc_feature: MA Experiment 20000478 PARAMETER Experiment Name: Zm_5mM_SA_P Parameter: Treatment Value: 5mM SA vs. No Treatment
  misc_feature: MA Experiment ID: 20000479 Result: Down-regulated in Transcription
  misc_feature: MA Experiment 20000479 PARAMETER Experiment Name: Zm_Drought_P Parameter: Age (day) Value: 10
  misc_feature: MA Experiment 20000479 PARAMETER Experiment Name: Zm_Drought_P Parameter: Organism Value: Zea mays
  misc_feature: MA Experiment 20000479 PARAMETER Experiment Name: Zm_Drought_P Parameter: Plant Line Value: 35A19
  misc_feature: MA Experiment 20000479 PARAMETER Experiment Name: Zm_Drought_P Parameter: Timepoint (hr) Value: 48
  misc_feature: MA Experiment 20000479 PARAMETER Experiment Name: Zm_Drought_P Parameter: Tissue Value: Aerial
  misc_feature: MA Experiment 20000479 PARAMETER Experiment Name: Zm_Drought_P Parameter: Treatment Value: Drought vs. No Drought
  misc_feature: MA Experiment ID: 20000480 Result: Down-regulated in Transcription
  misc_feature: MA Experiment 20000480 PARAMETER Experiment Name: Zm_Drought_P Parameter: Age (day) Value: 11
  misc_feature: MA Experiment 20000480 PARAMETER Experiment Name: Zm_Drought_P Parameter: Organism Value: Zea mays
  misc_feature: MA Experiment 20000480 PARAMETER Experiment Name: Zm_Drought_P Parameter: Plant Line Value: 35A19
  misc_feature: MA Experiment 20000480 PARAMETER Experiment Name: Zm_Drought_P Parameter: Timepoint (hr) Value: 72
  misc_feature: MA Experiment 20000480 PARAMETER Experiment Name: Zm_Drought_P Parameter: Tissue Value: Aerial
  misc_feature: MA Experiment 20000480 PARAMETER Experiment Name: Zm_Drought_P Parameter: Treatment Value: Drought vs. No Drought
  misc_feature: MA Experiment ID: 20000535 Result: Down-regulated in Transcription
  misc_feature: MA Experiment 20000535 PARAMETER Experiment Name: Zm_Hybrid_Seed_Dev_P Parameter: DAP Value: 30 vs. 12
  misc_feature: MA Experiment 20000535 PARAMETER Experiment Name: Zm_Hybrid_Seed_Dev_P Parameter: Organism Value: Zea mays
  misc_feature: MA Experiment 20000535 PARAMETER Experiment Name: Zm_Hybrid_Seed_Dev_P Parameter: Plant Line Value: 35A19
  misc_feature: MA Experiment 20000535 PARAMETER Experiment Name: Zm_Hybrid_Seed_Dev_P Parameter: Tissue Value: Embryo vs. Unfert Floret
ctctttctcttccaaggagaacaaccaccgtctctctctcccccgtctatctcttcttggagcctggagaagaggaaggatcagggaacgggggaagaggttgctgccacagctcaggtctcaagtttggattcagacaagtagacaaacaccagttggttaagatggcagctggtttccagatcggtgtgatcgggtcacttgcactctctgttgcatcttcagtttccattgtcctctgcaacaaagctctcatcagcacacttggttttccattcgctacaacattaacaagctggcatctgatggtgaccttctgcaccctccatgtggcacagcgcttacgtttcttcgagcccaaggcaattgatggacagacagtcatactctttgggttgctgaatggcacgtcaattggtcttctcaatctgagtttaggattcaactccattggattctaccagatgacaaaattggcgatcatacctttcactgtgctattggagactatcttcttgaagaaaagattcagcgagagtatcaagctttctcttctggtcttacttcttggagtaggaattgcttcagttactgatctcaagctaaatctgcttgggtccatcctttctggcctcgccattgccaccacctgtgttggccaaattctcacaaatacaatacagaagaggttgaaggtctcctcaacgcaacttctgtaccaatctgcgccttaccaggcggcaattctgtttgcatctgggccttttgtagatcaactccttactaaccggagtgtctttgcacacaaatactctgctacagttctgggtttcgttgtcctctcttgcttgattgcggtgtctgtgaacttcagtacatttcttgtgattggaacaacatccccagtgacgtaccaggtgcttggtcaccttaagacatgtctggttctatcatttggctacactctattacatgatcctttcactctaaggaacatattgggcattctaattgccatatttgggatggcactatactcctatttctctgtaagagagggcaagaagaagtcagcaaatgatgccctgccagtttcacagatgccagataaggaggttgaaccgcttttggcaactaaagacagcaatgacaccaagaaagcaaatggtttatctcacgactgctagggcttttcttgtagtttaggtctagtatgaactgcccttagaatttaatggacttggaaagccattcttttcattcttgatttcctttttaggaaaggaagattttaaaatttgtagataatgtgtattttgacgttaaagttattgtttgattgtattctacacacagcagttccatctgaagttttact

SEQ ID NO: 110844 - protein, 394 aa, Zea mays subsp. mays
  misc_feature (1)..(394): Ceres Seq. ID no. 14303291
  misc_feature (216)..(347): Pfam Name: Integral membrane protein DUF6 Pfam Description: Integral membrane protein DUF6
  misc_feature (59)..(389): Homolog of NCBI NO: 13699188 NR Description: putative glucose-6-phosphate/phosphate-tranlocat
  misc_feature (59)..(393): Homolog of NCBI NO: 34896140 NR Description: P0701D05.25 [Oryza sativa (japonica
  misc_feature (59)..(389): Homolog of NCBI NO: 22329373 NR Description: transporter-related [Arabidopsis thaliana]
  misc_feature (64)..(366): Homolog of NCBI NO: 18420440 NR Description: transporter-related [Arabidopsis thaliana]
  misc_feature (155)..(389): Homolog of NCBI NO: 25406945 NR Description: hypothetical protein [imported] - Arabidopsis
  misc_feature (155)..(376): Homolog of NCBI NO: 37535412 NR Description: putative
  misc_feature (70)..(383): Homolog of NCBI NO: 15234794 NR Description: transporter-related [Arabidopsis thaliana]
  misc_feature (56)..(390): Homolog of NCBI NO: 27311731 NR Description: putative integral membrane protein [Arabidopsis
  misc_feature (57)..(376): Homolog of NCBI NO: 13384378 NR Description: putative phosphate translocator
  misc_feature (60)..(386): Homolog of NCBI NO: 30683853 NR Description: transporter-related [Arabidopsis thaliana]
LSLPRRTTTVSLSPVYLFLEPGEEEGSGNGGRGCCHSSGLKFGFRQVDKHQLVKMAAGFQIGVIGSLALSVASSVSIVLCNKALISTLGFPFATTLTSWHLMVTFCTLHVAQRLRFFEPKAIDGQTVILFGLLNGTSIGLLNLSLGFNSIGFYQMTKLAIIPFTVLLETIFLKKRFSESIKLSLLVLLLGVGIASVTDLKLNLLGSILSGLAIATTCVGQILTNTIQKRLKVSSTQLLYQSAPYQAAILFASGPFVDQLLTNRSVFAHKYSATVLGFVVLSCLIAVSVNFSTFLVIGTTSPVTYQVLGHLKTCLVLSFGYTLLHDPFTLRNILGILIAIFGMALYSYFSVREGKKKSANDALPVSQMPDKEVEPLLATKDSNDTKKANGLSHDC

SEQ ID NO: 110845 - protein, 340 aa, Zea mays subsp. mays
  misc_feature (1)..(340): Ceres Seq. ID no. 14303292
  misc_feature (162)..(293): Pfam Name: Integral membrane protein DUF6 Pfam Description: Integral membrane protein DUF6
  misc_feature (10)..(312): Homolog of NCBI NO: 18420440 NR Description: transporter-related [Arabidopsis thaliana]
  misc_feature (16)..(329): Homolog of NCBI NO: 15234794 NR Description: transporter-related [Arabidopsis thaliana]
  misc_feature (101)..(335): Homolog of NCBI NO: 25406945 NR Description: hypothetical protein [imported] - Arabidopsis
  misc_feature (101)..(322): Homolog of NCBI NO: 37535412 NR Description: putative
  misc_feature (5)..(335): Homolog of NCBI NO: 13699188 NR Description: putative glucose-6-phosphate/phosphate-tranlocat
  misc_feature (5)..(339): Homolog of NCBI NO: 34896140 NR Description: P0701D05.25 [Oryza sativa (japonica
  misc_feature (5)..(335): Homolog of NCBI NO: 22329373 NR Description: transporter-related [Arabidopsis thaliana]
  misc_feature (2)..(336): Homolog of NCBI NO: 27311731 NR Description: putative integral membrane protein [Arabidopsis
  misc_feature (3)..(322): Homolog of NCBI NO: 13384378 NR Description: putative phosphate translocator
  misc_feature (6)..(332): Homolog of NCBI NO: 30683853 NR Description: transporter-related [Arabidopsis thaliana]
MAAGFQIGVIGSLALSVASSVSIVLCNKALISTLGFPFATTLTSWHLMVTFCTLHVAQRLRFFEPKAIDGQTVILFGLLNGTSIGLLNLSLGFNSIGFYQMTKLAIIPFTVLLETIFLKKRFSESIKLSLLVLLLGVGIASVTDLKLNLLGSILSGLAIATTCVGQILTNTIQKRLKVSSTQLLYQSAPYQAAILFASGPFVDQLLTNRSVFAHKYSATVLGFVVLSCLIAVSVNFSTFLVIGTTSPVTYQVLGHLKTCLVLSFGYTLLHDPFTLRNILGILIAIFGMALYSYFSVREGKKKSANDALPVSQMPDKEVEPLLATKDSNDTKKANGLSHDC

SEQ ID NO: 110846 - protein, 293 aa, Zea mays subsp. mays
  misc_feature (1)..(293): Ceres Seq. ID no. 14303293
  misc_feature (115)..(246): Pfam Name: Integral membrane protein DUF6 Pfam Description: Integral membrane protein DUF6
  misc_feature (1)..(265): Homolog of NCBI NO: 18420440 NR Description: transporter-related [Arabidopsis thaliana]
  misc_feature (1)..(282): Homolog of NCBI NO: 15234794 NR Description: transporter-related [Arabidopsis thaliana]
  misc_feature (54)..(288): Homolog of NCBI NO: 25406945 NR Description: hypothetical protein [imported] - Arabidopsis
  misc_feature (54)..(275): Homolog of NCBI NO: 37535412 NR Description: putative
  misc_feature (1)..(288): Homolog of NCBI NO: 13699188 NR Description: putative glucose-6-phosphate/phosphate-tranlocat
  misc_feature (1)..(292): Homolog of NCBI NO: 34896140 NR Description: P0701D05.25 [Oryza sativa (japonica
  misc_feature (1)..(288): Homolog of NCBI NO: 22329373 NR Description: transporter-related [Arabidopsis thaliana]
  misc_feature (1)..(289): Homolog of NCBI NO: 27311731 NR Description: putative integral membrane protein [Arabidopsis
  misc_feature (1)..(275): Homolog of NCBI NO: 13384378 NR Description: putative phosphate translocator
  misc_feature (1)..(285): Homolog of NCBI NO: 30683853 NR Description: transporter-related [Arabidopsis thaliana]
MVTFCTLHVAQRLRFFEPKAIDGQTVILFGLLNGTSIGLLNLSLGFNSIGFYQMTKLAIIPFTVLLETIFLKKRFSESIKLSLLVLLLGVGIASVTDLKLNLLGSILSGLAIATTCVGQILTNTIQKRLKVSSTQLLYQSAPYQAAILFASGPFVDQLLTNRSVFAHKYSATVLGFVVLSCLIAVSVNFSTFLVIGTTSPVTYQVLGHLKTCLVLSFGYTLLHDPFTLRNILGILIAIFGMALYSYFSVREGKKKSANDALPVSQMPDKEVEPLLATKDSNDTKKANGLSHDC

SEQ ID NO: 110847 - DNA, 601 bp, Zea mays subsp. mays
  misc_feature (1)..(601): Ceres Seq. ID no. 13622541
  misc_feature: MA Experiment ID: 108535 Result: Up-regulated in Transcription
  misc_feature: MA Experiment 108535 PARAMETER Experiment Name: Zm_Meristem_P Parameter: Age (day) Value: 8
  misc_feature: MA Experiment 108535 PARAMETER Experiment Name: Zm_Meristem_P Parameter: Organism Value: Zea mays
  misc_feature: MA Experiment 108535 PARAMETER Experiment Name: Zm_Meristem_P Parameter: Plant Line Value: 35A19
  misc_feature: MA Experiment 108535 PARAMETER Experiment Name: Zm_Meristem_P Parameter: Tissue Value: Root Meristem vs. Above Root Meristem
  misc_feature: MA Experiment ID: 108543 Result: Up-regulated in Transcription
aacaaatcgacgaagtccctgaactcatttccagcctctccgcgccccaaccaccgccaccgcgtgcgagatcacaagcctccacaccgtgaccaccggcgccgctgcggcgtcctgagcaggcggcgagcctcgtgcacagggcaggctcggctcgccggggcggacgagatgagcgggcacgactccaagtacttctctaccaccaagaagggggagatccccgagctgaaggaggagctcaactcccagtacaaggacaagagaaaagatgctgtcaagaaagtgattgctgctatgactgtaggaaaagatgtctcatcattgttcactgatgttgtgaactgcatgcagactgagaacttggagctcaagaaactagtatatttgtatctcatcaactatgctaaaagtcaacctgatcttgccattcttgctgtgaacacatttgttaaggttagaaattctttttcgtaaacgcgtaggagaactgcgcaccaatatattaagaagaatatagaaaaggtcaaaaatagaccacaacaagaaaaaccaccttacggtggcaaaaaaacccggaaatatacaaaagggtccatct

SEQ ID NO: 110848 - protein, 158 aa, Zea mays subsp. mays
  misc_feature (1)..(158): Ceres Seq. ID no. 13622542
  misc_feature (70)..(152): Pfam Name: Adaptin N terminal region Pfam Description: Adaptin N terminal region
  misc_feature (62)..(152): Homolog of NCBI NO: 32699184 NR Description: Adaptin or adaptin-related protein protein 3,
  misc_feature (62)..(152): Homolog of NCBI NO: 21465527 NR Description: Chain B, Ap2 Clathrin Adaptor Core
  misc_feature (41)..(152): Homolog of NCBI NO: 31242911 NR Description: ENSANGP00000013886 [Anopheles gambiae]
  misc_feature (62)..(153): Homolog of NCBI NO: 32699183 NR Description: Adaptin or adaptin-related protein protein 3,
  misc_feature (61)..(152): Homolog of NCBI NO: 7385055 NR Description: beta-adaptin-like protein C [Arabidopsis thaliana]
  misc_feature (58)..(152): Homolog of NCBI NO: 15236506 NR Description: beta-adaptin, putative [Arabidopsis thaliana]
  misc_feature (58)..(152): Homolog of NCBI NO: 18086376 NR Description: AT4g23460/F16G20_160 [Arabidopsis thaliana]
  misc_feature (58)..(152): Homolog of NCBI NO: 15233354 NR Description: beta-adaptin, putative [Arabidopsis thaliana]
  misc_feature (58)..(152): Homolog of NCBI NO: 7385053 NR Description: beta-adaptin-like protein B [Arabidopsis thaliana]
  misc_feature (58)..(152): Homolog of NCBI NO: 7484822 NR Description: beta-adaptin homolog F16G20.160 - Arabidopsis
NKSTKSLNSFPASPRPNHRHRVRDHKPPHRDHRRRCGVLSRRRASCTGQARLAGADEMSGHDSKYFSTTKKGEIPELKEELNSQYKDKRKDAVKKVIAAMTVGKDVSSLFTDVVNCMQTENLELKKLVYLYLINYAKSQPDLAILAVNTFVKVRNSFS

SEQ ID NO: 110849 - protein, 101 aa, Zea mays subsp. mays
  misc_feature (1)..(101): Ceres Seq. ID no. 13622543
  misc_feature (13)..(95): Pfam Name: Adaptin N terminal region Pfam Description: Adaptin N terminal region
  misc_feature (5)..(95): Homolog of NCBI NO: 32699184 NR Description: Adaptin or adaptin-related protein protein 3,
  misc_feature (5)..(95): Homolog of NCBI NO: 21465527 NR Description: Chain B, Ap2 Clathrin Adaptor Core
  misc_feature (1)..(95): Homolog of NCBI NO: 31242911 NR Description: ENSANGP00000013886 [Anopheles gambiae]
  misc_feature (5)..(96): Homolog of NCBI NO: 32699183 NR Description: Adaptin or adaptin-related protein protein 3,
  misc_feature (4)..(95): Homolog of NCBI NO: 7385055 NR Description: beta-adaptin-like protein C [Arabidopsis thaliana]
  misc_feature (1)..(95): Homolog of NCBI NO: 15233354 NR Description: beta-adaptin, putative [Arabidopsis thaliana]
  misc_feature (1)..(95): Homolog of NCBI NO: 15236506 NR Description: beta-adaptin, putative [Arabidopsis thaliana]
  misc_feature (1)..(95): Homolog of NCBI NO: 18086376 NR Description: AT4g23460/F16G20_160 [Arabidopsis thaliana]
  misc_feature (1)..(95): Homolog of NCBI NO: 7385053 NR Description: beta-adaptin-like protein B [Arabidopsis thaliana]
  misc_feature (1)..(95): Homolog of NCBI NO: 7484822 NR Description: beta-adaptin homolog F16G20.160 - Arabidopsis
MSGHDSKYFSTTKKGEIPELKEELNSQYKDKRKDAVKKVIAAMTVGKDVSSLFTDVVNCMQTENLELKKLVYLYLINYAKSQPDLAILAVNTFVKVRNSFS

SEQ ID NO: 110850 - DNA, 970 bp, Zea mays subsp. mays
  misc_feature (1)..(970): Ceres Seq. ID no. 14305939
  misc_feature: MA Experiment ID: 108504 Result: Up-regulated in Transcription
  misc_feature: MA Experiment 108504 PARAMETER Experiment Name: Zm_Drought_P Parameter: Age (day) Value: 8
  misc_feature: MA Experiment 108504 PARAMETER Experiment Name: Zm_Drought_P Parameter: Organism Value: Zea mays
  misc_feature: MA Experiment 108504 PARAMETER Experiment Name: Zm_Drought_P Parameter: Plant Line Value: 35A19
  misc_feature: MA Experiment 108504 PARAMETER Experiment Name: Zm_Drought_P Parameter: Timepoint (hr) Value: 12
  misc_feature: MA Experiment 108504 PARAMETER Experiment Name: Zm_Drought_P Parameter: Tissue Value: Aerial
  misc_feature: MA Experiment 108504 PARAMETER Experiment Name: Zm_Drought_P Parameter: Treatment Value: Drought vs. No Drought
  misc_feature: MA Experiment ID: 108529 Result: Up-regulated in Transcription
  misc_feature: MA Experiment 108529 PARAMETER Experiment Name: Zm_Imbibed_Seeds_P Parameter: Age (day) Value: 5 vs. 2
  misc_feature: MA Experiment 108529 PARAMETER Experiment Name: Zm_Imbibed_Seeds_P Parameter: Organism Value: Zea mays
  misc_feature: MA Experiment 108529 PARAMETER Experiment Name: Zm_Imbibed_Seeds_P Parameter: Plant Line Value: 35A19
  misc_feature: MA Experiment 108529 PARAMETER Experiment Name: Zm_Imbibed_Seeds_P Parameter: Tissue Value: Roots vs. Embryo
  misc_feature: MA Experiment ID: 108536 Result: Up-regulated in Transcription
  misc_feature: MA Experiment 108536 PARAMETER Experiment Name: Zm_Meristem_P Parameter: Age (day) Value: 8
  misc_feature: MA Experiment 108536 PARAMETER Experiment Name: Zm_Meristem_P Parameter: Organism Value: Zea mays
  misc_feature: MA Experiment 108536 PARAMETER Experiment Name: Zm_Meristem_P Parameter: Plant Line Value: 35A19
  misc_feature: MA Experiment 108536 PARAMETER Experiment Name: Zm_Meristem_P Parameter: Tissue Value: Shoot Meristem vs. Above Shoot Meristem
  misc_feature: MA Experiment ID: 108597 Result: Up-regulated in Transcription
  misc_feature: MA Experiment 108597 PARAMETER Experiment Name: Zm_100uM_ABA_P Parameter: Age (day) Value: 9
  misc_feature: MA Experiment 108597 PARAMETER Experiment Name: Zm_100uM_ABA_P Parameter: Organism Value: Zea mays
  misc_feature: MA Experiment 108597 PARAMETER Experiment Name: Zm_100uM_ABA_P Parameter: Plant Line Value: 35A19
  misc_feature: MA Experiment 108597 PARAMETER Experiment Name: Zm_100uM_ABA_P Parameter: Timepoint (hr) Value: 24
  misc_feature: MA Experiment 108597 PARAMETER Experiment Name: Zm_100uM_ABA_P Parameter: Tissue Value: Aerial
  misc_feature: MA Experiment 108597 PARAMETER Experiment Name: Zm_100uM_ABA_P Parameter: Treatment Value: 100uM ABA vs. No Treatment
  misc_feature: MA Experiment ID: 108689 Result: Up-regulated in Transcription
  misc_feature: MA Experiment 108689 PARAMETER Experiment Name: Zm_Drought_Roots_P Parameter: Age (day) Value: 9
  misc_feature: MA Experiment 108689 PARAMETER Experiment Name: Zm_Drought_Roots_P Parameter: Organism Value: Zea mays
  misc_feature: MA Experiment 108689 PARAMETER Experiment Name: Zm_Drought_Roots_P Parameter: Plant Line Value: 35A19
  misc_feature: MA Experiment 108689 PARAMETER Experiment Name: Zm_Drought_Roots_P Parameter: Timepoint (hr) Value: 24
  misc_feature: MA Experiment 108689 PARAMETER Experiment Name: Zm_Drought_Roots_P Parameter: Tissue Value: Roots
  misc_feature: MA Experiment 108689 PARAMETER Experiment Name: Zm_Drought_Roots_P Parameter: Treatment Value: Drought vs. No Drought
  misc_feature: MA Experiment ID: 20000478 Result: Down-regulated in Transcription
  misc_feature: MA Experiment 20000478 PARAMETER Experiment Name: Zm_5mM_SA_P Parameter: Age (day) Value: 11
  misc_feature: MA Experiment 20000478 PARAMETER Experiment Name: Zm_5mM_SA_P Parameter: Organism Value: Zea mays
  misc_feature: MA Experiment 20000478 PARAMETER Experiment Name: Zm_5mM_SA_P Parameter: Plant Line Value: 35A19
  misc_feature: MA Experiment 20000478 PARAMETER Experiment Name: Zm_5mM_SA_P Parameter: Timepoint (hr) Value: 72
  misc_feature: MA Experiment 20000478 PARAMETER Experiment Name: Zm_5mM_SA_P Parameter: Tissue Value: Aerial
  misc_feature: MA Experiment 20000478 PARAMETER Experiment Name: Zm_5mM_SA_P Parameter: Treatment Value: 5mM SA vs. No Treatment
gcacaagcgtccacagctcttgcactagctagagaccgaacagagagagattgaagaaccatgatgaggtctggccttatctcgctatgtttccacctagccctggccatcacactggctgcaagtgttcctggccttgctcgtagtagggtaatcgacatggaaccgcaactcaaaccgacgctgcaactagaaccaaagcatggtgtatctcaaccagacagaaaccaagaacccaaaccgacaccacagcctgagccaaaaccagagcctaaaccggaaccgaaacctgcaccacaaccagaccccaaacccgcaccacagccggacccaaaacccgcaccacaaccggacccaaaaccagaacccaaacctacaccacagccagacccaaaaccttcaccacaaccaggcccagagccgaaacccaagccagcgccacagcctgaaccaaaacccacactgcaaccagatccgaaacctgagccaaaaccaacaccacaaccacccttcccacagcccgagcctcaaccagatcccgaaccccaacccgaaccatccaagccaggccctaaaccccaacctgaaccatccaagctagaacctcagccaggatctaaacctacaccggagccaaaaccctaaccagatccatcgaagcggagccaccgtcgtctcttccaccaccatttggcacgggcgtcgtggaagggaactgagaggagcatagtggaaccgatcatcatcgtggatgccatctatagcttttggctatgactgataagtaatactgtttgtgtaagagtgagctctcttttttatatagggtgtgtgtattgtgtgtagtactatatttggacgatgtgtgtgtacccacctttttccgtgtgtttccatcagcatgcatccatgatccatgtatatgtcttgctaagtttgtattatcaatgaataaaaaaacatgcctttt

SEQ ID NO: 110851 - protein, 194 aa, Zea mays subsp. mays
  misc_feature (1)..(194): Ceres Seq. ID no. 14305940
  misc_feature (50)..(121): Pfam Name: Procyclic acidic repetitive protein (PARP) Pfam Description: Procyclic acidic repetitive protein (PARP)
  misc_feature (35)..(194): Homolog of NCBI NO: 4138732 NR Description: proline-rich protein [Zea mays]
  misc_feature (35)..(194): Homolog of NCBI NO: 4138732 NR Description: proline-rich protein [Zea mays]
  misc_feature (35)..(194): Homolog of NCBI NO: 4138732 NR Description: proline-rich protein [Zea mays]
  misc_feature (33)..(194): Homolog of NCBI NO: 29367369 NR Description: proline-rich protein [Oryza sativa (japonica
  misc_feature (35)..(194): Homolog of NCBI NO: 29367369 NR Description: proline-rich protein [Oryza sativa (japonica
  misc_feature (35)..(194): Homolog of NCBI NO: 4138732 NR Description: proline-rich protein [Zea mays]
  misc_feature (35)..(194): Homolog of NCBI NO: 4138732 NR Description: proline-rich protein [Zea mays]
  misc_feature (35)..(194): Homolog of NCBI NO: 4138732 NR Description: proline-rich protein [Zea mays]
  misc_feature (2)..(194): Homolog of NCBI NO: 22830955 NR Description: contains ESTs
  misc_feature (2)..(194): Homolog of NCBI NO: 22830951 NR Description: contains ESTs
MMRSGLISLCFHLALAITLAASVPGLARSRVIDMEPQLKPTLQLEPKHGVSQPDRNQEPKPTPQPEPKPEPKPEPKPAPQPDPKPAPQPDPKPAPQPDPKPEPKPTPQPDPKPSPQPGPEPKPKPAPQPEPKPTLQPDPKPEPKPTPQPPFPQPEPQPDPEPQPEPSKPGPKPQPEPSKLEPQPGSKPTPEPKP

SEQ ID NO: 110852 - protein, 193 aa, Zea mays subsp. mays
  misc_feature (1)..(193): Ceres Seq. ID no. 14305941
  misc_feature (49)..(120): Pfam Name: Procyclic acidic repetitive protein (PARP) Pfam Description: Procyclic acidic repetitive protein (PARP)
  misc_feature (34)..(193): Homolog of NCBI NO: 4138732 NR Description: proline-rich protein [Zea mays]
  misc_feature (34)..(193): Homolog of NCBI NO: 4138732 NR Description: proline-rich protein [Zea mays]
  misc_feature (34)..(193): Homolog of NCBI NO: 4138732 NR Description: proline-rich protein [Zea mays]
  misc_feature (32)..(193): Homolog of NCBI NO: 29367369 NR Description: proline-rich protein [Oryza sativa (japonica
  misc_feature (34)..(193): Homolog of NCBI NO: 29367369 NR Description: proline-rich protein [Oryza sativa (japonica
  misc_feature (34)..(193): Homolog of NCBI NO: 4138732 NR Description: proline-rich protein [Zea mays]
  misc_feature (34)..(193): Homolog of NCBI NO: 4138732 NR Description: proline-rich protein [Zea mays]
  misc_feature (34)..(193): Homolog of NCBI NO: 4138732 NR Description: proline-rich protein [Zea mays]
  misc_feature (1)..(193): Homolog of NCBI NO: 22830955 NR Description: contains ESTs
  misc_feature (1)..(193): Homolog of NCBI NO: 22830951 NR Description: contains ESTs
MRSGLISLCFHLALAITLAASVPGLARSRVIDMEPQLKPTLQLEPKHGVSQPDRNQEPKPTPQPEPKPEPKPEPKPAPQPDPKPAPQPDPKPAPQPDPKPEPKPTPQPDPKPSPQPGPEPKPKPAPQPEPKPTLQPDPKPEPKPTPQPPFPQPEPQPDPEPQPEPSKPGPKPQPEPSKLEPQPGSKPTPEPKP

SEQ ID NO: 110853 - protein, 161 aa, Zea mays subsp. mays
  misc_feature (1)..(161): Ceres Seq. ID no. 14305942
  misc_feature (17)..(88): Pfam Name: Procyclic acidic repetitive protein (PARP) Pfam Description: Procyclic acidic repetitive protein (PARP)
  misc_feature (2)..(161): Homolog of NCBI NO: 4138732 NR Description: proline-rich protein [Zea mays]
  misc_feature (2)..(161): Homolog of NCBI NO: 4138732 NR Description: proline-rich protein [Zea mays]
  misc_feature (2)..(161): Homolog of NCBI NO: 4138732 NR Description: proline-rich protein [Zea mays]
  misc_feature (1)..(161): Homolog of NCBI NO: 29367369 NR Description: proline-rich protein [Oryza sativa (japonica
  misc_feature (2)..(161): Homolog of NCBI NO: 29367369 NR Description: proline-rich protein [Oryza sativa (japonica
  misc_feature (2)..(161): Homolog of NCBI NO: 4138732 NR Description: proline-rich protein [Zea mays]
  misc_feature (2)..(161): Homolog of NCBI NO: 4138732 NR Description: proline-rich protein [Zea mays]
  misc_feature (2)..(161): Homolog of NCBI NO: 4138732 NR Description: proline-rich protein [Zea mays]
  misc_feature (1)..(161): Homolog of NCBI NO: 22830955 NR Description: contains ESTs
  misc_feature (1)..(161): Homolog of NCBI NO: 22830951 NR Description: contains ESTs
MEPQLKPTLQLEPKHGVSQPDRNQEPKPTPQPEPKPEPKPEPKPAPQPDPKPAPQPDPKPAPQPDPKPEPKPTPQPDPKPSPQPGPEPKPKPAPQPEPKPTLQPDPKPEPKPTPQPPFPQPEPQPDPEPQPEPSKPGPKPQPEPSKLEPQPGSKPTPEPKP

SEQ ID NO: 110854 - protein, 132 aa, Zea mays subsp. mays
  misc_feature (1)..(132): Ceres Seq. ID no. 14305943
  misc_feature (1)..(132): Pfam Name: Ubiquitin carboxyl-terminal hydrolase Pfam Description: Ubiquitin carboxyl-terminal hydrolase
MVYLNQTETKNPNRHHSLSQNQSLNRNRNLHHNQTPNPHHSRTQNPHHNRTQNQNPNLHHSQTQNLHHNQAQSRNPSQRHSLNQNPHCNQIRNLSQNQHHNHPSHSPSLNQIPNPNPNHPSQALNPNLNHPS

SEQ ID NO: 110855 - DNA, 1239 bp, Zea mays subsp. mays
  misc_feature (1)..(1239): Ceres Seq. ID no. 14302164
taggctctaggttctttgaacattttaagttgttcactccaagtgtgaaaccaggtccctatttggacctgaagtgaagcattttaaagttgaaggacccagattctcacttcgagagtttatgaacctagatgagaatctaaggctctggaagttatggaacttgaccagaaaatagatctagttcatgagcttgatggtcatattatgcaatgtgtccgtgatcaaaatggaaatcacgttatacagaagtgcattgagtgtgtccccacagaacatattggttttgtagtgtctgcttttcagggacaagttactagcctttcaatgcatccatatggctgccgtgtaattcagagaatcttggagcactgcggtggtaactcacaaggccagtgcataatagacgagatattacagtgggtgtgcatccttgcgcaggatcagtatggcaactatgttacacagcatgttctagaaagaggaaaagctcatgagaggagccaaattattactaaattggccgggcaggttgttaccatgagccaaaataaatatgcatcaaatgtgatagagaagtgttttcaacatggtgatattgcggagcgggatcttctgatcagacggattgtggagcagacagagggcaacaacaatttattggcaatgatgaaggaccagtatgctaattacgtggtccataagatacttgaaacttgcaacgaggatcagcgggagcttctgctcagccacgtaaaggatcatatgcaagcattgaggaagtacacatacggcaagcacatcgtaagccgagtcgagcagctctgtggcgacgttgtcaccctttcaggaactgccgagtcaggttcttgaaacgaaccgccgcctaattcttcataggctggagggtgtcctgctcttttgctcattccgtcagtgacgaagaaagcaaaacggatcaagtctaactctggcgcttcagaacagactaacaaagctgtcgtcgaagattgtataggtatgactctgttcagggatagtcttgaggttatagaacagaagggtagtggtgtgcatcagtgtatctgtttactggataatagtggttggttaggtgtgtgcagaaaaagtttagcgctatggtttgtatgtgatacatattaactgtgccttggaatgttcatatgttgtcctgattgcgtgtgatatctctcgttcagttcaagttgcgttttctgc

SEQ ID NO: 110856 - protein, 238 aa, Zea mays subsp. mays
  misc_feature (1)..(238): Ceres Seq. ID no. 14302165
  misc_feature (12)..(46): Pfam Name: Pumilio-family RNA binding repeat Pfam Description: Pumilio-family RNA binding repeat
  misc_feature (1)..(223): Homolog of NCBI NO: 20465637 NR Description: putative pumilio/Mpt5 family RNA-binding protein
  misc_feature (1)..(223): Homolog of NCBI NO: 15227051 NR Description: pumilio-family RNA-binding protein, putative
  misc_feature (1)..(223): Homolog of NCBI NO: 15227052 NR Description: pumilio-family RNA-binding protein, putative
  misc_feature (1)..(223): Homolog of NCBI NO: 15227038 NR Description: pumilio-family RNA-binding protein, putative
  misc_feature (1)..(223): Homolog of NCBI NO: 20513851 NR Description: BPM [Hordeum vulgare]
  misc_feature (1)..(223): Homolog of NCBI NO: 14719326 NR Description: putative pumilio/Mpt5 family RNA-binding protein
  misc_feature (1)..(204): Homolog of NCBI NO: 8071634 NR Description: pumilio domain-containing protein PPD1
  misc_feature (1)..(223): Homolog of NCBI NO: 34908236 NR Description: putative pumilio/Mpt5 family RNA-binding protein
  misc_feature (1)..(237): Homolog of NCBI NO: 30685690 NR Description: pumilio-family RNA-binding protein, putative
  misc_feature (1)..(237): Homolog of NCBI NO: 9293981 NR Description: RNA binding protein-like [Arabidopsis thaliana]
MELDQKIDLVHELDGHIMQCVRDQNGNHVIQKCIECVPTEHIGFVVSAFQGQVTSLSMHPYGCRVIQRILEHCGGNSQGQCIIDEILQWVCILAQDQYGNYVTQHVLERGKAHERSQIITKLAGQVVTMSQNKYASNVIEKCFQHGDIAERDLLIRRIVEQTEGNNNLLAMMKDQYANYVVHKILETCNEDQRELLLSHVKDHMQALRKYTYGKHIVSRVEQLCGDVVTLSGTAESGS

SEQ ID NO: 110857 - protein, 221 aa, Zea mays subsp. mays
  misc_feature (1)..(221): Ceres Seq. ID no. 14302166
  misc_feature (1)..(29): Pfam Name: Pumilio-family RNA binding repeat Pfam Description: Pumilio-family RNA binding repeat
  misc_feature (1)..(187): Homolog of NCBI NO: 8071634 NR Description: pumilio domain-containing protein PPD1
  misc_feature (1)..(206): Homolog of NCBI NO: 34908236 NR Description: putative pumilio/Mpt5 family RNA-binding protein
  misc_feature (1)..(206): Homolog of NCBI NO: 20465637 NR Description: putative pumilio/Mpt5 family RNA-binding protein
  misc_feature (1)..(206): Homolog of NCBI NO: 15227052 NR Description: pumilio-family RNA-binding protein, putative
  misc_feature (1)..(206): Homolog of NCBI NO: 20513851 NR Description: BPM [Hordeum vulgare]
  misc_feature (1)..(206): Homolog of NCBI NO: 14719326 NR Description: putative pumilio/Mpt5 family RNA-binding protein
  misc_feature (1)..(206): Homolog of NCBI NO: 15227038 NR Description: pumilio-family RNA-binding protein, putative
  misc_feature (1)..(206): Homolog of NCBI NO: 15227051 NR Description: pumilio-family RNA-binding protein, putative
  misc_feature (1)..(220): Homolog of NCBI NO: 30685690 NR Description: pumilio-family RNA-binding protein, putative
  misc_feature (1)..(220): Homolog of NCBI NO: 9293981 NR Description: RNA binding protein-like [Arabidopsis thaliana]
MQCVRDQNGNHVIQKCIECVPTEHIGFVVSAFQGQVTSLSMHPYGCRVIQRILEHCGGNSQGQCIIDEILQWVCILAQDQYGNYVTQHVLERGKAHERSQIITKLAGQVVTMSQNKYASNVIEKCFQHGDIAERDLLIRRIVEQTEGNNNLLAMMKDQYANYVVHKILETCNEDQRELLLSHVKDHMQALRKYTYGKHIVSRVEQLCGDVVTLSGTAESGS

SEQ ID NO: 110858 - protein, 181 aa, Zea mays subsp. mays
  misc_feature (1)..(181): Ceres Seq. ID no. 14302167
  misc_feature (1)..(166): Homolog of NCBI NO: 20465637 NR Description: putative pumilio/Mpt5 family RNA-binding protein
  misc_feature (1)..(166): Homolog of NCBI NO: 15227051 NR Description: pumilio-family RNA-binding protein, putative
  misc_feature (1)..(166): Homolog of NCBI NO: 15227052 NR Description: pumilio-family RNA-binding protein, putative
  misc_feature (1)..(166): Homolog of NCBI NO: 15227038 NR Description: pumilio-family RNA-binding protein, putative
  misc_feature (1)..(166): Homolog of NCBI NO: 20513851 NR Description: BPM [Hordeum vulgare]
  misc_feature (1)..(166): Homolog of NCBI NO: 14719326 NR Description: putative pumilio/Mpt5 family RNA-binding protein
  misc_feature (1)..(147): Homolog of NCBI NO: 8071634 NR Description: pumilio domain-containing protein PPD1
  misc_feature (1)..(166): Homolog of NCBI NO: 34908236 NR Description: putative pumilio/Mpt5 family RNA-binding protein
  misc_feature (1)..(180): Homolog of NCBI NO: 30685690 NR Description: pumilio-family RNA-binding protein, putative
  misc_feature (1)..(180): Homolog of NCBI NO: 9293981 NR Description: RNA binding protein-like [Arabidopsis thaliana]
MHPYGCRVIQRILEHCGGNSQGQCIIDEILQWVCILAQDQYGNYVTQHVLERGKAHERSQIITKLAGQVVTMSQNKYASNVIEKCFQHGDIAERDLLIRRIVEQTEGNNNLLAMMKDQYANYVVHKILETCNEDQRELLLSHVKDHMQALRKYTYGKHIVSRVEQLCGDVVTLSGTAESGS

SEQ ID NO: 110859 - DNA, 1904 bp, Zea mays subsp. mays
  misc_feature (1)..(1904): Ceres Seq. ID no. 15180208
accattcgcccccctcacgtcccatcgcgccgctcccttcgtcctggggtgtcctcctccatggccaccgccaccgccgcctgccgctcgcccacggccgccgccgccgcgccctgacgctgctgctgctgctagactgctagaggaggaggccggggcaggcagctcgcgagctcgatcgcctggcgggcccgagctggagtcgatggtgctggatctcaatgccgagtcgccgacgcccggctcggcctcggccgcctcgagctccagcgtcgtagtgggcgggggcttcttccggttcgacctgctcggagggacacccgacgaggagggttgctcgccctcgccacccatcgtgacgcgccagctcttccccttgccgtacccggacgctgcaggtagcaccgccgcctcgacggcgtcgaacgggtcgccgccgccggaggtggcgggggcatgggcgcgccgcccagcggatctcggggcgccggcgctggcacaggggaaggtgatgtctgcgccttcgtcgcccgcggttttgtctcctgccgccgggaagaagagccggcgggggcccaggtcgcggagctcgcaataccggggcgtcaccttctacaggaggaccggccgctgggagtcacacatctgggactgcgggaagcaggtctacctgggtggatttgatactgcgcacgccgcagcaagggcctatgatcgcgctgccatcaagttcagaggccttgacgccgacatcaacttccagttgaaggactatgaagatgacttgaagcagatgaggaattggactaaggaggagtttgttcacatactccgacgtcaaagcactgggtttgccagggggagctcaaagtaccgcggtgtgacactacacaagtgtggtcggtgggaagctcggatgggtcagcttctcggaaagaagtacatctaccttggtctatttgacagtgaaatcgaagcagcaagagcgtatgatagggcagccattcgcttcaatggaccggatgctgttaggaactttgattctgtttcctatgatggagatgtcccacttccacctgcaattgagaaagatgtggttgatggagacatccttgatctgaatttgaggatttcacaacctaacgtgcatgatctcagaagtgatggtaccctgactggttttggattaagttgtaattctcctgaagcttcaagctccattgtttctcagccaatgggcccccagtggcctgtccatcctcacagcagatcgatgcggccccagcatccacatctgtatgcatctccttgtccaggcttctttgtgaacctcagggaggcgcctatgcaggaagaggagaaccggtccgagccggcgtgtccccagccgttcccctcctgggcatggcaaacgcagggctcccgtgccccagttctccctgccaccactgcagcatcatcaggattctctaccgccgctgccaccggcgtggacgcggccacagccggccacagcgtgccgccgccgtctggtagcctccggcagttctcgggctaccaccagctccgcttccccccaaccgcctgacggagacagaccacctcctgttgagttggcggcggcggcggcgtctcatagctggccggtggttggctggctgcccatgcaacgccacgccggtgggtgcgggtcggtattcggtaacagtcgccactgttgggtatggttttgtgggactacagaggatgcagtgatctctcgctgctgctgtgtgctgtctctctcgctccctctacccacccacacctgtttgtaatatgaatttatcgccctctcgcgctcgtgattcgtccatcttcgtttcgttttgatggccaccggatgggatcatgagcgtgttgcg

SEQ ID NO: 110860 - protein, 528 aa, Zea mays subsp. mays
  misc_feature (1)..(528): Ceres Seq. ID no. 15180209
  misc_feature (196)..(259): Pfam Name: AP2 domain Pfam Description: AP2 domain
  misc_feature (94)..(428): Homolog of NCBI NO: 21717332 NR Description: transcription factor AHAP2 [Malus x domestica]
  misc_feature (186)..(497): Homolog of NCBI NO: 5081557 NR Description: PHAP2B protein [Petunia x hybrida]
  misc_feature (103)..(395): Homolog of NCBI NO: 38345500 NR Description: OSJNBa0010D21.13 [Oryza sativa (japonica
  misc_feature (65)..(383): Homolog of NCBI NO: 15234566 NR Description: floral homeotic protein APETALA2 [Arabidopsis
  misc_feature (148)..(509): Homolog of NCBI NO: 25354653 NR Description: probable AP2 domain transcription factor
  misc_feature (69)..(445): Homolog of NCBI NO: 28876023 NR Description: putative transcription factor AP2 family protein,
  misc_feature (73)..(508): Homolog of NCBI NO: 7489779 NR Description: indeterminate spikelet 1 - maize
  misc_feature (69)..(528): Homolog of NCBI NO: 29124121 NR Description: APETALA2-like protein [Oryza sativa (japonica
  misc_feature (69)..(513): Homolog of NCBI NO: 18476518 NR Description: APETALA2-like protein [Hordeum vulgare]
  misc_feature (69)..(528): Homolog of NCBI NO: 34900512 NR Description: putative indeterminate spikelet 1
PFAPLTSHRAAPFVLGCPPPWPPPPPPAARPRPPPPRPDAAAAARLLEEEAGAGSSRARSPGGPELESMVLDLNAESPTPGSASAASSSSVVVGGGFFRFDLLGGTPDEEGCSPSPPIVTRQLFPLPYPDAAGSTAASTASNGSPPPEVAGAWARRPADLGAPALAQGKVMSAPSSPAVLSPAAGKKSRRGPRSRSSQYRGVTFYRRTGRWESHIWDCGKQVYLGGFDTAHAAARAYDRAAIKFRGLDADINFQLKDYEDDLKQMRNWTKEEFVHILRRQSTGFARGSSKYRGVTLHKCGRWEARMGQLLGKKYIYLGLFDSEIEAARAYDRAAIRFNGPDAVRNFDSVSYDGDVPLPPAIEKDVVDGDILDLNLRISQPNVHDLRSDGTLTGFGLSCNSPEASSSIVSQPMGPQWPVHPHSRSMRPQHPHLYASPCPGFFVNLREAPMQEEENRSEPACPQPFPSWAWQTQGSRAPVLPATTAASSGFSTAAATGVDAATAGHSVPPPSGSLRQFSGYHQLRFPPTA

SEQ ID NO: 110861 - protein, 460 aa, Zea mays subsp. mays
  misc_feature (1)..(460): Ceres Seq. ID no. 15180210
  misc_feature (128)..(191): Pfam Name: AP2 domain Pfam Description: AP2 domain
  misc_feature (26)..(360): Homolog of NCBI NO: 21717332 NR Description: transcription factor AHAP2 [Malus x domestica]
  misc_feature (118)..(429): Homolog of NCBI NO: 5081557 NR Description: PHAP2B protein [Petunia x hybrida]
  misc_feature (35)..(327): Homolog of NCBI NO: 38345500 NR Description: OSJNBa0010D21.13 [Oryza sativa (japonica
  misc_feature (1)..(315): Homolog of NCBI NO: 15234566 NR Description: floral homeotic protein APETALA2 [Arabidopsis
  misc_feature (80)..(441): Homolog of NCBI NO: 25354653 NR Description: probable AP2 domain transcription factor
  misc_feature (1)..(377): Homolog of NCBI NO: 28876023 NR Description: putative transcription factor AP2 family protein,
  misc_feature (5)..(440): Homolog of NCBI NO: 7489779 NR Description: indeterminate spikelet 1 - maize
  misc_feature (1)..(460): Homolog of NCBI NO: 29124121 NR Description: APETALA2-like protein [Oryza sativa (japonica
  misc_feature (1)..(445): Homolog of NCBI NO: 18476518 NR Description: APETALA2-like protein [Hordeum vulgare]
  misc_feature (1)..(460): Homolog of NCBI NO: 34900512 NR Description: putative indeterminate spikelet 1
MVLDLNAESPTPGSASAASSSSVVVGGGFFRFDLLGGTPDEEGCSPSPPIVTRQLFPLPYPDAAGSTAASTASNGSPPPEVAGAWARRPADLGAPALAQGKVMSAPSSPAVLSPAAGKKSRRGPRSRSSQYRGVTFYRRTGRWESHIWDCGKQVYLGGFDTAHAAARAYDRAAIKFRGLDADINFQLKDYEDDLKQMRNWTKEEFVHILRRQSTGFARGSSKYRGVTLHKCGRWEARMGQLLGKKYIYLGLFDSEIEAARAYDRAAIRFNGPDAVRNFDSVSYDGDVPLPPAIEKDVVDGDILDLNLRISQPNVHDLRSDGTLTGFGLSCNSPEASSSIVSQPMGPQWPVHPHSRSMRPQHPHLYASPCPGFFVNLREAPMQEEENRSEPACPQPFPSWAWQTQGSRAPVLPATTAASSGFSTAAATGVDAATAGHSVPPPSGSLRQFSGYHQLRFPPTA

SEQ ID NO: 110862 - protein, 358 aa, Zea mays subsp. mays
  misc_feature (1)..(358): Ceres Seq. ID no. 15180211
  misc_feature (26)..(89): Pfam Name: AP2 domain Pfam Description: AP2 domain
  misc_feature (1)..(258): Homolog of NCBI NO: 21717332 NR Description: transcription factor AHAP2 [Malus x domestica]
  misc_feature (16)..(327): Homolog of NCBI NO: 5081557 NR Description: PHAP2B protein [Petunia x hybrida]
  misc_feature (1)..(225): Homolog of NCBI NO: 38345500 NR Description: OSJNBa0010D21.13 [Oryza sativa (japonica
  misc_feature (1)..(213): Homolog of NCBI NO: 15234566 NR Description: floral homeotic protein APETALA2 [Arabidopsis
  misc_feature (1)..(339): Homolog of NCBI NO: 25354653 NR Description: probable AP2 domain transcription factor
  misc_feature (1)..(275): Homolog of NCBI NO: 28876023 NR Description: putative transcription factor AP2 family protein,
  misc_feature (1)..(338): Homolog of NCBI NO: 7489779 NR Description: indeterminate spikelet 1 - maize
  misc_feature (1)..(358): Homolog of NCBI NO: 29124121 NR Description: APETALA2-like protein [Oryza sativa (japonica
  misc_feature (1)..(343): Homolog of NCBI NO: 18476518 NR Description: APETALA2-like protein [Hordeum vulgare]
  misc_feature (1)..(358): Homolog of NCBI NO: 34900512 NR Description: putative indeterminate spikelet 1
MSAPSSPAVLSPAAGKKSRRGPRSRSSQYRGVTFYRRTGRWESHIWDCGKQVYLGGFDTAHAAARAYDRAAIKFRGLDADINFQLKDYEDDLKQMRNWTKEEFVHILRRQSTGFARGSSKYRGVTLHKCGRWEARMGQLLGKKYIYLGLFDSEIEAARAYDRAAIRFNGPDAVRNFDSVSYDGDVPLPPAIEKDVVDGDILDLNLRISQPNVHDLRSDGTLTGFGLSCNSPEASSSIVSQPMGPQWPVHPHSRSMRPQHPHLYASPCPGFFVNLREAPMQEEENRSEPACPQPFPSWAWQTQGSRAPVLPATTAASSGFSTAAATGVDAATAGHSVPPPSGSLRQFSGYHQLRFPPTA

SEQ ID NO: 110863 - DNA, 421 bp, Zea mays subsp. mays
  misc_feature (1)..(421): Ceres Seq. ID no. 13624441
  misc_feature: MA Experiment ID: 108687 Result: Up-regulated in Transcription
  misc_feature: MA Experiment 108687 PARAMETER Experiment Name: Zm_Embryos-Flowers__P Parameter: Tissue Value: Embryo vs. Aerial+
acctaggcgagctgccgagctattgctcggcgcctccatctcgtccacaccacacagccgttgagtccaattcgctcactcaccgtcaaacccacacctcaaactccttcccttcaagaatgtcagattatccactgcggcctcttcctcctcttcctccgcccctcccaccatgattgccacccatctctccccagccctcaagcagtaccgcttcccgtccccgctccactccacctctcacaaccaccaccttcccgtgcacctcccgctcccccgccgccaccgcaacttcgctaagcccgccgcggccgcgccagacctcctcgccagcgtcgagtccgtggtctccgcggcctccgtcctggccgccatcgtgctcgtccacgagtccgggcacttcctggccgcggcctcccgg

SEQ ID NO: 110864 - protein, 83 aa, Zea mays subsp. mays
  misc_feature (1)..(83): Ceres Seq. ID no. 13624442
  misc_feature (2)..(82): Homolog of NCBI NO: 29837756 NR Description: unknown protein [Oryza sativa (japonica
MIATHLSPALKQYRFPSPLHSTSHNHHLPVHLPLPRRHRNFAKPAAAAPDLLASVESVVSAASVLAAIVLVHESGHFLAAASR

SEQ ID NO: 110865 - protein, 57 aa, Zea mays subsp. mays
  misc_feature (1)..(57): Ceres Seq. ID no. 13624443
  misc_feature (5)..(57): Pfam Name: Extensin-like region Pfam Description: Extensin-like region
  misc_feature (43)..(57): Homolog of NCBI NO: 283045 NR Description: hydroxyproline-rich glycoprotein - maize
  misc_feature (4)..(57): Homolog of NCBI NO: 12018149 NR Description: gamete-specific hydroxyproline-rich glycoprotein
  misc_feature (4)..(57): Homolog of NCBI NO: 186396 NR Description: mucin
  misc_feature (5)..(57): Homolog of NCBI NO: 188864 NR Description: mucin
  misc_feature (37)..(57): Homolog of NCBI NO: 6523547 NR Description: hydroxyproline-rich glycoprotein DZ-HRGP
  misc_feature (31)..(57): Homolog of NCBI NO: 15320736 NR Description: unknown [Epiphyas postvittana
  misc_feature (5)..(57): Homolog of NCBI NO: 30387315 NR Description: unknown [Choristoneura fumiferana MNPV]
  misc_feature (10)..(57): Homolog of NCBI NO: 14253159 NR Description: VMP3 protein [Volvox carteri f. nagariensis]
  misc_feature (5)..(57): Homolog of NCBI NO: 283032 NR Description: hydroxyproline-rich glycoprotein - perennial
  misc_feature (10)..(57): Homolog of NCBI NO: 20138131 NR Description: Vegetative cell wall protein gp1 precursor
LGELPSYCSAPPSRPHHTAVESNSLTHRQTHTSNSFPSRMSDYPLRPLPPLPPPLPP

SEQ ID NO: 110866 - DNA, 1533 bp, Zea mays subsp. mays
  misc_feature (1)..(1533): Ceres Seq. ID no. 15180420
atacgcactgacacgaatctcacaattctcagctgaacaagtccacgtcgaagagtctaacgcgttcgttgcgcttgcgcacttgcgccggccaatcatgttgcggccgccgtctcccgtcctctacgtccaggaaaagaagaccgccgtcgccggaatcttcggcgaccgccacttcttcgacgccgcctccttctctgacatccgtgccgcccgtgtcgccgtcgcggtcccgaacccgcaggcccagccacccgcctcccgccgcgctctcctcctccgttaccatcgcctcctctcctccgcccgtaatgacacctgcgccttcgacgagacgttgtacatcacctggcacgacgccttccgcccccacctgaagcacacagccgcctccctccgcttggagaaggccgccatcgtgttcaacgtcggcgcggccgcctcgaggatcgcggcgaccgtgagccgcgccacggaggaaggggtaagggcggcgtgcggggagtttcagcgcgccgcgggggcgttccgtgcggttggggagatgatggaagaggaagaggcgacgacggtggatatgagttctcatgcctcggcgatgctggagcggctcatgctcgcgcaggcgcaggagtgctgtttcgagcgcgctctcgacgcagggaaatcacagacagtgtgctcgaaagtggctaggcaggctgccctgtactatgaagaagcttatgctgcacttgttgctcctccgctgcagaaccactttgaaagatcatggatatcccatatccaattgaaggctgctctgttcaatgccgaagcttgttacaggtacactattgaactccatgggaagacagaaattggtgaggagatatctcgattgcaggtcggaattaaggcacttgtggatgcaaagcgaactgcaagaggagctcctggacccctgtatgattatgctttcagactagaacaagatatgaacaagaacatggagacagcgaaagaggagaattttcgtgtatacctttttcgcattccagctgccgaatcattggcctctctaccatcagcttcactcgtccgttctgcatccttgagtgagatcttaaatccaaagacagaaaataccactcaatctccataaatggatgcatttggtatggtaaaattatggaacggtacacgaatagttgcacttgcatgtaaagatttccctttatagcagaaattttagggttgataatgtttattgtcattcttattttgttgctttgccggagcctaaataggtgcacaattcagatgataatatttgcagaggtgcaactaatatttgtgttgacacgtttgtgatatgttatgaacttatgatgccctcgcataggaagcttttttgctgctaggtagtttctatttatttggtgcttttcaacttgaagtcatcatcagttctaccatcctatcctgttggggttttaagcaaaatgagctatgagaactctattatctgtgcataaatatccttttcttgtt

SEQ ID NO: 110867 - protein, 380 aa, Zea mays subsp. mays
  misc_feature (1)..(380): Ceres Seq. ID no. 15180421
  misc_feature (50)..(176): Pfam Name: BRO1-like domain Pfam Description: BRO1-like domain
  misc_feature (117)..(368): Homolog of NCBI NO: 32436411 NR Description: PalA protein [Emericella nidulans]
  misc_feature (91)..(372): Homolog of NCBI NO: 32766357 NR Description: Unknown (protein for MGC:63638) [Danio rerio]
  misc_feature (115)..(361): Homolog of NCBI NO: 24308073 NR Description: protein tyrosine phosphatase, non-receptor type 23
  misc_feature (115)..(361): Homolog of NCBI NO: 20521926 NR Description: KIAA1471 protein [Homo sapiens]
  misc_feature (56)..(368): Homolog of NCBI NO: 19880054 NR Description: ALG-2 interacting protein X [Dictyostelium
  misc_feature (263)..(374): Homolog of NCBI NO: 25518358 NR Description: hypothetical protein F9L1.7 [imported] -
  misc_feature (85)..(241): Homolog of NCBI NO: 25518358 NR Description: hypothetical protein F9L1.7 [imported] -
  misc_feature (85)..(374): Homolog of NCBI NO: 23297205 NR Description: At1g15130/F9L1_7 [Arabidopsis thaliana]
  misc_feature (85)..(374): Homolog of NCBI NO: 15218061 NR Description: proline-rich protein family [Arabidopsis thaliana]
  misc_feature (50)..(379): Homolog of NCBI NO: 37535674 NR Description: putative signal tranduction protein
YALTRISQFSAEQVHVEESNAFVALAHLRRPIMLRPPSPVLYVQEKKTAVAGIFGDRHFFDAASFSDIRAARVAVAVPNPQAQPPASRRALLLRYHRLLSSARNDTCAFDETLYITWHDAFRPHLKHTAASLRLEKAAIVFNVGAAASRIAATVSRATEEGVRAACGEFQRAAGAFRAVGEMMEEEEATTVDMSSHASAMLERLMLAQAQECCFERALDAGKSQTVCSKVARQAALYYEEAYAALVAPPLQNHFERSWISHIQLKAALFNAEACYRYTIELHGKTEIGEEISRLQVGIKALVDAKRTARGAPGPLYDYAFRLEQDMNKNMETAKEENFRVYLFRIPAAESLASLPSASLVRSASLSEILNPKTENTTQSP

SEQ ID NO: 110868 - protein, 348 aa, Zea mays subsp. mays
  misc_feature (1)..(348): Ceres Seq. ID no. 15180422
  misc_feature (18)..(144): Pfam Name: BRO1-like domain Pfam Description: BRO1-like domain
  misc_feature (85)..(336): Homolog of NCBI NO: 32436411 NR Description: PalA protein [Emericella nidulans]
  misc_feature (59)..(340): Homolog of NCBI NO: 32766357 NR Description: Unknown (protein for MGC:63638) [Danio rerio]
  misc_feature (83)..(329): Homolog of NCBI NO: 24308073 NR Description: protein tyrosine phosphatase, non-receptor type 23
  misc_feature (83)..(329): Homolog of NCBI NO: 20521926 NR Description: KIAA1471 protein [Homo sapiens]
  misc_feature (24)..(336): Homolog of NCBI NO: 19880054 NR Description: ALG-2 interacting protein X [Dictyostelium
  misc_feature (231)..(342): Homolog of NCBI NO: 25518358 NR Description: hypothetical protein F9L1.7 [imported] -
  misc_feature (53)..(209): Homolog of NCBI NO: 25518358 NR Description: hypothetical protein F9L1.7 [imported] -
  misc_feature (53)..(342): Homolog of NCBI NO: 23297205 NR Description: At1g15130/F9L1_7 [Arabidopsis thaliana]
  misc_feature (53)..(342): Homolog of NCBI NO: 15218061 NR Description: proline-rich protein family [Arabidopsis thaliana]
  misc_feature (18)..(347): Homolog of NCBI NO: 37535674 NR Description: putative signal tranduction protein
MLRPPSPVLYVQEKKTAVAGIFGDRHFFDAASFSDIRAARVAVAVPNPQAQPPASRRALLLRYHRLLSSARNDTCAFDETLYITWHDAFRPHLKHTAASLRLEKAAIVFNVGAAASRIAATVSRATEEGVRAACGEFQRAAGAFRAVGEMMEEEEATTVDMSSHASAMLERLMLAQAQECCFERALDAGKSQTVCSKVARQAALYYEEAYAALVAPPLQNHFERSWISHIQLKAALFNAEACYRYTIELHGKTEIGEEISRLQVGIKALVDAKRTARGAPGPLYDYAFRLEQDMNKNMETAKEENFRVYLFRIPAAESLASLPSASLVRSASLSEILNPKTENTTQSP

SEQ ID NO: 110869 - protein, 199 aa, Zea mays subsp. mays
  misc_feature (1)..(199): Ceres Seq. ID no. 15180423
  misc_feature (1)..(187): Homolog of NCBI NO: 32436411 NR Description: PalA protein [Emericella nidulans]
  misc_feature (1)..(191): Homolog of NCBI NO: 32766357 NR Description: Unknown (protein for MGC:63638) [Danio rerio]
  misc_feature (1)..(180): Homolog of NCBI NO: 24308073 NR Description: protein tyrosine phosphatase, non-receptor type 23
  misc_feature (1)..(180): Homolog of NCBI NO: 20521926 NR Description: KIAA1471 protein [Homo sapiens]
  misc_feature (1)..(187): Homolog of NCBI NO: 19880054 NR Description: ALG-2 interacting protein X [Dictyostelium
  misc_feature (82)..(193): Homolog of NCBI NO: 25518358 NR Description: hypothetical protein F9L1.7 [imported] -
  misc_feature (1)..(60): Homolog of NCBI NO: 25518358 NR Description: hypothetical protein F9L1.7 [imported] -
  misc_feature (1)..(193): Homolog of NCBI NO: 23297205 NR Description: At1g15130/F9L1_7 [Arabidopsis thaliana]
  misc_feature (1)..(193): Homolog of NCBI NO: 15218061 NR Description: proline-rich protein family [Arabidopsis thaliana]
  misc_feature (1)..(198): Homolog of NCBI NO: 37535674 NR Description: putative signal tranduction protein
MMEEEEATTVDMSSHASAMLERLMLAQAQECCFERALDAGKSQTVCSKVARQAALYYEEAYAALVAPPLQNHFERSWISHIQLKAALFNAEACYRYTIELHGKTEIGEEISRLQVGIKALVDAKRTARGAPGPLYDYAFRLEQDMNKNMETAKEENFRVYLFRIPAAESLASLPSASLVRSASLSEILNPKTENTTQSP

SEQ ID NO: 110870 - DNA, 1440 bp, Zea mays subsp. mays
  misc_feature (1)..(1440): Ceres Seq. ID no. 15180204
atttccaccacctcgcaccaggctccactcctctccttcccttccctccccctttcgctcccctcctcgctcgcctcgcttctcgccgagccacccgaccaattcccccgccccccgcgcgcccagatcgccgccattcccttccccgccctgccgcgacgatcccgctgccaccgcaccttctccctcccgtcgtcctcccctccccgcagctggcggtcggtcggtcggacggaggaagccacagccggcggccagagagcgccgcagcgtgcccgcggatgggctggtaggaggcggcggcggcggtgactgtgttagcggcggcggcggcagccatgtatttcgccaaactcgatgactcgcccatgttccggacgcagatacaatcacttgaggagagtgctgaattgctgagagagagatgtttgaagttccataaaggttgccgtaagtatactgaaggactaggggaagcatacgatggagatattgcatttgccagctcacttgaaacatttggaggaggccacaatgatccaatgagtgtcgcttttggtgggcctgtaatgaccaaatttacaattgccttaagagaaattggaacatacaaggaagtcctgcgctcccaggttgagcacatgttaaatgacagattactgaattttgttgacattgatttgcatgatgtgaaggatgctcataagcgctttgacaaggctagcctctcatatgaccagattcgtgaaaagtacctatcattgaagaaaggtacccgaccggacataacaacagcaattgaagatgagcttcacagtgctagatcttcatttgagcaagctcgtttcaacctggtcacttcactttcccatgtcgaggcaaagaagagatttgaatttttggaggctgttagtgcgacaatggattcacatcttcgttattttaaacaaggatatgaactattgcatcaaatggagccatatattaatcagattcttgcttatgcacagcaatcacgagaaagagcaaacaaggaacaagcttctcttgtagagaggatgcatgagtacaaaaggcagatagatcgggaaagtcggtcttctataaatggtttgaatgattcttataatggtgatcgaatgcagacaattggcagaagttcacataaacagatcgaggcagttatgcagtcaacttcaaaaggaaaggtcgagaccattcgtcaaggttatctttcgaaaagatcttcaaacttgagagctgactggaaaagaaggttcttcgtacttgatagtcgaggaatgctgtactactatcggaaacaaattactcggccacctgtaggtctccgatgtaacattcgttgttgaaatgctcattaagttggcataatattttgttccatgatgcatgatatattttaattcagatattttcctc

SEQ ID NO: 110871 - protein, 343 aa, Zea mays subsp. mays
  misc_feature (1)..(343): Ceres Seq. ID no. 15180205
  misc_feature (125)..(328): Homolog of NCBI NO: 15240398 NR Description: ARF GTPase-activating domain-containing protein
  misc_feature (3)..(173): Homolog of NCBI NO: 26452519 NR Description: putative GCN4-complementing protein [Arabidopsis
  misc_feature (155)..(290): Homolog of NCBI NO: 38175545 NR Description: putative ARF GTPase-activating domain-containing
  misc_feature (3)..(203): Homolog of NCBI NO: 12323336 NR Description: putative GCN4-complementing protein, 3'partial;
  misc_feature (1)..(228): Homolog of NCBI NO: 38175545 NR Description: putative ARF GTPase-activating domain-containing
  misc_feature (1)..(204): Homolog of NCBI NO: 15240398 NR Description: ARF GTPase-activating domain-containing protein
  misc_feature (3)..(327): Homolog of NCBI NO: 15219822 NR Description: ARF GTPase-activating domain-containing protein
  misc_feature (3)..(327): Homolog of NCBI NO: 30681946 NR Description: ARF GTPase-activating domain-containing protein
  misc_feature (19)..(290): Homolog of NCBI NO: 11358303 NR Description: hypothetical protein T31B5.120 - Arabidopsis
  misc_feature (1)..(290): Homolog of NCBI NO: 30684352 NR Description: ARF GTPase-activating domain-containing protein
MYFAKLDDSPMFRTQIQSLEESAELLRERCLKFHKGCRKYTEGLGEAYDGDIAFASSLETFGGGHNDPMSVAFGGPVMTKFTIALREIGTYKEVLRSQVEHMLNDRLLNFVDIDLHDVKDAHKRFDKASLSYDQIREKYLSLKKGTRPDITTAIEDELHSARSSFEQARFNLVTSLSHVEAKKRFEFLEAVSATMDSHLRYFKQGYELLHQMEPYINQILAYAQQSRERANKEQASLVERMHEYKRQIDRESRSSINGLNDSYNGDRMQTIGRSSHKQIEAVMQSTSKGKVETIRQGYLSKRSSNLRADWKRRFFVLDSRGMLYYYRKQITRPPVGLRCNIRC

SEQ ID NO: 110872 - protein, 333 aa, Zea mays subsp. mays
  misc_feature (1)..(333): Ceres Seq. ID no. 15180206
  misc_feature (115)..(318): Homolog of NCBI NO: 15240398 NR Description: ARF GTPase-activating domain-containing protein
  misc_feature (1)..(163): Homolog of NCBI NO: 26452519 NR Description: putative GCN4-complementing protein [Arabidopsis
  misc_feature (145)..(280): Homolog of NCBI NO: 38175545 NR Description: putative ARF GTPase-activating domain-containing
  misc_feature (1)..(193): Homolog of NCBI NO: 12323336 NR Description: putative GCN4-complementing protein, 3'partial;
  misc_feature (1)..(218): Homolog of NCBI NO: 38175545 NR Description: putative ARF GTPase-activating domain-containing
  misc_feature (1)..(194): Homolog of NCBI NO: 15240398 NR Description: ARF GTPase-activating domain-containing protein
  misc_feature (1)..(317): Homolog of NCBI NO: 15219822 NR Description: ARF GTPase-activating domain-containing protein
  misc_feature (1)..(317): Homolog of NCBI NO: 30681946 NR Description: ARF GTPase-activating domain-containing protein
  misc_feature (9)..(280): Homolog of NCBI NO: 11358303 NR Description: hypothetical protein T31B5.120 - Arabidopsis
  misc_feature (1)..(280): Homolog of NCBI NO: 30684352 NR Description: ARF GTPase-activating domain-containing protein
MFRTQIQSLEESAELLRERCLKFHKGCRKYTEGLGEAYDGDIAFASSLETFGGGHNDPMSVAFGGPVMTKFTIALREIGTYKEVLRSQVEHMLNDRLLNFVDIDLHDVKDAHKRFDKASLSYDQIREKYLSLKKGTRPDITTAIEDELHSARSSFEQARFNLVTSLSHVEAKKRFEFLEAVSATMDSHLRYFKQGYELLHQMEPYINQILAYAQQSRERANKEQASLVERMHEYKRQIDRESRSSINGLNDSYNGDRMQTIGRSSHKQIEAVMQSTSKGKVETIRQGYLSKRSSNLRADWKRRFFVLDSRGMLYYYRKQITRPPVGLRCNIRC

SEQ ID NO: 110873 - protein, 275 aa, Zea mays subsp. mays
  misc_feature (1)..(275): Ceres Seq. ID no. 15180207
  misc_feature (57)..(260): Homolog of NCBI NO: 15240398 NR Description: ARF GTPase-activating domain-containing protein
  misc_feature (1)..(105): Homolog of NCBI NO: 26452519 NR Description: putative GCN4-complementing protein [Arabidopsis
  misc_feature (87)..(222): Homolog of NCBI NO: 38175545 NR Description: putative ARF GTPase-activating domain-containing
  misc_feature (1)..(135): Homolog of NCBI NO: 12323336 NR Description: putative GCN4-complementing protein, 3'partial;
  misc_feature (1)..(160): Homolog of NCBI NO: 38175545 NR Description: putative ARF GTPase-activating domain-containing
  misc_feature (1)..(136): Homolog of NCBI NO: 15240398 NR Description: ARF GTPase-activating domain-containing protein
  misc_feature (1)..(259): Homolog of NCBI NO: 15219822 NR Description: ARF GTPase-activating domain-containing protein
  misc_feature (1)..(259): Homolog of NCBI NO: 30681946 NR Description: ARF GTPase-activating domain-containing protein
  misc_feature (1)..(222): Homolog of NCBI NO: 11358303 NR Description: hypothetical protein T31B5.120 - Arabidopsis
  misc_feature (1)..(222): Homolog of NCBI NO: 30684352 NR Description: ARF GTPase-activating domain-containing protein
MSVAFGGPVMTKFTIALREIGTYKEVLRSQVEHMLNDRLLNFVDIDLHDVKDAHKRFDKASLSYDQIREKYLSLKKGTRPDITTAIEDELHSARSSFEQARFNLVTSLSHVEAKKRFEFLEAVSATMDSHLRYFKQGYELLHQMEPYINQILAYAQQSRERANKEQASLVERMHEYKRQIDRESRSSINGLNDSYNGDRMQTIGRSSHKQIEAVMQSTSKGKVETIRQGYLSKRSSNLRADWKRRFFVLDSRGMLYYYRKQITRPPVGLRCNIRC

SEQ ID NO: 110874 - DNA, 1120 bp, Zea mays subsp. mays
  misc_feature (1)..(1120): Ceres Seq. ID no. 14305739
aaaccctcaacctacagcagcgcgccagcgccgctccgcccgcccatgggctcctcatcccactctctcgccgtctcacggcgcggccgcagcgcgcggcagtcccccttctttcgagacctcgccaccccgatcccgtcccatcgtggcgtgtcccgctttgcctcgggggcttccccctcctccaccccaccacccccgccgcccatcttcaccctcgatgaccgctatgcctccgcagacttctccccggaccccaccgcctccgaccttctccccgtcgcgtcgtctccctccccccgcaccgctgccagccgctcgccgccatgggacctgtcccggggcaaggtggcgctctcggcaccaggatcccccatggctggggtcgtcgagccgacccggaaagagatgctcgctttgccggcccctgcgagccctggcaccccacctcctgccgcgacagcggaggcgcagtcaccggtgtcccccgcgcaggcacctaggacggagccggtggcgaacgcaggggaggtcgaacgggaggagtgggtcactgtatttggattctcttttggtgataccaaccttattcttcgggaattcgagaaatgtggagtaatattgagacatcactctggtccaagagatggaaattggatccacatattgtaccagcgttcttatgatgctcgaaaggcccttcagaaaaatgttatccaactaagcagcagtctgatagttggagtaaagcctattgatgcagtgcaccggcagcagctggacaagagtttcgctccaagcaatccaggtggatttatggtttccttgccttcgaagtcacttggcttgaagagcacaggcgcatcgaaccagttaggaggctttaaccggctgtatgacctcaaagctaacacaaatgttagccgagatgcaggccgtcgggcaactggcagtgttgctgcaccagcaaaatcaattgtaaccaatgtaatggatttggtatttggcatttgatttggcaatgagattgaggaccaatgcatccggaaccttctctgtttcttccgtttacttgttcgagaatgccaccattccaaagattcaacagcaaattttgctg

SEQ ID NO: 110875 - protein, 337 aa, Zea mays subsp. mays
  misc_feature (1)..(337): Ceres Seq. ID no. 14305740
  misc_feature (175)..(262): Pfam Name: MPPN (rrm-like) domain Pfam Description: MPPN (rrm-like) domain
  misc_feature (54)..(281): Homolog of NCBI NO: 32450351 NR Description: Unknown (protein for MGC:64281) [Xenopus laevis]
  misc_feature (54)..(336): Homolog of NCBI NO: 4584796 NR Description: mitotic phosphoprotein 44 [Xenopus laevis]
  misc_feature (54)..(336): Homolog of NCBI NO: 15987768 NR Description: mitotic phosphoprotein 44 [Xenopus laevis]
  misc_feature (11)..(336): Homolog of NCBI NO: 19223941 NR Description: mitotic phosphoprotein 44 [Mus musculus]
  misc_feature (8)..(336): Homolog of NCBI NO: 31982904 NR Description: mitotic phosphoprotein 44 [Homo sapiens]
  misc_feature (8)..(336): Homolog of NCBI NO: 19223939 NR Description: mitotic phosphoprotein 44 [Homo sapiens]
  misc_feature (11)..(336): Homolog of NCBI NO: 34856476 NR Description: similar to CG6540-PA [Rattus norvegicus]
  misc_feature (66)..(336): Homolog of NCBI NO: 17979410 NR Description: unknown protein [Arabidopsis thaliana]
  misc_feature (66)..(337): Homolog of NCBI NO: 18401087 NR Description: expressed protein [Arabidopsis thaliana]
  misc_feature (83)..(337): Homolog of NCBI NO: 34903646 NR Description: B1015E06.6 [Oryza sativa (japonica
KPSTYSSAPAPLRPPMGSSSHSLAVSRRGRSARQSPFFRDLATPIPSHRGVSRFASGASPSSTPPPPPPIFTLDDRYASADFSPDPTASDLLPVASSPSPRTAASRSPPWDLSRGKVALSAPGSPMAGVVEPTRKEMLALPAPASPGTPPPAATAEAQSPVSPAQAPRTEPVANAGEVEREEWVTVFGFSFGDTNLILREFEKCGVILRHHSGPRDGNWIHILYQRSYDARKALQKNVIQLSSSLIVGVKPIDAVHRQQLDKSFAPSNPGGFMVSLPSKSLGLKSTGASNQLGGFNRLYDLKANTNVSRDAGRRATGSVAAPAKSIVTNVMDLVFGI

SEQ ID NO: 110876 - protein, 322 aa, Zea mays subsp. mays
  misc_feature (1)..(322): Ceres Seq. ID no. 14305741
  misc_feature (160)..(247): Pfam Name: MPPN (rrm-like) domain Pfam Description: MPPN (rrm-like) domain
  misc_feature (39)..(266): Homolog of NCBI NO: 32450351 NR Description: Unknown (protein for MGC:64281) [Xenopus laevis]
  misc_feature (39)..(321): Homolog of NCBI NO: 4584796 NR Description: mitotic phosphoprotein 44 [Xenopus laevis]
  misc_feature (39)..(321): Homolog of NCBI NO: 15987768 NR Description: mitotic phosphoprotein 44 [Xenopus laevis]
  misc_feature (1)..(321): Homolog of NCBI NO: 19223941 NR Description: mitotic phosphoprotein 44 [Mus musculus]
  misc_feature (1)..(321): Homolog of NCBI NO: 31982904 NR Description: mitotic phosphoprotein 44 [Homo sapiens]
  misc_feature (1)..(321): Homolog of NCBI NO: 19223939 NR Description: mitotic phosphoprotein 44 [Homo sapiens]
  misc_feature (1)..(321): Homolog of NCBI NO: 34856476 NR Description: similar to CG6540-PA [Rattus norvegicus]
  misc_feature (51)..(321): Homolog of NCBI NO: 17979410 NR Description: unknown protein [Arabidopsis thaliana]
  misc_feature (51)..(322): Homolog of NCBI NO: 18401087 NR Description: expressed protein [Arabidopsis thaliana]
  misc_feature (68)..(322): Homolog of NCBI NO: 34903646 NR Description: B1015E06.6 [Oryza sativa (japonica
MGSSSHSLAVSRRGRSARQSPFFRDLATPIPSHRGVSRFASGASPSSTPPPPPPIFTLDDRYASADFSPDPTASDLLPVASSPSPRTAASRSPPWDLSRGKVALSAPGSPMAGVVEPTRKEMLALPAPASPGTPPPAATAEAQSPVSPAQAPRTEPVANAGEVEREEWVTVFGFSFGDTNLILREFEKCGVILRHHSGPRDGNWIHILYQRSYDARKALQKNVIQLSSSLIVGVKPIDAVHRQQLDKSFAPSNPGGFMVSLPSKSLGLKSTGASNQLGGFNRLYDLKANTNVSRDAGRRATGSVAAPAKSIVTNVMDLVFGI

SEQ ID NO: 110877 - protein, 212 aa, Zea mays subsp. mays
  misc_feature (1)..(212): Ceres Seq. ID no. 14305742
  misc_feature (50)..(137): Pfam Name: MPPN (rrm-like) domain Pfam Description: MPPN (rrm-like) domain
  misc_feature (1)..(156): Homolog of NCBI NO: 32450351 NR Description: Unknown (protein for MGC:64281) [Xenopus laevis]
  misc_feature (1)..(211): Homolog of NCBI NO: 4584796 NR Description: mitotic phosphoprotein 44 [Xenopus laevis]
  misc_feature (1)..(211): Homolog of NCBI NO: 15987768 NR Description: mitotic phosphoprotein 44 [Xenopus laevis]
  misc_feature (1)..(211): Homolog of NCBI NO: 19223941 NR Description: mitotic phosphoprotein 44 [Mus musculus]
  misc_feature (1)..(211): Homolog of NCBI NO: 31982904 NR Description: mitotic phosphoprotein 44 [Homo sapiens]
  misc_feature (1)..(211): Homolog of NCBI NO: 19223939 NR Description: mitotic phosphoprotein 44 [Homo sapiens]
  misc_feature (1)..(211): Homolog of NCBI NO: 34856476 NR Description: similar to CG6540-PA [Rattus norvegicus]
  misc_feature (1)..(211): Homolog of NCBI NO: 17979410 NR Description: unknown protein [Arabidopsis thaliana]
  misc_feature (1)..(212): Homolog of NCBI NO: 18401087 NR Description: expressed protein [Arabidopsis thaliana]
  misc_feature (1)..(212): Homolog of NCBI NO: 34903646 NR Description: B1015E06.6 [Oryza sativa (japonica
MAGVVEPTRKEMLALPAPASPGTPPPAATAEAQSPVSPAQAPRTEPVANAGEVEREEWVTVFGFSFGDTNLILREFEKCGVILRHHSGPRDGNWIHILYQRSYDARKALQKNVIQLSSSLIVGVKPIDAVHRQQLDKSFAPSNPGGFMVSLPSKSLGLKSTGASNQLGGFNRLYDLKANTNVSRDAGRRATGSVAAPAKSIVTNVMDLVFGI

SEQ ID NO: 110878 - DNA, 1026 bp, Zea mays subsp. mays
  misc_feature (1)..(1026): Ceres Seq. ID no. 15180470
  misc_feature: MA Experiment ID: 108687 Result: Up-regulated in Transcription
  misc_feature: MA Experiment 108687 PARAMETER Experiment Name: Zm_Embryos-Flowers__P Parameter: Tissue Value: Embryo vs. Aerial+
  misc_feature: MA Experiment ID: 20000492 Result: Up-regulated in Transcription
  misc_feature: MA Experiment 20000492 PARAMETER Experiment Name: Zm_Hybrid_Seed_Dev_P Parameter: DAP Value: 12
  misc_feature: MA Experiment 20000492 PARAMETER Experiment Name: Zm_Hybrid_Seed_Dev_P Parameter: Organism Value: Zea mays
  misc_feature: MA Experiment 20000492 PARAMETER Experiment Name: Zm_Hybrid_Seed_Dev_P Parameter: Plant Line Value: 35A19
  misc_feature: MA Experiment 20000492 PARAMETER Experiment Name: Zm_Hybrid_Seed_Dev_P Parameter: Tissue Value: Fert Kernel vs. Unfert Floret
cggcattctcttgtttgtccattgcacatgcacgcgctcaatggcaacggaggagcggcgattaatggatctggcacggactgtgccggcgatcctcctgctcgtcggcacctcgggaaaggccgtcgcgagcatcaagtgcgcccgcgagctgttcgccgggaagcagtggggcttcgatgactccgacgaccccgagtctccgccctccaacaccgaccgaggcggaaactgcagcgtcggcgaacctatggagacgtccaccggaggagacggcgatcacaacggcagcggcgtaccctggaagaccacccgcggcagccagtcccagacgaggcttccatcttgggccgtggtgcaccacggcggctactgggccaacatcctcgccttagcgctggcccccgtagagggccacctccccgccgcctaccgtgagatcacgcgcctcgtctcgctccacgccgaggccggccacgtcttcgtcaactgcgccgagggcctcggcctcaagccccaccccgccgcgccgtgggagcggtggatggacctccgggaggcggccgtctgccacgcccacgacgcgctgctggcgctgagctccgccgcggcggcagccacggcggccgaggacttcctccggtggcagttccccgagtccccgcgcgggaaagggtgatggtcggcggcgcggcagctcgtggaagacgcctggcgcagcctcggcgaggccaagaacgcggcgaggctcatggacaacgccgtgctctgcgagttcttcaccacctggatgattctgacgcgcgcttaactgaaggcgcattgctgatggcgacgcccctgcctgcttttgcaacttgttattactccagtacttgtgctccaatttcattcgatttctgtgtgcacatttcaataagtggttctttgctggtataaatggaaatggcctgatccgcctgggtcaataagattgtaataagtggttctttgctccaatttcattctttgccggttgttcttctg

SEQ ID NO: 110879 - protein, 225 aa, Zea mays subsp. mays
  misc_feature (1)..(225): Ceres Seq. ID no. 15180471
  misc_feature (12)..(56): Homolog of NCBI NO: 34895978 NR Description: P0011G08.31 [Oryza sativa (japonica
  misc_feature (139)..(225): Homolog of NCBI NO: 34895978 NR Description: P0011G08.31 [Oryza sativa (japonica
  misc_feature (81)..(225): Homolog of NCBI NO: 34895982 NR Description: P0011G08.33 [Oryza sativa (japonica
GILLFVHCTCTRSMATEERRLMDLARTVPAILLLVGTSGKAVASIKCARELFAGKQWGFDDSDDPESPPSNTDRGGNCSVGEPMETSTGGDGDHNGSGVPWKTTRGSQSQTRLPSWAVVHHGGYWANILALALAPVEGHLPAAYREITRLVSLHAEAGHVFVNCAEGLGLKPHPAAPWERWMDLREAAVCHAHDALLALSSAAAAATAAEDFLRWQFPESPRGKG

SEQ ID NO: 110880 - protein, 212 aa, Zea mays subsp. mays
  misc_feature (1)..(212): Ceres Seq. ID no. 15180472
  misc_feature (1)..(43): Homolog of NCBI NO: 34895978 NR Description: P0011G08.31 [Oryza sativa (japonica
  misc_feature (126)..(212): Homolog of NCBI NO: 34895978 NR Description: P0011G08.31 [Oryza sativa (japonica
  misc_feature (68)..(212): Homolog of NCBI NO: 34895982 NR Description: P0011G08.33 [Oryza sativa (japonica
MATEERRLMDLARTVPAILLLVGTSGKAVASIKCARELFAGKQWGFDDSDDPESPPSNTDRGGNCSVGEPMETSTGGDGDHNGSGVPWKTTRGSQSQTRLPSWAVVHHGGYWANILALALAPVEGHLPAAYREITRLVSLHAEAGHVFVNCAEGLGLKPHPAAPWERWMDLREAAVCHAHDALLALSSAAAAATAAEDFLRWQFPESPRGKG

SEQ ID NO: 110881 - protein, 204 aa, Zea mays subsp. mays
  misc_feature (1)..(204): Ceres Seq. ID no. 15180473
  misc_feature (1)..(35): Homolog of NCBI NO: 34895978 NR Description: P0011G08.31 [Oryza sativa (japonica
  misc_feature (118)..(204): Homolog of NCBI NO: 34895978 NR Description: P0011G08.31 [Oryza sativa (japonica
  misc_feature (60)..(204): Homolog of NCBI NO: 34895982 NR Description: P0011G08.33 [Oryza sativa (japonica
MDLARTVPAILLLVGTSGKAVASIKCARELFAGKQWGFDDSDDPESPPSNTDRGGNCSVGEPMETSTGGDGDHNGSGVPWKTTRGSQSQTRLPSWAVVHHGGYWANILALALAPVEGHLPAAYREITRLVSLHAEAGHVFVNCAEGLGLKPHPAAPWERWMDLREAAVCHAHDALLALSSAAAAATAAEDFLRWQFPESPRGKG

SEQ ID NO: 110882 - DNA, 1444 bp, Zea mays subsp. mays
  misc_feature (1)..(1444): Ceres Seq. ID no. 15180145
aactgtcattagcatatttcccatgccggtcctgcccctggctccgttcgttgtcttctatctcccctgggcgtcatcttctacctctcgctctctgtgttcattcgagtttgtttccccaacagcctttccttcccttctctcgccgcagatcttgcccgtgaaggtgaaggtaggagattggagatctcgccagagtgggtgccctgcgccgcagacgccattggacactgttctcctcggttctcaaggggtcgacaccagtgtccagatctcgttgaaccctacctgttgcacatttggctgccaggagccgagccctccccacatttagctgttggtttgtgcactttagtttgaataatagtatgaacgatgaggtggttccccatggatgaaacgaatgcatgcattgtcgaagagcaagagtgggcattgacttgtattggatatgatgatcttgagacacacactacactggggagtgcacatgctatacatgatattgattgggattcaataatagtagaagaaatgactagtgaagaaggaagaaatgatgttactagtgaacaaggactctactttcaacttggactagctactgaagatgacaaaagggaagatgattgtagtgctccccgttttggaaatagcattccatgtgaagatgaattgggagcagtcattccatgttcagatttagtgcttgatgagactaggaccatatatggtatgaacaatccagtaatggagcctagtagcttgtgtgcaaaaatgcaccactttagactcgcaatcagacaatacgccataaataaagaatttgagcttggaattgaggctaccaacaagactagatttagagggtattgtaaagggcctgattgcccctggagcattcatgctagaccggagaccaaaggggctataacaattcaagtgatcgtcttgaatggcaaacatacttgtacctccagtggtagacgaaagacggctacacctacaggagcttgggttgcggcacgtgcgcttccattactaatgaagaagcctcatatgggtgctaaggagctacaaactacattgcatgacacttttggttgtaccattgcatatgacacagtttggcacggtaaagagaaagctttgaaggaattatttggcagttgggaagagagctttcagcttttgtggccttggagagaagcagttatgcaaaagtcgccggatagtgtcattgagcttgatgtaaaaatggatgagggtcgtcctttcttcagttgattcttttgtgcacttggtccatgcatttatggattcaagggtggttgctgaccataccttagtgttgacttgatgaaagtcgcctaaagggggtgaataggcaagtctgaaatttataaactttaagacaactacaagccgggttagcgttagaaac

SEQ ID NO: 110883 - protein, 303 aa, Zea mays subsp. mays
  misc_feature (1)..(303): Ceres Seq. ID no. 15180146
  misc_feature (106)..(259): Pfam Name: MuDR family transposase Pfam Description: MuDR family transposase
  misc_feature (196)..(299): Homolog of NCBI NO: 34903312 NR Description: unnamed protein product [Oryza sativa (japonica
  misc_feature (30)..(303): Homolog of NCBI NO: 22758277 NR Description: Putative Mutator protein [Oryza sativa (japonica
  misc_feature (30)..(303): Homolog of NCBI NO: 32489130 NR Description: OSJNBb0018J12.10 [Oryza sativa (japonica
  misc_feature (6)..(303): Homolog of NCBI NO: 37535470 NR Description: putative mutator protein [Oryza sativa (japonica
  misc_feature (44)..(96): Homolog of NCBI NO: 37531668 NR Description: putative transposable element
  misc_feature (99)..(303): Homolog of NCBI NO: 37531668 NR Description: putative transposable element
  misc_feature (224)..(303): Homolog of NCBI NO: 23928448 NR Description: putative MURAZC [Zea mays]
  misc_feature (123)..(303): Homolog of NCBI NO: 22375 NR Description: unnamed protein product [Zea mays]
  misc_feature (44)..(303): Homolog of NCBI NO: 1857256 NR Description: MURAZC [Zea mays]
  misc_feature (44)..(303): Homolog of NCBI NO: 2130141 NR Description: mudrA protein - maize transposon MuDR
MRWFPMDETNACIVEEQEWALTCIGYDDLETHTTLGSAHAIHDIDWDSIIVEEMTSEEGRNDVTSEQGLYFQLGLATEDDKREDDCSAPRFGNSIPCEDELGAVIPCSDLVLDETRTIYGMNNPVMEPSSLCAKMHHFRLAIRQYAINKEFELGIEATNKTRFRGYCKGPDCPWSIHARPETKGAITIQVIVLNGKHTCTSSGRRKTATPTGAWVAARALPLLMKKPHMGAKELQTTLHDTFGCTIAYDTVWHGKEKALKELFGSWEESFQLLWPWREAVMQKSPDSVIELDVKMDEGRPFFS

SEQ ID NO: 110884 - protein, 298 aa, Zea mays subsp. mays
  misc_feature (1)..(298): Ceres Seq. ID no. 15180147
  misc_feature (101)..(254): Pfam Name: MuDR family transposase Pfam Description: MuDR family transposase
  misc_feature (191)..(294): Homolog of NCBI NO: 34903312 NR Description: unnamed protein product [Oryza sativa (japonica
  misc_feature (25)..(298): Homolog of NCBI NO: 22758277 NR Description: Putative Mutator protein [Oryza sativa (japonica
  misc_feature (25)..(298): Homolog of NCBI NO: 32489130 NR Description: OSJNBb0018J12.10 [Oryza sativa (japonica
  misc_feature (1)..(298): Homolog of NCBI NO: 37535470 NR Description: putative mutator protein [Oryza sativa (japonica
  misc_feature (39)..(91): Homolog of NCBI NO: 37531668 NR Description: putative transposable element
  misc_feature (94)..(298): Homolog of NCBI NO: 37531668 NR Description: putative transposable element
  misc_feature (219)..(298): Homolog of NCBI NO: 23928448 NR Description: putative MURAZC [Zea mays]
  misc_feature (118)..(298): Homolog of NCBI NO: 22375 NR Description: unnamed protein product [Zea mays]
  misc_feature (39)..(298): Homolog of NCBI NO: 1857256 NR Description: MURAZC [Zea mays]
  misc_feature (39)..(298): Homolog of NCBI NO: 2130141 NR Description: mudrA protein - maize transposon MuDR
MDETNACIVEEQEWALTCIGYDDLETHTTLGSAHAIHDIDWDSIIVEEMTSEEGRNDVTSEQGLYFQLGLATEDDKREDDCSAPRFGNSIPCEDELGAVIPCSDLVLDETRTIYGMNNPVMEPSSLCAKMHHFRLAIRQYAINKEFELGIEATNKTRFRGYCKGPDCPWSIHARPETKGAITIQVIVLNGKHTCTSSGRRKTATPTGAWVAARALPLLMKKPHMGAKELQTTLHDTFGCTIAYDTVWHGKEKALKELFGSWEESFQLLWPWREAVMQKSPDSVIELDVKMDEGRPFFS

SEQ ID NO: 110885 - protein, 250 aa, Zea mays subsp. mays
  misc_feature (1)..(250): Ceres Seq. ID no. 15180148
  misc_feature (53)..(206): Pfam Name: MuDR family transposase Pfam Description: MuDR family transposase
  misc_feature (143)..(246): Homolog of NCBI NO: 34903312 NR Description: unnamed protein product [Oryza sativa (japonica
  misc_feature (1)..(250): Homolog of NCBI NO: 22758277 NR Description: Putative Mutator protein [Oryza sativa (japonica
  misc_feature (1)..(250): Homolog of NCBI NO: 32489130 NR Description: OSJNBb0018J12.10 [Oryza sativa (japonica
  misc_feature (1)..(250): Homolog of NCBI NO: 37535470 NR Description: putative mutator protein [Oryza sativa (japonica
  misc_feature (1)..(43): Homolog of NCBI NO: 37531668 NR Description: putative transposable element
  misc_feature (46)..(250): Homolog of NCBI NO: 37531668 NR Description: putative transposable element
  misc_feature (171)..(250): Homolog of NCBI NO: 23928448 NR Description: putative MURAZC [Zea mays]
  misc_feature (70)..(250): Homolog of NCBI NO: 22375 NR Description: unnamed protein product [Zea mays]
  misc_feature (1)..(250): Homolog of NCBI NO: 1857256 NR Description: MURAZC [Zea mays]
  misc_feature (1)..(250): Homolog of NCBI NO: 2130141 NR Description: mudrA protein - maize transposon MuDR
MTSEEGRNDVTSEQGLYFQLGLATEDDKREDDCSAPRFGNSIPCEDELGAVIPCSDLVLDETRTIYGMNNPVMEPSSLCAKMHHFRLAIRQYAINKEFELGIEATNKTRFRGYCKGPDCPWSIHARPETKGAITIQVIVLNGKHTCTSSGRRKTATPTGAWVAARALPLLMKKPHMGAKELQTTLHDTFGCTIAYDTVWHGKEKALKELFGSWEESFQLLWPWREAVMQKSPDSVIELDVKMDEGRPFFS

SEQ ID NO: 110886 - DNA, 1625 bp, Zea mays subsp. mays
  misc_feature (1)..(1625): Ceres Seq. ID no. 14302146
gaaacaatcggtctctatctttctcatgaatctcagcctagcttaccatcttgacctgccccacacgtcccaccggccaccaccgggtttcgtcgctgccgccgcccgcacctgcagccgccatgtggaggggcggctctacagccgcctccgccgcgagggctctccgctcgcgcctcctcctcgaccccatccaccacccggccacgtcgctcgctccaatcgcttcggcgcgtacctcctcctcttccaccccgtccaccgccgcggcgaacaccatcgtggaagaagcggcggcagcggtatccgtttctcagcataccggatccatctccgactcgctgcggcactacgggaagtgctactgggagctctcgaaagcccgcctcagtgctcttgttgtggcaacttcgggggctggctatgtgcttggtagtggcaacatcgtggacattgccggcctttgttgcacatgtgccggtacaatgatggttacagcatctgcaaataccctcaaccaggtgtttgagataaaaaatgatgctaaaatgaaaaggacaatgcgacggcccctgccatctggtcgcattagtcctgcacatgctgcgatgtgggctacaagtgttggagttgcaggaacagctttgctggcctggaaggctaatggcttggcagctgggcttgcagcttctaatcttgttctgtatgcatttgtgtatacgccgttgaagcaaatacaccctgttaatacatgggttggggcagtcgttggtgccatcccaccacttctggggtgggcagcagcttcaactgaactgtcactaaacgcgatgatactccctgccgcattgtacttttggcaaatacctcattttatggctctcgcgtacttatgtcgaaatgattaccttgctggagggtatcgaatgttttcttttgctgaccctaccggtagaagaactgcatgggtgtcgctaagaaattgtctgtacatgctacctttggggttatttgcgtacaactgggggctcacatccgagtggttcagttttgaagcttcactcctaacattaggccttaccatcggagctctatcattcgtcctagaaccaagcccgaagactgcgaggagaatgttctatggtagcctgctgtatctccctgccttcatgtccggacttctgttacatcggctaccaagtgaacaaaaggcgcacaacctggctgagaacaatgagctggacggagttctgtacggggctgatctgcaggacgaagaacgagcaagacagaaacgccaagacacgaaaccttctcgtgtgcaatcactccctccagtttcctatgcttctgtggctccattccctttcctaccggtacccatatacgagtcatgaaaagttgaaaacctcctctggttcttcctgcagccgtggggtagttggagcaatgtattcatgcatttttggcttacatgagttttccgccatcaagaagagtccttggtatggtgcgtctgttgttaaaattatagaatacgtttttgtgtgtgtggattgagccttttgcggctcacctacaaatgtaaaaagtgatgttgatgttcattctgatgattcgatcgc

SEQ ID NO: 110887 - protein, 424 aa, Zea mays subsp. mays
  misc_feature (1)..(424): Ceres Seq. ID no. 14302147
  misc_feature (91)..(357): Pfam Name: UbiA prenyltransferase family Pfam Description: UbiA prenyltransferase family
  misc_feature (30)..(424): Homolog of NCBI NO: 18406556 NR Description: UbiA prenyltransferase family [Arabidopsis
  misc_feature (1)..(360): Homolog of NCBI NO: 17921982 NR Description: heme A:farnesyltransferase
  misc_feature (1)..(360): Homolog of NCBI NO: 20141419 NR Description: Protoheme IX farnesyltransferase, mitochondrial
  misc_feature (84)..(372): Homolog of NCBI NO: 30410008 NR Description: RIKEN cDNA 2410004F01 [Mus musculus]
  misc_feature (30)..(424): Homolog of NCBI NO: 25408912 NR Description: probable heme A farnesyltransferase
  misc_feature (30)..(424): Homolog of NCBI NO: 7485006 NR Description: heme A farnesyltransferase homolog F16B22.1 -
  misc_feature (5)..(357): Homolog of NCBI NO: 31237553 NR Description: ENSANGP00000013941 [Anopheles gambiae]
  misc_feature (81)..(350): Homolog of NCBI NO: 19921064 NR Description: CG5037-PA [Drosophila melanogaster]
  misc_feature (1)..(360): Homolog of NCBI NO: 30584237 NR Description: Homo sapiens COX10 homolog, cytochrome c oxidase
  misc_feature (32)..(424): Homolog of NCBI NO: 34913400 NR Description: putative heme A farnesyltransferase homolog
MWRGGSTAASAARALRSRLLLDPIHHPATSLAPIASARTSSSSTPSTAAANTIVEEAAAAVSVSQHTGSISDSLRHYGKCYWELSKARLSALVVATSGAGYVLGSGNIVDIAGLCCTCAGTMMVTASANTLNQVFEIKNDAKMKRTMRRPLPSGRISPAHAAMWATSVGVAGTALLAWKANGLAAGLAASNLVLYAFVYTPLKQIHPVNTWVGAVVGAIPPLLGWAAASTELSLNAMILPAALYFWQIPHFMALAYLCRNDYLAGGYRMFSFADPTGRRTAWVSLRNCLYMLPLGLFAYNWGLTSEWFSFEASLLTLGLTIGALSFVLEPSPKTARRMFYGSLLYLPAFMSGLLLHRLPSEQKAHNLAENNELDGVLYGADLQDEERARQKRQDTKPSRVQSLPPVSYASVAPFPFLPVPIYES

SEQ ID NO: 110888 - protein, 303 aa, Zea mays subsp. mays
  misc_feature (1)..(303): Ceres Seq. ID no. 14302148
  misc_feature (1)..(236): Pfam Name: UbiA prenyltransferase family Pfam Description: UbiA prenyltransferase family
  misc_feature (1)..(239): Homolog of NCBI NO: 17921982 NR Description: heme A:farnesyltransferase
  misc_feature (1)..(239): Homolog of NCBI NO: 30584237 NR Description: Homo sapiens COX10 homolog, cytochrome c oxidase
  misc_feature (1)..(239): Homolog of NCBI NO: 20141419 NR Description: Protoheme IX farnesyltransferase, mitochondrial
  misc_feature (1)..(229): Homolog of NCBI NO: 19921064 NR Description: CG5037-PA [Drosophila melanogaster]
  misc_feature (1)..(251): Homolog of NCBI NO: 30410008 NR Description: RIKEN cDNA 2410004F01 [Mus musculus]
  misc_feature (1)..(236): Homolog of NCBI NO: 31237553 NR Description: ENSANGP00000013941 [Anopheles gambiae]
  misc_feature (1)..(303): Homolog of NCBI NO: 25408912 NR Description: probable heme A farnesyltransferase
  misc_feature (1)..(303): Homolog of NCBI NO: 7485006 NR Description: heme A farnesyltransferase homolog F16B22.1 -
  misc_feature (1)..(303): Homolog of NCBI NO: 18406556 NR Description: UbiA prenyltransferase family [Arabidopsis
  misc_feature (1)..(303): Homolog of NCBI NO: 34913400 NR Description: putative heme A farnesyltransferase homolog
MMVTASANTLNQVFEIKNDAKMKRTMRRPLPSGRISPAHAAMWATSVGVAGTALLAWKANGLAAGLAASNLVLYAFVYTPLKQIHPVNTWVGAVVGAIPPLLGWAAASTELSLNAMILPAALYFWQIPHFMALAYLCRNDYLAGGYRMFSFADPTGRRTAWVSLRNCLYMLPLGLFAYNWGLTSEWFSFEASLLTLGLTIGALSFVLEPSPKTARRMFYGSLLYLPAFMSGLLLHRLPSEQKAHNLAENNELDGVLYGADLQDEERARQKRQDTKPSRVQSLPPVSYASVAPFPFLPVPIYES

SEQ ID NO: 110889 - protein, 302 aa, Zea mays subsp. mays
  misc_feature (1)..(302): Ceres Seq. ID no. 14302149
  misc_feature (1)..(235): Pfam Name: UbiA prenyltransferase family Pfam Description: UbiA prenyltransferase family
  misc_feature (1)..(238): Homolog of NCBI NO: 17921982 NR Description: heme A:farnesyltransferase
  misc_feature (1)..(238): Homolog of NCBI NO: 30584237 NR Description: Homo sapiens COX10 homolog, cytochrome c oxidase
  misc_feature (1)..(238): Homolog of NCBI NO: 20141419 NR Description: Protoheme IX farnesyltransferase, mitochondrial
  misc_feature (1)..(228): Homolog of NCBI NO: 19921064 NR Description: CG5037-PA [Drosophila melanogaster]
  misc_feature (1)..(250): Homolog of NCBI NO: 30410008 NR Description: RIKEN cDNA 2410004F01 [Mus musculus]
  misc_feature (1)..(235): Homolog of NCBI NO: 31237553 NR Description: ENSANGP00000013941 [Anopheles gambiae]
  misc_feature (1)..(302): Homolog of NCBI NO: 25408912 NR Description: probable heme A farnesyltransferase
  misc_feature (1)..(302): Homolog of NCBI NO: 7485006 NR Description: heme A farnesyltransferase homolog F16B22.1 -
  misc_feature (1)..(302): Homolog of NCBI NO: 18406556 NR Description: UbiA prenyltransferase family [Arabidopsis
  misc_feature (1)..(302): Homolog of NCBI NO: 34913400 NR Description: putative heme A farnesyltransferase homolog
MVTASANTLNQVFEIKNDAKMKRTMRRPLPSGRISPAHAAMWATSVGVAGTALLAWKANGLAAGLAASNLVLYAFVYTPLKQIHPVNTWVGAVVGAIPPLLGWAAASTELSLNAMILPAALYFWQIPHFMALAYLCRNDYLAGGYRMFSFADPTGRRTAWVSLRNCLYMLPLGLFAYNWGLTSEWFSFEASLLTLGLTIGALSFVLEPSPKTARRMFYGSLLYLPAFMSGLLLHRLPSEQKAHNLAENNELDGVLYGADLQDEERARQKRQDTKPSRVQSLPPVSYASVAPFPFLPVPIYES

SEQ ID NO: 110890 - DNA, 681 bp, Zea mays subsp. mays
  misc_feature (1)..(681): Ceres Seq. ID no. 13600496
cwagaacatcctaatcgaaaaaaaaaccggtccccttcgacctcctcctccgccgccagcgtcgaccgcgaccgccacctctcctcgtacgctacagtaggggcaggggcggcgattggtggctcttcctcctcctatgctgtgactcgaggagtatggcggatggggctattgtggtacccatttgccagtacggcggagagttcacttctggccccagtggtaatctgatatacagaggtggagaagcacatgccgttgatgttactcatgattcatcgctggagagcttcaaggatgagctgtccaaggtgttccatgttgatgtcactgacatgtcactcaagtactttcttcccaataatatgaaaacactcatcacaatatcatgtgaccgggatttgcaaaggatggttggttttactgcaaatgctgcgcatgtggatgtttttctgataagtagacaggagaacaggagtaagatgatggtgattgagtttgtggcgacaaatgcatctcttgtatcgctaagagtcttagctgtgaacttagttctcacttctgtgtgactgtgatcaaaggacttgtgtatgatcaaaggagatccatcagttggtaccgaagtgtattttatgtcttgttggttacctggaatttaattggaactggaggggggaaagg

SEQ ID NO: 110891 - protein, 137 aa, Zea mays subsp. mays
  misc_feature (1)..(137): Ceres Seq. ID no. 15218959
  misc_feature (20)..(103): Pfam Name: PB1 domain Pfam Description: PB1 domain
  misc_feature (7)..(113): Homolog of NCBI NO: 5441874 NR Description: Similar to maize transposon MuDR mudrA-like
  misc_feature (1)..(112): Homolog of NCBI NO: 22327304 NR Description: mudrA protein -related [Arabidopsis thaliana]
  misc_feature (4)..(104): Homolog of NCBI NO: 15230059 NR Description: expressed protein [Arabidopsis thaliana]
  misc_feature (7)..(121): Homolog of NCBI NO: 22330896 NR Description: mudrA protein -related [Arabidopsis thaliana]
  misc_feature (7)..(121): Homolog of NCBI NO: 10177186 NR Description: mutator-like transposase-like protein
  misc_feature (1)..(108): Homolog of NCBI NO: 37530384 NR Description: putative maize transposon MuDR mudrA-like protein
MADGAIVVPICQYGGEFTSGPSGNLIYRGGEAHAVDVTHDSSLESFKDELSKVFHVDVTDMSLKYFLPNNMKTLITISCDRDLQRMVGFTANAAHVDVFLISRQENRSKMMVIEFVATNASLVSLRVLAVNLVLTSV

SEQ ID NO: 110892 - protein, 77 aa, Zea mays subsp. mays
  misc_feature (1)..(77): Ceres Seq. ID no. 15218960
  misc_feature (1)..(53): Homolog of NCBI NO: 5441874 NR Description: Similar to maize transposon MuDR mudrA-like
  misc_feature (1)..(52): Homolog of NCBI NO: 22327304 NR Description: mudrA protein -related [Arabidopsis thaliana]
  misc_feature (1)..(44): Homolog of NCBI NO: 15230059 NR Description: expressed protein [Arabidopsis thaliana]
  misc_feature (1)..(61): Homolog of NCBI NO: 22330896 NR Description: mudrA protein -related [Arabidopsis thaliana]
  misc_feature (1)..(61): Homolog of NCBI NO: 10177186 NR Description: mutator-like transposase-like protein
  misc_feature (1)..(48): Homolog of NCBI NO: 37530384 NR Description: putative maize transposon MuDR mudrA-like protein
MSLKYFLPNNMKTLITISCDRDLQRMVGFTANAAHVDVFLISRQENRSKMMVIEFVATNASLVSLRVLAVNLVLTSV

SEQ ID NO: 110893 - protein, 76 aa, Zea mays subsp. mays
  misc_feature (1)..(76): Ceres Seq. ID no. 15218961
XEHPNRKKNRSPSTSSSAASVDRDRHLSSYATVGAGAAIGGSSSSYAVTRGVWRMGLLWYPFASTAESSLLAPVVI

SEQ ID NO: 110894 - DNA, 1464 bp, Zea mays subsp. mays
  misc_feature (1)..(1464): Ceres Seq. ID no. 15180432
tttttagttccctgccctctctccggcctcgttttcttgcctgtttagtttcctcttgtgttctttgcacatctatagttctatacagtacttttgattttcttttaataggcatcccctgctgtatttattctaaaaaaggtgccaacaatcattgactgttccagtctgctttgcctaatttttgtgacatactccctccgtcccagtatataaggcataaccacctctggatcaaagaccaagaaatgcatttaattctctctatatcactgtatcgatgtatgtgtgcatagagagagcacgccttatattgtgggacaagaacaaaaagtggttacgccttatattctgggacggagggagtactccctctgtactatagaaagtgtaactcctcaaacaccaagaccaaggagataatttaattcatgcacattcccagtagaggcgctctgatcctccacctaatttattgcgagcttgcatgcaagcatgcagaaaccaccgtagttgttgttggccaagcatgctattttttctcgccatgcatgcatagtagtccagcagcccatgtaaattgtgcatgtgttgaactgcaggtaccctctattctaggagtagagaaaaaaactagttatgccctccatcgtgaacgtcatgtagtgtctttcttgtctatggaatgtttggttgcaatttgttctcacatgattctttctgtccagactggctggagggaatggtcacagaatatcttgttgagacatttgctgattacttcggtgacgttaaaatgtatattgaagaaagaccatttcgaagatttgtggaggcttgcatagaagaaacaatcgtggtctatgttgatcatctcctttcccagaaaaactacataaaagaggaaacaatagagaggatgaggttagatgaagagaagcttatggatttctttagggaacacgtcaacgtgacaaaagttgaaagtagagtgcggattctggcagatatgagagatctagcttcagctgggagtttggatagctttactctcattttcacaaatatactggaacatcaacctgattgcccgcctgaggttgttgagaagcttgtggcaatgcgggaagacattccaagaaaggaagccaaggagattgtacaagaatgcaaagagatatacgagaactcgctcgtggatggcaaccctcgcaagtcaggttttgtgttcggcaaattgaagtgcttgacagcaaagaaaggcatatggaggaagcttgggcagtaagtggcgacttgcagcagagtggacgaacttatcaccaaggcaaagattgtacatttcacttctctatgatcattcttttttcgatgctactgttgggtttcacgtttatactatcagtatgtactcagcttgaggagcaaacatgtactttattcaataaaatggttgttatttgc

SEQ ID NO: 110895 - protein, 200 aa, Zea mays subsp. mays
  misc_feature (1)..(200): Ceres Seq. ID no. 15180433
  misc_feature (15)..(198): Homolog of NCBI NO: 25406122 NR Description: hypothetical protein F14O23.20 [imported] -
  misc_feature (15)..(198): Homolog of NCBI NO: 19387172 NR Description: SEC6 [Arabidopsis thaliana]
  misc_feature (15)..(198): Homolog of NCBI NO: 18409922 NR Description: SEC6 protein [Arabidopsis thaliana]
MFGCNLFSHDSFCPDWLEGMVTEYLVETFADYFGDVKMYIEERPFRRFVEACIEETIVVYVDHLLSQKNYIKEETIERMRLDEEKLMDFFREHVNVTKVESRVRILADMRDLASAGSLDSFTLIFTNILEHQPDCPPEVVEKLVAMREDIPRKEAKEIVQECKEIYENSLVDGNPRKSGFVFGKLKCLTAKKGIWRKLGQ

SEQ ID NO: 110896 - protein, 181 aa, Zea mays subsp. mays
  misc_feature (1)..(181): Ceres Seq. ID no. 15180434
  misc_feature (1)..(179): Homolog of NCBI NO: 25406122 NR Description: hypothetical protein F14O23.20 [imported] -
  misc_feature (1)..(179): Homolog of NCBI NO: 19387172 NR Description: SEC6 [Arabidopsis thaliana]
  misc_feature (1)..(179): Homolog of NCBI NO: 18409922 NR Description: SEC6 protein [Arabidopsis thaliana]
MVTEYLVETFADYFGDVKMYIEERPFRRFVEACIEETIVVYVDHLLSQKNYIKEETIERMRLDEEKLMDFFREHVNVTKVESRVRILADMRDLASAGSLDSFTLIFTNILEHQPDCPPEVVEKLVAMREDIPRKEAKEIVQECKEIYENSLVDGNPRKSGFVFGKLKCLTAKKGIWRKLGQ

SEQ ID NO: 110897 - protein, 163 aa, Zea mays subsp. mays
  misc_feature (1)..(163): Ceres Seq. ID no. 15180435
  misc_feature (1)..(161): Homolog of NCBI NO: 25406122 NR Description: hypothetical protein F14O23.20 [imported] -
  misc_feature (1)..(161): Homolog of NCBI NO: 19387172 NR Description: SEC6 [Arabidopsis thaliana]
  misc_feature (1)..(161): Homolog of NCBI NO: 18409922 NR Description: SEC6 protein [Arabidopsis thaliana]
MYIEERPFRRFVEACIEETIVVYVDHLLSQKNYIKEETIERMRLDEEKLMDFFREHVNVTKVESRVRILADMRDLASAGSLDSFTLIFTNILEHQPDCPPEVVEKLVAMREDIPRKEAKEIVQECKEIYENSLVDGNPRKSGFVFGKLKCLTAKKGIWRKLGQ

SEQ ID NO: 110898 - DNA, 1083 bp, Zea mays subsp. mays
  misc_feature (1)..(1083): Ceres Seq. ID no. 14312472
gtaggctcccgaaaatctccccgagtccgacgcgtctccggcggccgcccccctctccctctcggatctctccctctccgctcgccgcgcctccatcggtccactcagccatgtatagtaattacgggaatccttcggggatgcagatgcccccgcagaactctcaacctgtccagtttgataatccattatacggtgcaagctcgggtctaatcagatctgggataggagtatatggggagaagtttttgggttctagttcagaattcatgcaaagcaacatcaatagatacttctccaacccgcagtattacttccatgtgaatgatcaatatgtccgtaacaagttgaaagttatactgttcccgttctttcacagggggcactggactcgaataagtgagccggtcggtggccgcttgtcctacaaacctccaatctatgacataaacgcaccagatctgtacatccctttcatggcatttggaagcttcatcatcctttcagggtttacattgggtttcatgggaaagtttactccagcagctataaatctgcagtttacaagggcgctcatcggctggggcttccagctcatggtcctgaaaggtctgctctactcgatgggtggtggcgaggtgccactgctcgacttggtagcgtacggtggttatttattcgccgggctatcgctcgccgtcgtcgcgaggctcatgtgggcgtactcgtactatgtgatgatgccgtggatgagcctgtgcatgggggtgttcctggtgaggacgatgaagagggtgctcttcacggagatgagaagcagcgagaggcactcgtcgcggcagcactacttccttctcttcatggcaatcgcacagttccccctgttcttctggctcggcagcataggtgcatgatgcagttttgtgtacttttcgcagcattaacgttgcaaaaatgatattgaagtgtttagatgtgttgtaaagaaaaaaacaattggacaatggtctcaacagcttagaggttggcagctctgcttgtgaagttgtatgtgatccacaatcatgttatgctattgacttt

SEQ ID NO: 110899 - protein, 303 aa, Zea mays subsp. mays
  misc_feature (1)..(303): Ceres Seq. ID no. 14312473
  misc_feature (11)..(298): Homolog of NCBI NO: 28277968 NR Description: Similar to Yip1p-interacting factor [Danio rerio]
  misc_feature (3)..(298): Homolog of NCBI NO: 12861030 NR Description: unnamed protein product [Mus musculus]
  misc_feature (14)..(298): Homolog of NCBI NO: 39795597 NR Description: Unknown (protein for MGC:76182) [Silurana
  misc_feature (178)..(303): Homolog of NCBI NO: 10241632 NR Description: putative protein [Oryza sativa (indica
  misc_feature (47)..(301): Homolog of NCBI NO: 33589682 NR Description: At3g59500 [Arabidopsis thaliana]
  misc_feature (47)..(301): Homolog of NCBI NO: 11282553 NR Description: hypothetical protein T16L24.50 - Arabidopsis
  misc_feature (37)..(301): Homolog of NCBI NO: 9755388 NR Description: F17F8.24 [Arabidopsis thaliana]
  misc_feature (37)..(301): Homolog of NCBI NO: 30695009 NR Description: expressed protein [Arabidopsis thaliana]
  misc_feature (37)..(301): Homolog of NCBI NO: 18397705 NR Description: expressed protein [Arabidopsis thaliana]
  misc_feature (37)..(303): Homolog of NCBI NO: 38346458 NR Description: OSJNBa0019G23.6 [Oryza sativa (japonica
RLPKISPSPTRLRRPPPSPSRISPSPLAAPPSVHSAMYSNYGNPSGMQMPPQNSQPVQFDNPLYGASSGLIRSGIGVYGEKFLGSSSEFMQSNINRYFSNPQYYFHVNDQYVRNKLKVILFPFFHRGHWTRISEPVGGRLSYKPPIYDINAPDLYIPFMAFGSFIILSGFTLGFMGKFTPAAINLQFTRALIGWGFQLMVLKGLLYSMGGGEVPLLDLVAYGGYLFAGLSLAVVARLMWAYSYYVMMPWMSLCMGVFLVRTMKRVLFTEMRSSERHSSRQHYFLLFMAIAQFPLFFWLGSIGA

SEQ ID NO: 110900 - protein, 267 aa, Zea mays subsp. mays
  misc_feature (1)..(267): Ceres Seq. ID no. 14312474
  misc_feature (1)..(262): Homolog of NCBI NO: 28277968 NR Description: Similar to Yip1p-interacting factor [Danio rerio]
  misc_feature (1)..(262): Homolog of NCBI NO: 12861030 NR Description: unnamed protein product [Mus musculus]
  misc_feature (1)..(262): Homolog of NCBI NO: 39795597 NR Description: Unknown (protein for MGC:76182) [Silurana
  misc_feature (142)..(267): Homolog of NCBI NO: 10241632 NR Description: putative protein [Oryza sativa (indica
  misc_feature (11)..(265): Homolog of NCBI NO: 33589682 NR Description: At3g59500 [Arabidopsis thaliana]
  misc_feature (11)..(265): Homolog of NCBI NO: 11282553 NR Description: hypothetical protein T16L24.50 - Arabidopsis
  misc_feature (1)..(265): Homolog of NCBI NO: 9755388 NR Description: F17F8.24 [Arabidopsis thaliana]
  misc_feature (1)..(265): Homolog of NCBI NO: 30695009 NR Description: expressed protein [Arabidopsis thaliana]
  misc_feature (1)..(265): Homolog of NCBI NO: 18397705 NR Description: expressed protein [Arabidopsis thaliana]
  misc_feature (1)..(267): Homolog of NCBI NO: 38346458 NR Description: OSJNBa0019G23.6 [Oryza sativa (japonica
MYSNYGNPSGMQMPPQNSQPVQFDNPLYGASSGLIRSGIGVYGEKFLGSSSEFMQSNINRYFSNPQYYFHVNDQYVRNKLKVILFPFFHRGHWTRISEPVGGRLSYKPPIYDINAPDLYIPFMAFGSFIILSGFTLGFMGKFTPAAINLQFTRALIGWGFQLMVLKGLLYSMGGGEVPLLDLVAYGGYLFAGLSLAVVARLMWAYSYYVMMPWMSLCMGVFLVRTMKRVLFTEMRSSERHSSRQHYFLLFMAIAQFPLFFWLGSIGA

SEQ ID NO: 110901 - protein, 257 aa, Zea mays subsp. mays
  misc_feature (1)..(257): Ceres Seq. ID no. 14312475
  misc_feature (1)..(252): Homolog of NCBI NO: 28277968 NR Description: Similar to Yip1p-interacting factor [Danio rerio]
  misc_feature (1)..(252): Homolog of NCBI NO: 12861030 NR Description: unnamed protein product [Mus musculus]
  misc_feature (1)..(252): Homolog of NCBI NO: 39795597 NR Description: Unknown (protein for MGC:76182) [Silurana
  misc_feature (132)..(257): Homolog of NCBI NO: 10241632 NR Description: putative protein [Oryza sativa (indica
  misc_feature (1)..(255): Homolog of NCBI NO: 33589682 NR Description: At3g59500 [Arabidopsis thaliana]
  misc_feature (1)..(255): Homolog of NCBI NO: 11282553 NR Description: hypothetical protein T16L24.50 - Arabidopsis
  misc_feature (1)..(255): Homolog of NCBI NO: 9755388 NR Description: F17F8.24 [Arabidopsis thaliana]
  misc_feature (1)..(255): Homolog of NCBI NO: 30695009 NR Description: expressed protein [Arabidopsis thaliana]
  misc_feature (1)..(255): Homolog of NCBI NO: 18397705 NR Description: expressed protein [Arabidopsis thaliana]
  misc_feature (1)..(257): Homolog of NCBI NO: 38346458 NR Description: OSJNBa0019G23.6 [Oryza sativa (japonica
MQMPPQNSQPVQFDNPLYGASSGLIRSGIGVYGEKFLGSSSEFMQSNINRYFSNPQYYFHVNDQYVRNKLKVILFPFFHRGHWTRISEPVGGRLSYKPPIYDINAPDLYIPFMAFGSFIILSGFTLGFMGKFTPAAINLQFTRALIGWGFQLMVLKGLLYSMGGGEVPLLDLVAYGGYLFAGLSLAVVARLMWAYSYYVMMPWMSLCMGVFLVRTMKRVLFTEMRSSERHSSRQHYFLLFMAIAQFPLFFWLGSIGA

SEQ ID NO: 110902 - DNA, 1253 bp, Zea mays subsp. mays
  misc_feature (1)..(1253): Ceres Seq. ID no. 15180408
gaccatgtcccactcccctctccctcctccagtcttccaaaatatctccctgcgcttttccgagtccttttccctccaaggaacagaaacaaccggagcttttaccccacccgctttcccctccccgccaagaacaacagggctcctcgcaataattcgtgcatccatggcgaagctcgtcaacaagctggtcgattcattcgaccacgacgaggcgccggcgccggacgtcggctgcgtgcgcgccgtgctggccgagctcgtcctcaccttcctcttcgtcttcaccggcgtctccgcctccatggccgccgggtccggcgggaagcccggggaggctatgccgatggcgacgctggcggcggtggctatcgcgcacgcgctggccgctggcgtcctggtgacggccggcttccacgtctccggcggccacctcaaccccgccgtgacggtggggatcttggttcgcggccacatcaccaagctccgggcgctgctgtacgtcgccgcccagctgctggcgtcctccctcgcctgcatcctcctccgctacctcagcggcggcatggtgaccccagtgcacgccctgggcgctggcatcaacccgatgcagggcttggtgatggaggtgatcctcaccttctcgctgctcttcgtcacctacgccatgatcctggacccgcggagccaggtccgcaccatcggcccgctgctgacggggctcatagtcggcgccaacagcctcgccggcggcaacttcaccggcgcgtccatgaacccggcgcggtccttcggtcccgccatggccaccggggtctggaccaaccactgggtctactggatcggcccgctgctcggcgggtccctggccggcttcgtgtacgagtcgctgttcatggtgaacaagacgcacgagccgctgctcaatggagacatctgacgaccgtcggcccccagggcagtgagcacggttcatgcttgttttctgtaaaatagttcgttacctacaagcatgatgcatatattgaccaaggtaattaattagagagggttgctgttaaatagttaccctggtgggattgtgggatgtagaaattgttgctgggctttgcttttcttttttctttttttcttttcctcccaaggaattttttaagagggctgggttctgtaaaggatttgtttaggctattagttagctatatagtagaaaactagagaatgctatacgttggacgtgattttttttcacg

SEQ ID NO: 110903 - protein, 331 aa, Zea mays subsp. mays
  misc_feature (1)..(331): Ceres Seq. ID no. 15180409
DHVPLPSPSSSLPKYLPALFRVLFPPRNRNNRSFYPTRFPLPAKNNRAPRNNSCIHGEARQQAGRFIRPRRGAGAGRRLRARRAGRARPHLPLRLHRRLRLHGRRVRREARGGYADGDAGGGGYRARAGRWRPGDGRLPRLRRPPQPRRDGGDLGSRPHHQAPGAAVRRRPAAGVLPRLHPPPLPQRRHGDPSARPGRWHQPDAGLGDGGDPHLLAALRHLRHDPGPAEPGPHHRPAADGAHSRRQQPRRRQLHRRVHEPGAVLRSRHGHRGLDQPLGLLDRPAARRVPGRLRVRVAVHGEQDARAAAQWRHLTTVGPQGSEHGSCLFSVK

SEQ ID NO: 110904 - protein, 312 aa, Zea mays subsp. mays
  misc_feature (1)..(312): Ceres Seq. ID no. 15180410
  misc_feature (71)..(294): Pfam Name: Major intrinsic protein Pfam Description: Major intrinsic protein
  misc_feature (80)..(310): Homolog of NCBI NO: 38605857 NR Description: OSJNBb0034G17.15 [Oryza sativa (japonica
  misc_feature (70)..(312): Homolog of NCBI NO: 7441274 NR Description: tonoplast intrinsic protein - common ice plant
  misc_feature (78)..(307): Homolog of NCBI NO: 34904336 NR Description: unnamed protein product [Oryza sativa (japonica
  misc_feature (71)..(307): Homolog of NCBI NO: 4584429 NR Description: aquaglyceroporin; tonoplast intrinsic protein
  misc_feature (62)..(311): Homolog of NCBI NO: 15225195 NR Description: tonoplast intrinsic protein, putative
  misc_feature (71)..(311): Homolog of NCBI NO: 13447833 NR Description: tonoplast membrane integral protein ZmTIP4-3 [Zea
  misc_feature (69)..(311): Homolog of NCBI NO: 34904332 NR Description: unnamed protein product [Oryza sativa (japonica
  misc_feature (74)..(311): Homolog of NCBI NO: 13447835 NR Description: tonoplast membrane integral protein ZmTIP4-4 [Zea
  misc_feature (56)..(312): Homolog of NCBI NO: 13447829 NR Description: tonoplast membrane integral protein ZmTIP4-1 [Zea
  misc_feature (56)..(312): Homolog of NCBI NO: 13447831 NR Description: tonoplast membrane integral protein ZmTIP4-2 [Zea
TMSHSPLPPPVFQNISLRFSESFSLQGTETTGAFTPPAFPSPPRTTGLLAIIRASMAKLVNKLVDSFDHDEAPAPDVGCVRAVLAELVLTFLFVFTGVSASMAAGSGGKPGEAMPMATLAAVAIAHALAAGVLVTAGFHVSGGHLNPAVTVGILVRGHITKLRALLYVAAQLLASSLACILLRYLSGGMVTPVHALGAGINPMQGLVMEVILTFSLLFVTYAMILDPRSQVRTIGPLLTGLIVGANSLAGGNFTGASMNPARSFGPAMATGVWTNHWVYWIGPLLGGSLAGFVYESLFMVNKTHEPLLNGDI

SEQ ID NO: 110905 - protein, 311 aa, Zea mays subsp. mays
  misc_feature (1)..(311): Ceres Seq. ID no. 15180411
  misc_feature (70)..(293): Pfam Name: Major intrinsic protein Pfam Description: Major intrinsic protein
  misc_feature (73)..(310): Homolog of NCBI NO: 13447835 NR Description: tonoplast membrane integral protein ZmTIP4-4 [Zea
  misc_feature (55)..(311): Homolog of NCBI NO: 13447829 NR Description: tonoplast membrane integral protein ZmTIP4-1 [Zea
  misc_feature (69)..(311): Homolog of NCBI NO: 7441274 NR Description: tonoplast intrinsic protein - common ice plant
  misc_feature (70)..(306): Homolog of NCBI NO: 4584429 NR Description: aquaglyceroporin; tonoplast intrinsic protein
  misc_feature (70)..(310): Homolog of NCBI NO: 13447833 NR Description: tonoplast membrane integral protein ZmTIP4-3 [Zea
  misc_feature (68)..(310): Homolog of NCBI NO: 34904332 NR Description: unnamed protein product [Oryza sativa (japonica
  misc_feature (61)..(310): Homolog of NCBI NO: 15225195 NR Description: tonoplast intrinsic protein, putative
  misc_feature (77)..(306): Homolog of NCBI NO: 34904336 NR Description: unnamed protein product [Oryza sativa (japonica
  misc_feature (79)..(309): Homolog of NCBI NO: 38605857 NR Description: OSJNBb0034G17.15 [Oryza sativa (japonica
  misc_feature (55)..(311): Homolog of NCBI NO: 13447831 NR Description: tonoplast membrane integral protein ZmTIP4-2 [Zea
MSHSPLPPPVFQNISLRFSESFSLQGTETTGAFTPPAFPSPPRTTGLLAIIRASMAKLVNKLVDSFDHDEAPAPDVGCVRAVLAELVLTFLFVFTGVSASMAAGSGGKPGEAMPMATLAAVAIAHALAAGVLVTAGFHVSGGHLNPAVTVGILVRGHITKLRALLYVAAQLLASSLACILLRYLSGGMVTPVHALGAGINPMQGLVMEVILTFSLLFVTYAMILDPRSQVRTIGPLLTGLIVGANSLAGGNFTGASMNPARSFGPAMATGVWTNHWVYWIGPLLGGSLAGFVYESLFMVNKTHEPLLNGDI

SEQ ID NO: 110906 - DNA, 860 bp, Zea mays subsp. mays
  misc_feature (1)..(860): Ceres Seq. ID no. 14302123
attttggactacgtcttgaaaattgtagcgtgccgtcaaattttattttgcccttgcccctcggaaataagtagcaagaaaagatgccagctaagacgacttctgttaagaaaaggtttgtgtctgatggtatgttacgtgcagaactcaacgagttcttaacacgagaacttgctgaagatggttattctggtgttgatgtccgtgctgctccatcgcgcacagaaattgttatttctgcaacacgtacccaaaacgtattgggtgataagggacgccgtattcgtgaacttacatctctcattcaaaaacgttttgacttcaaagacaaggcagttgaacttttcgctgagaaagtagcacaacgtggattgtgtgctgttgcccaagctgagtcattacgttacaagttgattggtggtttagctgtcaggagagcatgttatggtgtgttgagattcatcatggaaagtggagctaagggatgtgaagttgtagtgtctggtaaattaagaggtcaacgtgccaagtcaatgaaatttgttgatggacttatgattcacagtggtgacccatgcaatgattatgttaatgtggctactagacacgttttgttaagacaaggagttttgggtatcaaggtaaaaattatgttgccatgggaccaaacaggtaaacttggcccaaagaagcctttgccagataatgtcagcgttgcagaacccaaggaagaaattctacccatagcaccaaccagtgatattaaatctaaacccgaagtagcagtacctgctgttccagttgtacctgttgttggttgaaatgattgtataaaataaactaaagttttttttaaacac

SEQ ID NO: 110907 - protein, 245 aa, Zea mays subsp. mays
  misc_feature (1)..(245): Ceres Seq. ID no. 14302124
  misc_feature (105)..(189): Pfam Name: Ribosomal protein S3, C-terminal domain Pfam Description: Ribosomal protein S3, C-terminal domain
  misc_feature (7)..(239): Homolog of NCBI NO: 7765076 NR Description: S3 ribosomal protein [Homo sapiens]
  misc_feature (7)..(242): Homolog of NCBI NO: 28374213 NR Description: similar to 40S ribosomal protein S3 [Danio rerio]
  misc_feature (7)..(239): Homolog of NCBI NO: 32532 NR Description: unnamed protein product [Homo sapiens]
  misc_feature (1)..(230): Homolog of NCBI NO: 31241449 NR Description: ENSANGP00000020844 [Anopheles gambiae]
  misc_feature (7)..(239): Homolog of NCBI NO: 15718687 NR Description: ribosomal protein S3; 40S ribosomal protein S3
  misc_feature (7)..(239): Homolog of NCBI NO: 13097759 NR Description: Unknown (protein for IMAGE:3544292) [Homo
  misc_feature (7)..(242): Homolog of NCBI NO: 22001962 NR Description: 40S ribosomal protein S3
  misc_feature (7)..(242): Homolog of NCBI NO: 37595356 NR Description: ribosomal protein S3 [Danio rerio]
  misc_feature (1)..(243): Homolog of NCBI NO: 1350990 NR Description: 40S ribosomal protein S3
  misc_feature (1)..(243): Homolog of NCBI NO: 16566719 NR Description: ribosomal protein S3 [Spodoptera frugiperda]
MPAKTTSVKKRFVSDGMLRAELNEFLTRELAEDGYSGVDVRAAPSRTEIVISATRTQNVLGDKGRRIRELTSLIQKRFDFKDKAVELFAEKVAQRGLCAVAQAESLRYKLIGGLAVRRACYGVLRFIMESGAKGCEVVVSGKLRGQRAKSMKFVDGLMIHSGDPCNDYVNVATRHVLLRQGVLGIKVKIMLPWDQTGKLGPKKPLPDNVSVAEPKEEILPIAPTSDIKSKPEVAVPAVPVVPVVG

SEQ ID NO: 110908 - protein, 229 aa, Zea mays subsp. mays
  misc_feature (1)..(229): Ceres Seq. ID no. 14302125
  misc_feature (89)..(173): Pfam Name: Ribosomal protein S3, C-terminal domain Pfam Description: Ribosomal protein S3, C-terminal domain
  misc_feature (1)..(223): Homolog of NCBI NO: 7765076 NR Description: S3 ribosomal protein [Homo sapiens]
  misc_feature (1)..(226): Homolog of NCBI NO: 28374213 NR Description: similar to 40S ribosomal protein S3 [Danio rerio]
  misc_feature (1)..(223): Homolog of NCBI NO: 32532 NR Description: unnamed protein product [Homo sapiens]
  misc_feature (1)..(214): Homolog of NCBI NO: 31241449 NR Description: ENSANGP00000020844 [Anopheles gambiae]
  misc_feature (1)..(223): Homolog of NCBI NO: 15718687 NR Description: ribosomal protein S3; 40S ribosomal protein S3
  misc_feature (1)..(223): Homolog of NCBI NO: 13097759 NR Description: Unknown (protein for IMAGE:3544292) [Homo
  misc_feature (1)..(226): Homolog of NCBI NO: 22001962 NR Description: 40S ribosomal protein S3
  misc_feature (1)..(226): Homolog of NCBI NO: 37595356 NR Description: ribosomal protein S3 [Danio rerio]
  misc_feature (1)..(227): Homolog of NCBI NO: 1350990 NR Description: 40S ribosomal protein S3
  misc_feature (1)..(227): Homolog of NCBI NO: 16566719 NR Description: ribosomal protein S3 [Spodoptera frugiperda]
MLRAELNEFLTRELAEDGYSGVDVRAAPSRTEIVISATRTQNVLGDKGRRIRELTSLIQKRFDFKDKAVELFAEKVAQRGLCAVAQAESLRYKLIGGLAVRRACYGVLRFIMESGAKGCEVVVSGKLRGQRAKSMKFVDGLMIHSGDPCNDYVNVATRHVLLRQGVLGIKVKIMLPWDQTGKLGPKKPLPDNVSVAEPKEEILPIAPTSDIKSKPEVAVPAVPVVPVVG

SEQ ID NO: 110909 - DNA, 1606 bp, Zea mays subsp. mays
  misc_feature (1)..(1606): Ceres Seq. ID no. 15180463
  misc_feature: MA Experiment ID: 108523 Result: Up-regulated in Transcription
  misc_feature: MA Experiment 108523 PARAMETER Experiment Name: Zm_42deg_Heat_P Parameter: Age (day) Value: 8
  misc_feature: MA Experiment 108523 PARAMETER Experiment Name: Zm_42deg_Heat_P Parameter: Organism Value: Zea mays
  misc_feature: MA Experiment 108523 PARAMETER Experiment Name: Zm_42deg_Heat_P Parameter: Plant Line Value: 35A19
  misc_feature: MA Experiment 108523 PARAMETER Experiment Name: Zm_42deg_Heat_P Parameter: Temperature (deg C) Value: 42 vs. 22
  misc_feature: MA Experiment 108523 PARAMETER Experiment Name: Zm_42deg_Heat_P Parameter: Timepoint (hr) Value: 6
  misc_feature: MA Experiment 108523 PARAMETER Experiment Name: Zm_42deg_Heat_P Parameter: Tissue Value: Aerial
  misc_feature: MA Experiment ID: 108528 Result: Down-regulated in Transcription
  misc_feature: MA Experiment 108528 PARAMETER Experiment Name: Zm_Imbibed_Seeds_P Parameter: Age (day) Value: 5 vs. 2
  misc_feature: MA Experiment 108528 PARAMETER Experiment Name: Zm_Imbibed_Seeds_P Parameter: Organism Value: Zea mays
  misc_feature: MA Experiment 108528 PARAMETER Experiment Name: Zm_Imbibed_Seeds_P Parameter: Plant Line Value: 35A19
  misc_feature: MA Experiment 108528 PARAMETER Experiment Name: Zm_Imbibed_Seeds_P Parameter: Tissue Value: Aerial vs. Embryo
  misc_feature: MA Experiment ID: 108529 Result: Down-regulated in Transcription
  misc_feature: MA Experiment 108529 PARAMETER Experiment Name: Zm_Imbibed_Seeds_P Parameter: Age (day) Value: 5 vs. 2
  misc_feature: MA Experiment 108529 PARAMETER Experiment Name: Zm_Imbibed_Seeds_P Parameter: Organism Value: Zea mays
  misc_feature: MA Experiment 108529 PARAMETER Experiment Name: Zm_Imbibed_Seeds_P Parameter: Plant Line Value: 35A19
  misc_feature: MA Experiment 108529 PARAMETER Experiment Name: Zm_Imbibed_Seeds_P Parameter: Tissue Value: Roots vs. Embryo
  misc_feature: MA Experiment ID: 108530 Result: Down-regulated in Transcription
  misc_feature: MA Experiment 108530 PARAMETER Experiment Name: Zm_Imbibed_Seeds_P Parameter: Age (day) Value: 6 vs. 2
  misc_feature: MA Experiment 108530 PARAMETER Experiment Name: Zm_Imbibed_Seeds_P Parameter: Organism Value: Zea mays
  misc_feature: MA Experiment 108530 PARAMETER Experiment Name: Zm_Imbibed_Seeds_P Parameter: Plant Line Value: 35A19
  misc_feature: MA Experiment 108530 PARAMETER Experiment Name: Zm_Imbibed_Seeds_P Parameter: Tissue Value: Aerial vs. Embryo
  misc_feature: MA Experiment ID: 108535 Result: Up-regulated in Transcription
  misc_feature: MA Experiment 108535 PARAMETER Experiment Name: Zm_Meristem_P Parameter: Age (day) Value: 8
  misc_feature: MA Experiment 108535 PARAMETER Experiment Name: Zm_Meristem_P Parameter: Organism Value: Zea mays
  misc_feature: MA Experiment 108535 PARAMETER Experiment Name: Zm_Meristem_P Parameter: Plant Line Value: 35A19
  misc_feature: MA Experiment 108535 PARAMETER Experiment Name: Zm_Meristem_P Parameter: Tissue Value: Root Meristem vs. Above Root Meristem
  misc_feature: MA Experiment ID: 108546 Result: Down-regulated in Transcription
  misc_feature: MA Experiment 108546 PARAMETER Experiment Name: Zm_Imbibed_Seeds_P Parameter: Age (day) Value: 3 vs. 2
  misc_feature: MA Experiment 108546 PARAMETER Experiment Name: Zm_Imbibed_Seeds_P Parameter: Organism Value: Zea mays
  misc_feature: MA Experiment 108546 PARAMETER Experiment Name: Zm_Imbibed_Seeds_P Parameter: Plant Line Value: 35A19
  misc_feature: MA Experiment 108546 PARAMETER Experiment Name: Zm_Imbibed_Seeds_P Parameter: Tissue Value: Roots vs. Embryo
  misc_feature: MA Experiment ID: 108689 Result: Up-regulated in Transcription
  misc_feature: MA Experiment 108689 PARAMETER Experiment Name: Zm_Drought_Roots_P Parameter: Age (day) Value: 9
  misc_feature: MA Experiment 108689 PARAMETER Experiment Name: Zm_Drought_Roots_P Parameter: Organism Value: Zea mays
  misc_feature: MA Experiment 108689 PARAMETER Experiment Name: Zm_Drought_Roots_P Parameter: Plant Line Value: 35A19
  misc_feature: MA Experiment 108689 PARAMETER Experiment Name: Zm_Drought_Roots_P Parameter: Timepoint (hr) Value: 24
  misc_feature: MA Experiment 108689 PARAMETER Experiment Name: Zm_Drought_Roots_P Parameter: Tissue Value: Roots
  misc_feature: MA Experiment 108689 PARAMETER Experiment Name: Zm_Drought_Roots_P Parameter: Treatment Value: Drought vs. No Drought
  misc_feature: MA Experiment ID: 20000626 Result: Down-regulated in Transcription
  misc_feature: MA Experiment 20000626 PARAMETER Experiment Name: Zm_Herbicide-Treatments_P Parameter: Timepoint (hr) Value: 12
  misc_feature: MA Experiment 20000626 PARAMETER Experiment Name: Zm_Herbicide-Treatments_P Parameter: Tissue Value: Aerial
  misc_feature: MA Experiment 20000626 PARAMETER Experiment Name: Zm_Herbicide-Treatments_P Parameter: Treatment Value: Roundup vs. No Treatment
ataccataccacgccacagcagcatatatgccactgcccaggcagccagccatgccgccaccaccccgatcccggcacagaactcagtgccagacgcggacagcgagcgcgaccacatctatctaggacccgtatctctctctctcctcccgaccagcacgtcacgtgccacggacaggggtcaagcgcggtcgccgatgtcggcggcgggcggcagcggcagccgcgcccgcgccacctcgcggcccgcggcggcagcatggctgctgctggcgctggccacagcagcagcagcgtcggcgctggcgctgccagcggccgcgggcggcttcagctgccgtcctgggtcccggccggtgctcttcaacttcggggactccaactccgacacgggcggcatggcggcggccaaggggtggcacctcacgcgcccggagggccgcgccttcttcccacgccccaccggccggttctgcgacggccgcctcgccatcgacttcctctgcgaaagcttgaacatcagctatttgagcccatttctgaaggcgttaggctccaattacagcaacggtgcaaatttcgccattgctggcgcagcaacgcaaccgcgagatgttccatttgcgttgcacatacaagtgcaggagttcttgtacttcagagatagatccttggaactcatcgatcaaggtctaagtggtccaattgatgcacaaggattccaaaacgctctatatatgatagacatagggcagaacgatgtaaacgctcttctgtcaaacttgccctatgatcaagttattgccaaattcccaccaattcttgctgagattaaggacgctgtccagactctatatagcaacggtagcctaaacttctggatacatgggacgggggctctgggttgcttgccgcagaagcttgccatacctaggaaaaacgacagcgatcttgatcagtatggctgtctcaagacctataacagagctgcagttgcgttcaacgcagcgctgggcagcctctgcgacgagctgagtgcgcagatgaaagacgcgacgcttgtgtacacggacctgttccccatcaagtatggtcttgtcgccaaccacactaaatatggctttgacaagccgctgatgacatgctgtgggtacggagggcctccctacaactacgacttcagcaagggttgccagtctaaggatgtggcggcctgcgaagacggctcgaagttcgtcagctgggatggcgtgcacctgacggaggcggccaatgcggttgtggccaaagcgatactgagctcacagtactccaagcccagtctcaagtttgatcagttctgcagagcctgatacttgttagtttaggcagatttactgaacacaacctggcacttcaaagtcaaaatgggtgggcttctgataatttgattaccttatttacccgtcagggatgtgacccatcattgatctgtcagccatagcccataggccataactttggataggtgaaacttccaaatattgtgggccacatgtaccttcaaactacatgtcctatctgatatgttctcatcaaagagagaaatacaccatgggttattaag

SEQ ID NO: 110910 - protein, 449 aa, Zea mays subsp. mays
  misc_feature (1)..(449): Ceres Seq. ID no. 15180464
  misc_feature (169)..(431): Pfam Name: GDSL-like Lipase/Acylhydrolase Pfam Description: GDSL-like Lipase/Acylhydrolase
  misc_feature (144)..(441): Homolog of NCBI NO: 34903986 NR Description: unnamed protein product [Oryza sativa (japonica
  misc_feature (144)..(441): Homolog of NCBI NO: 34903996 NR Description: unnamed protein product [Oryza sativa (japonica
  misc_feature (120)..(449): Homolog of NCBI NO: 15218753 NR Description: lipase, putative [Arabidopsis thaliana]
  misc_feature (118)..(445): Homolog of NCBI NO: 25405771 NR Description: hypothetical protein T22H22.20 [imported] -
  misc_feature (124)..(420): Homolog of NCBI NO: 25336281 NR Description: lipase-like protein Lip-4
  misc_feature (105)..(447): Homolog of NCBI NO: 15217506 NR Description: GDSL-motif lipase/hydrolase protein [Arabidopsis
  misc_feature (94)..(448): Homolog of NCBI NO: 15223585 NR Description: GDSL-motif lipase/hydrolase protein [Arabidopsis
  misc_feature (68)..(443): Homolog of NCBI NO: 34894838 NR Description: putative lipase homolog [Oryza sativa (japonica
  misc_feature (83)..(449): Homolog of NCBI NO: 34894866 NR Description: putative lipase homolog [Oryza sativa (japonica
  misc_feature (169)..(448): Homolog of NCBI NO: 34894844 NR Description: putative lipase homolog [Oryza sativa (japonica
TIPRHSSIYATAQAASHAATTPIPAQNSVPDADSERDHIYLGPVSLSLLPTSTSRATDRGQARSPMSAAGGSGSRARATSRPAAAAWLLLALATAAAASALALPAAAGGFSCRPGSRPVLFNFGDSNSDTGGMAAAKGWHLTRPEGRAFFPRPTGRFCDGRLAIDFLCESLNISYLSPFLKALGSNYSNGANFAIAGAATQPRDVPFALHIQVQEFLYFRDRSLELIDQGLSGPIDAQGFQNALYMIDIGQNDVNALLSNLPYDQVIAKFPPILAEIKDAVQTLYSNGSLNFWIHGTGALGCLPQKLAIPRKNDSDLDQYGCLKTYNRAAVAFNAALGSLCDELSAQMKDATLVYTDLFPIKYGLVANHTKYGFDKPLMTCCGYGGPPYNYDFSKGCQSKDVAACEDGSKFVSWDGVHLTEAANAVVAKAILSSQYSKPSLKFDQFCRA

SEQ ID NO: 110911 - protein, 384 aa, Zea mays subsp. mays
  misc_feature (1)..(384): Ceres Seq. ID no. 15180465
  misc_feature (104)..(366): Pfam Name: GDSL-like Lipase/Acylhydrolase Pfam Description: GDSL-like Lipase/Acylhydrolase
  misc_feature (79)..(376): Homolog of NCBI NO: 34903986 NR Description: unnamed protein product [Oryza sativa (japonica
  misc_feature (79)..(376): Homolog of NCBI NO: 34903996 NR Description: unnamed protein product [Oryza sativa (japonica
  misc_feature (55)..(384): Homolog of NCBI NO: 15218753 NR Description: lipase, putative [Arabidopsis thaliana]
  misc_feature (53)..(380): Homolog of NCBI NO: 25405771 NR Description: hypothetical protein T22H22.20 [imported] -
  misc_feature (59)..(355): Homolog of NCBI NO: 25336281 NR Description: lipase-like protein Lip-4
  misc_feature (40)..(382): Homolog of NCBI NO: 15217506 NR Description: GDSL-motif lipase/hydrolase protein [Arabidopsis
  misc_feature (29)..(383): Homolog of NCBI NO: 15223585 NR Description: GDSL-motif lipase/hydrolase protein [Arabidopsis
  misc_feature (3)..(378): Homolog of NCBI NO: 34894838 NR Description: putative lipase homolog [Oryza sativa (japonica
  misc_feature (18)..(384): Homolog of NCBI NO: 34894866 NR Description: putative lipase homolog [Oryza sativa (japonica
  misc_feature (104)..(383): Homolog of NCBI NO: 34894844 NR Description: putative lipase homolog [Oryza sativa (japonica
MSAAGGSGSRARATSRPAAAAWLLLALATAAAASALALPAAAGGFSCRPGSRPVLFNFGDSNSDTGGMAAAKGWHLTRPEGRAFFPRPTGRFCDGRLAIDFLCESLNISYLSPFLKALGSNYSNGANFAIAGAATQPRDVPFALHIQVQEFLYFRDRSLELIDQGLSGPIDAQGFQNALYMIDIGQNDVNALLSNLPYDQVIAKFPPILAEIKDAVQTLYSNGSLNFWIHGTGALGCLPQKLAIPRKNDSDLDQYGCLKTYNRAAVAFNAALGSLCDELSAQMKDATLVYTDLFPIKYGLVANHTKYGFDKPLMTCCGYGGPPYNYDFSKGCQSKDVAACEDGSKFVSWDGVHLTEAANAVVAKAILSSQYSKPSLKFDQFCRA

SEQ ID NO: 110912 - protein, 317 aa, Zea mays subsp. mays
  misc_feature (1)..(317): Ceres Seq. ID no. 15180466
  misc_feature (37)..(299): Pfam Name: GDSL-like Lipase/Acylhydrolase Pfam Description: GDSL-like Lipase/Acylhydrolase
  misc_feature (12)..(309): Homolog of NCBI NO: 34903986 NR Description: unnamed protein product [Oryza sativa (japonica
  misc_feature (12)..(309): Homolog of NCBI NO: 34903996 NR Description: unnamed protein product [Oryza sativa (japonica
  misc_feature (1)..(317): Homolog of NCBI NO: 15218753 NR Description: lipase, putative [Arabidopsis thaliana]
  misc_feature (1)..(313): Homolog of NCBI NO: 25405771 NR Description: hypothetical protein T22H22.20 [imported] -
  misc_feature (1)..(288): Homolog of NCBI NO: 25336281 NR Description: lipase-like protein Lip-4
  misc_feature (1)..(315): Homolog of NCBI NO: 15217506 NR Description: GDSL-motif lipase/hydrolase protein [Arabidopsis
  misc_feature (1)..(316): Homolog of NCBI NO: 15223585 NR Description: GDSL-motif lipase/hydrolase protein [Arabidopsis
  misc_feature (1)..(311): Homolog of NCBI NO: 34894838 NR Description: putative lipase homolog [Oryza sativa (japonica
  misc_feature (1)..(317): Homolog of NCBI NO: 34894866 NR Description: putative lipase homolog [Oryza sativa (japonica
  misc_feature (37)..(316): Homolog of NCBI NO: 34894844 NR Description: putative lipase homolog [Oryza sativa (japonica
MAAAKGWHLTRPEGRAFFPRPTGRFCDGRLAIDFLCESLNISYLSPFLKALGSNYSNGANFAIAGAATQPRDVPFALHIQVQEFLYFRDRSLELIDQGLSGPIDAQGFQNALYMIDIGQNDVNALLSNLPYDQVIAKFPPILAEIKDAVQTLYSNGSLNFWIHGTGALGCLPQKLAIPRKNDSDLDQYGCLKTYNRAAVAFNAALGSLCDELSAQMKDATLVYTDLFPIKYGLVANHTKYGFDKPLMTCCGYGGPPYNYDFSKGCQSKDVAACEDGSKFVSWDGVHLTEAANAVVAKAILSSQYSKPSLKFDQFCRA

SEQ ID NO: 110913 - DNA, 986 bp, Zea mays subsp. mays
  misc_feature (1)..(986): Ceres Seq. ID no. 13622682
attcccgctcgctacggccccagtcgcgctcctcaccggccggcaccaccccgcccgccctcgccttttgcctgcccagatttaggcctggcattctagcaatgcagaagaagtgatcttataatcataaaagataacaatggggatatccaaggtgaccggcattgctgcgacagcttttcttgtcacatctgttggtctgtaccagctcggcatgagaattgttgtgcttcctttcctagccaccagtattgttgcttctgttgtcaccgttgcatcccatgatgccatcaacctaccgtggatcctggggaagaactcagtgggaaggtttcctctttggtcagttatactgtttggtcctttcttgacgcttgctcggacatatgcaatggttaagagatacatgaggaaagagtccgtgtatgacaagattgtggaagacctatatcttggaggatggccctttctcttgaaacatttaccccctggaaacccatctgtcatagactgcacttgtgagcttccaagaagttccttcgttccagcagacgagtatctttgtcttgcaacttgggataccagagctccaacaccataccaaattgaaaaagctgcacgttgggcttgtggaaagagatctgaggggaagccggtttatgtccattgcgcatttggtcatggaagaagtgcttgtgttgtgtgtgcaattctagtagcgctgggcattgctgagaactggaaagatgctgagaacatcatccgtgaaagaagaaagataaaaatgaacgcccttcacaggaaaaccttagatgagtggtccaaacaacgagattttcagaaaaaggataagtagttgactagttgtaagtgtaacattttccttagtgatgaacttgtttgtggtgttaaagcctgtttgaaacatcaatggcatatttacttaagacaagtgtaatgtctgtgaaattattatttaaattttt

SEQ ID NO: 110914 - protein, 238 aa, Zea mays subsp. mays
  misc_feature (1)..(238): Ceres Seq. ID no. 13622683
  misc_feature (98)..(230): Pfam Name: Dual specificity phosphatase, catalytic domain Pfam Description: Dual specificity phosphatase, catalytic domain
  misc_feature (12)..(238): Homolog of NCBI NO: 23030039 NR Description: hypothetical protein [Microbulbifer degradans
  misc_feature (1)..(224): Homolog of NCBI NO: 28896859 NR Description: hypothetical protein [Vibrio parahaemolyticus
  misc_feature (58)..(230): Homolog of NCBI NO: 16129372 NR Description: putative enzymes [Escherichia coli K12]
  misc_feature (58)..(230): Homolog of NCBI NO: 26247698 NR Description: Hypothetical protein ynbD [Escherichia coli
  misc_feature (58)..(230): Homolog of NCBI NO: 3041758 NR Description: unnamed protein product [Escherichia coli]
  misc_feature (1)..(230): Homolog of NCBI NO: 15801736 NR Description: putative enzymes [Escherichia coli O157:H7
  misc_feature (2)..(229): Homolog of NCBI NO: 34908470 NR Description: P0489B03.9 [Oryza sativa (japonica
MGISKVTGIAATAFLVTSVGLYQLGMRIVVLPFLATSIVASVVTVASHDAINLPWILGKNSVGRFPLWSVILFGPFLTLARTYAMVKRYMRKESVYDKIVEDLYLGGWPFLLKHLPPGNPSVIDCTCELPRSSFVPADEYLCLATWDTRAPTPYQIEKAARWACGKRSEGKPVYVHCAFGHGRSACVVCAILVALGIAENWKDAENIIRERRKIKMNALHRKTLDEWSKQRDFQKKDK

SEQ ID NO: 110915 - protein, 213 aa, Zea mays subsp. mays
  misc_feature (1)..(213): Ceres Seq. ID no. 13622684
  misc_feature (73)..(205): Pfam Name: Dual specificity phosphatase, catalytic domain Pfam Description: Dual specificity phosphatase, catalytic domain
  misc_feature (33)..(205): Homolog of NCBI NO: 3041758 NR Description: unnamed protein product [Escherichia coli]
  misc_feature (1)..(205): Homolog of NCBI NO: 15801736 NR Description: putative enzymes [Escherichia coli O157:H7
  misc_feature (1)..(199): Homolog of NCBI NO: 28896859 NR Description: hypothetical protein [Vibrio parahaemolyticus
  misc_feature (33)..(205): Homolog of NCBI NO: 26247698 NR Description: Hypothetical protein ynbD [Escherichia coli
  misc_feature (33)..(205): Homolog of NCBI NO: 16129372 NR Description: putative enzymes [Escherichia coli K12]
  misc_feature (1)..(213): Homolog of NCBI NO: 23030039 NR Description: hypothetical protein [Microbulbifer degradans
  misc_feature (1)..(204): Homolog of NCBI NO: 34908470 NR Description: P0489B03.9 [Oryza sativa (japonica
MRIVVLPFLATSIVASVVTVASHDAINLPWILGKNSVGRFPLWSVILFGPFLTLARTYAMVKRYMRKESVYDKIVEDLYLGGWPFLLKHLPPGNPSVIDCTCELPRSSFVPADEYLCLATWDTRAPTPYQIEKAARWACGKRSEGKPVYVHCAFGHGRSACVVCAILVALGIAENWKDAENIIRERRKIKMNALHRKTLDEWSKQRDFQKKDK

SEQ ID NO: 110916 - protein, 154 aa, Zea mays subsp. mays
  misc_feature (1)..(154): Ceres Seq. ID no. 13622685
  misc_feature (14)..(146): Pfam Name: Dual specificity phosphatase, catalytic domain Pfam Description: Dual specificity phosphatase, catalytic domain
  misc_feature (1)..(154): Homolog of NCBI NO: 23030039 NR Description: hypothetical protein [Microbulbifer degradans
  misc_feature (1)..(140): Homolog of NCBI NO: 28896859 NR Description: hypothetical protein [Vibrio parahaemolyticus
  misc_feature (1)..(146): Homolog of NCBI NO: 16129372 NR Description: putative enzymes [Escherichia coli K12]
  misc_feature (1)..(146): Homolog of NCBI NO: 26247698 NR Description: Hypothetical protein ynbD [Escherichia coli
  misc_feature (1)..(146): Homolog of NCBI NO: 3041758 NR Description: unnamed protein product [Escherichia coli]
  misc_feature (1)..(146): Homolog of NCBI NO: 15801736 NR Description: putative enzymes [Escherichia coli O157:H7
  misc_feature (1)..(145): Homolog of NCBI NO: 34908470 NR Description: P0489B03.9 [Oryza sativa (japonica
MVKRYMRKESVYDKIVEDLYLGGWPFLLKHLPPGNPSVIDCTCELPRSSFVPADEYLCLATWDTRAPTPYQIEKAARWACGKRSEGKPVYVHCAFGHGRSACVVCAILVALGIAENWKDAENIIRERRKIKMNALHRKTLDEWSKQRDFQKKDK

SEQ ID NO: 110917 - DNA, 1510 bp, Zea mays subsp. mays
  misc_feature (1)..(1510): Ceres Seq. ID no. 15180447
aacccccacctgaccttctcttcctccctcccccgaccgcctgtctgtcctccgcgcatccgttctctatcgaaagggaggaggaggagcgcgcgggagtgggctgggggcccaccgatgctgagctcggcgtcctcggccggggcggccatggggatgggcggcgggtaccaacaccagccgctgccactgccgcagcgcggggcggcggccgcggtcttcaccgccgcgcagtgggcggagctggagcagcaggcgctcatctacaagtacctcatggccggcgtccccgtcccgcccgatctcctccgccccgccccccacgccgccgccttctccttcgccagccccgccgcgtcgcccttctaccatcaccaccaccaccacccgtccctgagttactacgcctactacgggaagaagctggacccggagccgtggcggtgccgccgcaccgacggcaagaagtggcggtgctccaaggaggcgcaccccgactccaagtactgcgagcgccacatgcaccgtggccgcaaccgttcaagaaagcctgtggaatccaagaccgcctcctcgccgccccagctgtccaccgtcgtcaccaccaccaccacccgggaggccgccgccgcgacgccccttgagtccctcgcgggggcggggggtaaggctcacggcctgtccctcggcggcggggctggctcgtcgcacctcagcgtcgacgcttcgaacgctcactttcgctatggcagcaagtaccctcttggagctaaatccgatgctggcgagctgagcttcttctcaggagcaccagggaactccaggggcttcaccattgattctccagcagataactcttggcactccctgccatccaacgtgcccccgtttacactgtccaagggcagagactctggcctcctgcccggtgcctactcctactcccacattgaaccaccgcaggtgctcggccaggtcaccatcgcctcgctgtcacaggaccaggagcgccaccagtcgtcgttcagcagcggcggggccggcgctggtggattgctggggagcgtgaagcaggagaaccagccgctgaggcccttcttcgacgagtggcctgggacgcgggactcgtggtcggagatggacgacgcgaggtccagtaggacctccttctcgacgacccagctctccatctccattccgatgcccagatgtaattgagaacgaagctcgtgcgcggccagtaggtggcgttgtcgcatgacgcgcacccagcatcgcgctcgctgctagcgagccaccgtcacccggtgattgatgccctcatcctagctatttgtttcgctgaatcgcattaagaacagaactctatgtaagagcaggatccttcctcatgtatcaatgggggcaatgaactccattctgtttctatggttgtagtaccgaccatgctttgtatttgttgtacccagaccgagaatgaaaaccgcccagtcgtcaggcgttatcgtct

SEQ ID NO: 110918 - protein, 405 aa, Zea mays subsp. mays
  misc_feature (1)..(405): Ceres Seq. ID no. 15180448
  misc_feature (74)..(250): Homolog of NCBI NO: 30682907 NR Description: transcription activator (GRL5) [Arabidopsis
  misc_feature (74)..(250): Homolog of NCBI NO: 11994367 NR Description: gb|AAF17567.1~gene_id:MDC16.8~similar to unknown
  misc_feature (74)..(239): Homolog of NCBI NO: 26449924 NR Description: unknown protein [Arabidopsis thaliana]
  misc_feature (74)..(239): Homolog of NCBI NO: 15227652 NR Description: transcription activator (GRL3) [Arabidopsis
  misc_feature (64)..(243): Homolog of NCBI NO: 18390099 NR Description: putative growth-regulating factor 1 [Sorghum
  misc_feature (65)..(213): Homolog of NCBI NO: 6573149 NR Description: growth-regulating factor 1 [Oryza sativa]
  misc_feature (42)..(205): Homolog of NCBI NO: 32470646 NR Description: putative growth-regulating factor [Solanum
  misc_feature (42)..(385): Homolog of NCBI NO: 32470630 NR Description: putative growth-regulating factor [Solanum
  misc_feature (56)..(401): Homolog of NCBI NO: 38345778 NR Description: OSJNBa0083N12.16 [Oryza sativa (japonica
  misc_feature (40)..(404): Homolog of NCBI NO: 34897962 NR Description: putative growth-regulating factor 1
NPHLTFSSSLPRPPVCPPRIRSLSKGRRRSAREWAGGPPMLSSASSAGAAMGMGGGYQHQPLPLPQRGAAAAVFTAAQWAELEQQALIYKYLMAGVPVPPDLLRPAPHAAAFSFASPAASPFYHHHHHHPSLSYYAYYGKKLDPEPWRCRRTDGKKWRCSKEAHPDSKYCERHMHRGRNRSRKPVESKTASSPPQLSTVVTTTTTREAAAATPLESLAGAGGKAHGLSLGGGAGSSHLSVDASNAHFRYGSKYPLGAKSDAGELSFFSGAPGNSRGFTIDSPADNSWHSLPSNVPPFTLSKGRDSGLLPGAYSYSHIEPPQVLGQVTIASLSQDQERHQSSFSSGGAGAGGLLGSVKQENQPLRPFFDEWPGTRDSWSEMDDARSSRTSFSTTQLSISIPMPRCN

SEQ ID NO: 110919 - protein, 366 aa, Zea mays subsp. mays
  misc_feature (1)..(366): Ceres Seq. ID no. 15180449
  misc_feature (35)..(211): Homolog of NCBI NO: 30682907 NR Description: transcription activator (GRL5) [Arabidopsis
  misc_feature (35)..(211): Homolog of NCBI NO: 11994367 NR Description: gb|AAF17567.1~gene_id:MDC16.8~similar to unknown
  misc_feature (35)..(200): Homolog of NCBI NO: 26449924 NR Description: unknown protein [Arabidopsis thaliana]
  misc_feature (35)..(200): Homolog of NCBI NO: 15227652 NR Description: transcription activator (GRL3) [Arabidopsis
  misc_feature (25)..(204): Homolog of NCBI NO: 18390099 NR Description: putative growth-regulating factor 1 [Sorghum
  misc_feature (26)..(174): Homolog of NCBI NO: 6573149 NR Description: growth-regulating factor 1 [Oryza sativa]
  misc_feature (3)..(166): Homolog of NCBI NO: 32470646 NR Description: putative growth-regulating factor [Solanum
  misc_feature (3)..(346): Homolog of NCBI NO: 32470630 NR Description: putative growth-regulating factor [Solanum
  misc_feature (17)..(362): Homolog of NCBI NO: 38345778 NR Description: OSJNBa0083N12.16 [Oryza sativa (japonica
  misc_feature (1)..(365): Homolog of NCBI NO: 34897962 NR Description: putative growth-regulating factor 1
MLSSASSAGAAMGMGGGYQHQPLPLPQRGAAAAVFTAAQWAELEQQALIYKYLMAGVPVPPDLLRPAPHAAAFSFASPAASPFYHHHHHHPSLSYYAYYGKKLDPEPWRCRRTDGKKWRCSKEAHPDSKYCERHMHRGRNRSRKPVESKTASSPPQLSTVVTTTTTREAAAATPLESLAGAGGKAHGLSLGGGAGSSHLSVDASNAHFRYGSKYPLGAKSDAGELSFFSGAPGNSRGFTIDSPADNSWHSLPSNVPPFTLSKGRDSGLLPGAYSYSHIEPPQVLGQVTIASLSQDQERHQSSFSSGGAGAGGLLGSVKQENQPLRPFFDEWPGTRDSWSEMDDARSSRTSFSTTQLSISIPMPRCN

SEQ ID NO: 110920 - protein, 355 aa, Zea mays subsp. mays
  misc_feature (1)..(355): Ceres Seq. ID no. 15180450
  misc_feature (24)..(200): Homolog of NCBI NO: 30682907 NR Description: transcription activator (GRL5) [Arabidopsis
  misc_feature (24)..(200): Homolog of NCBI NO: 11994367 NR Description: gb|AAF17567.1~gene_id:MDC16.8~similar to unknown
  misc_feature (24)..(189): Homolog of NCBI NO: 26449924 NR Description: unknown protein [Arabidopsis thaliana]
  misc_feature (24)..(189): Homolog of NCBI NO: 15227652 NR Description: transcription activator (GRL3) [Arabidopsis
  misc_feature (14)..(193): Homolog of NCBI NO: 18390099 NR Description: putative growth-regulating factor 1 [Sorghum
  misc_feature (15)..(163): Homolog of NCBI NO: 6573149 NR Description: growth-regulating factor 1 [Oryza sativa]
  misc_feature (1)..(155): Homolog of NCBI NO: 32470646 NR Description: putative growth-regulating factor [Solanum
  misc_feature (1)..(335): Homolog of NCBI NO: 32470630 NR Description: putative growth-regulating factor [Solanum
  misc_feature (6)..(351): Homolog of NCBI NO: 38345778 NR Description: OSJNBa0083N12.16 [Oryza sativa (japonica
  misc_feature (1)..(354): Homolog of NCBI NO: 34897962 NR Description: putative growth-regulating factor 1
MGMGGGYQHQPLPLPQRGAAAAVFTAAQWAELEQQALIYKYLMAGVPVPPDLLRPAPHAAAFSFASPAASPFYHHHHHHPSLSYYAYYGKKLDPEPWRCRRTDGKKWRCSKEAHPDSKYCERHMHRGRNRSRKPVESKTASSPPQLSTVVTTTTTREAAAATPLESLAGAGGKAHGLSLGGGAGSSHLSVDASNAHFRYGSKYPLGAKSDAGELSFFSGAPGNSRGFTIDSPADNSWHSLPSNVPPFTLSKGRDSGLLPGAYSYSHIEPPQVLGQVTIASLSQDQERHQSSFSSGGAGAGGLLGSVKQENQPLRPFFDEWPGTRDSWSEMDDARSSRTSFSTTQLSISIPMPRCN

SEQ ID NO: 110921 - DNA, 1378 bp, Zea mays subsp. mays
  misc_feature (1)..(1378): Ceres Seq. ID no. 13622667
ttacctagaacatcctaatcgaaaaaatataatatcgacggcgactgccgactggcttggttggctcgtggtcgctttgcccatctgatgatctcccgctagcttccttcttgctactcccgcagtccccagtccccacccgctgcgccctcgccatggatccgagctccgaaatcatactggacactccatacttccgcatctacagcgaccgccgcatcgaccgcttgatgggcaccgaaacggtgccggccggctttgatcccagcaccggcgtcacctccaaagatgtcgtcatagacagcgacgccggcctctacgtccgcctctacctcccgctcccggacacggtggctgccgccgcgtcaccaccgcccagcgttaacgacagcaagaccaagctcccggtgctggtctacttccacggcggcggcttcgtcacgcagtcggcagcgtctccgatctaccagcgcctcctcaacgcgctggccgcgagggccggcctgctcatcgtgtccgtgaactaccgcctcgcgccggagcacccgctgccggcaggctacgaggactccttccgcgcgctggagtgggtggcggcctccggcggggacccctggctgtcgcgccatggcgacctgcgccgcgtcttcctggccggcgacagcgccggcggcaacatcgtccacaacgtcgccatgatggccgccgcgtcggggccgcgggtcgagggcgccgtcctcctgcacgccgggttcgggggcaaggagcccgtcgatggcgaggcgccggcgtctgtggcgctgatggagaggctgtggggcgtcgtgtgccccggggcgacggacggcgtggacgacccgcgggtgaatcccttggccgccgcggcgccgcccaggcccagcctgcgggacatgccgtgcgagagggtgctcgtgtgcggggcggagctggactccctgctgccgagggacagggcctactacgaggccctcgcggcaagcgggtggagcggcacggtggagtggttcgagtcccagggccaggaccacgtcttcttcctcttcaaacccgactgcggtgagtccgtggcgctcatggatcgactcgtcgcgttcttcgctgcgaactgaaattcgtcatgtgcactcagtgttttatacatagtagttattgccgaggttttcaaatatgtaaaagtgccctataatttgaaaataggtatattttatataatatagggcaccaataaaatatctcgctgttgaaatgtcaaatctagattacagagcagtatgatgtagtatatttaagagcttgaaaaggtattttatatttttttaccaaattttatgaaacaagttattgttggagttgtttt

SEQ ID NO: 110922 - protein, 324 aa, Zea mays subsp. mays
  misc_feature (1)..(324): Ceres Seq. ID no. 13622668
  misc_feature (74)..(128): Pfam Name: Carboxylesterase Pfam Description: Carboxylesterase
  misc_feature (5)..(320): Homolog of NCBI NO: 15227669 NR Description: expressed protein [Arabidopsis thaliana]
  misc_feature (12)..(320): Homolog of NCBI NO: 15222791 NR Description: hypothetical protein [Arabidopsis thaliana]
  misc_feature (5)..(320): Homolog of NCBI NO: 15228426 NR Description: expressed protein [Arabidopsis thaliana]
  misc_feature (12)..(321): Homolog of NCBI NO: 21536771 NR Description: unknown [Arabidopsis thaliana]
  misc_feature (12)..(321): Homolog of NCBI NO: 18401743 NR Description: expressed protein [Arabidopsis thaliana]
  misc_feature (1)..(320): Homolog of NCBI NO: 18402731 NR Description: expressed protein [Arabidopsis thaliana]
  misc_feature (1)..(320): Homolog of NCBI NO: 21537287 NR Description: putative esterase [Arabidopsis thaliana]
  misc_feature (5)..(320): Homolog of NCBI NO: 15228425 NR Description: expressed protein [Arabidopsis thaliana]
  misc_feature (5)..(320): Homolog of NCBI NO: 18086341 NR Description: AT3g48690/T8P19_200 [Arabidopsis thaliana]
  misc_feature (6)..(323): Homolog of NCBI NO: 38344841 NR Description: OSJNBa0064H22.22 [Oryza sativa (japonica
MDPSSEIILDTPYFRIYSDRRIDRLMGTETVPAGFDPSTGVTSKDVVIDSDAGLYVRLYLPLPDTVAAAASPPPSVNDSKTKLPVLVYFHGGGFVTQSAASPIYQRLLNALAARAGLLIVSVNYRLAPEHPLPAGYEDSFRALEWVAASGGDPWLSRHGDLRRVFLAGDSAGGNIVHNVAMMAAASGPRVEGAVLLHAGFGGKEPVDGEAPASVALMERLWGVVCPGATDGVDDPRVNPLAAAAPPRPSLRDMPCERVLVCGAELDSLLPRDRAYYEALAASGWSGTVEWFESQGQDHVFFLFKPDCGESVALMDRLVAFFAAN

SEQ ID NO: 110923 - protein, 299 aa, Zea mays subsp. mays
  misc_feature (1)..(299): Ceres Seq. ID no. 13622669
  misc_feature (49)..(103): Pfam Name: Carboxylesterase Pfam Description: Carboxylesterase
  misc_feature (1)..(295): Homolog of NCBI NO: 15227669 NR Description: expressed protein [Arabidopsis thaliana]
  misc_feature (1)..(295): Homolog of NCBI NO: 15222791 NR Description: hypothetical protein [Arabidopsis thaliana]
  misc_feature (1)..(295): Homolog of NCBI NO: 15228426 NR Description: expressed protein [Arabidopsis thaliana]
  misc_feature (1)..(296): Homolog of NCBI NO: 21536771 NR Description: unknown [Arabidopsis thaliana]
  misc_feature (1)..(296): Homolog of NCBI NO: 18401743 NR Description: expressed protein [Arabidopsis thaliana]
  misc_feature (1)..(295): Homolog of NCBI NO: 18402731 NR Description: expressed protein [Arabidopsis thaliana]
  misc_feature (1)..(295): Homolog of NCBI NO: 21537287 NR Description: putative esterase [Arabidopsis thaliana]
  misc_feature (1)..(295): Homolog of NCBI NO: 15228425 NR Description: expressed protein [Arabidopsis thaliana]
  misc_feature (1)..(295): Homolog of NCBI NO: 18086341 NR Description: AT3g48690/T8P19_200 [Arabidopsis thaliana]
  misc_feature (1)..(298): Homolog of NCBI NO: 38344841 NR Description: OSJNBa0064H22.22 [Oryza sativa (japonica
MGTETVPAGFDPSTGVTSKDVVIDSDAGLYVRLYLPLPDTVAAAASPPPSVNDSKTKLPVLVYFHGGGFVTQSAASPIYQRLLNALAARAGLLIVSVNYRLAPEHPLPAGYEDSFRALEWVAASGGDPWLSRHGDLRRVFLAGDSAGGNIVHNVAMMAAASGPRVEGAVLLHAGFGGKEPVDGEAPASVALMERLWGVVCPGATDGVDDPRVNPLAAAAPPRPSLRDMPCERVLVCGAELDSLLPRDRAYYEALAASGWSGTVEWFESQGQDHVFFLFKPDCGESVALMDRLVAFFAAN

SEQ ID NO: 110924 - DNA, 1699 bp, Zea mays subsp. mays
  misc_feature (1)..(1699): Ceres Seq. ID no. 15180382
atgatgcatctcgtacccgagaagtgcaagacaagaacgtggctcctaatgtttcatctactgatttaccactgatccctcaagtgtacgggttcctcctgcagcacatatccgaaggcatgctgggaggctgcttaccattctctctcttctacctaattcaaagaaggaaattatttctgatgctgtatggtgcaaatggctcgaggattgtgctagtgggcgaattccctgcaatgatataaaactaaaaagttactgcaggttaacattattgaatatattatgttctgagagtccaaatacaagaaaagcctctgatgaatatcctgactcagaaagtgagtataaaagaaactgtccccagtttggagatgcactattcttgctaaatccagagttacctcttgaagttcatgtggacaacagtggttttgggattttaagagtttcaagagataattgtaaggaagatggaggtattggaggctctggctctgaaactgtgaactctgtagatgatgctgaagctgcatccaaaagtgtccctttgatggatgttgtgtttgttcatggccttcgtggcggcccattcaactcatggcgaattgctgatgacaaatcatcaactaccaaagctggtttagtggaaagcattgacgaggatgctgggaaagagggtacatgctggccaagagaatggcttgcggcagattttcctcaagcacgtttttttacggtcaaatacaagacaaatttgacccaatggactggagccagcttgcctcttcaggaggtgagctctatgctgctgaggaagttggtggctgctgggattggtagtcggcctgtcattttcgtgacacatagcatgggaggactggtggttaaacagcttttatatcaagcaaagctgaataactatgacaagttcctgaataatactattgggctagttttctatagttgtccgcattttggcagtaaacttgcagacatgccatggcgtatgggtttagtgtttcgtcctgctccttcgattggggagttaagaagtgggtctccaagactagttgaactgaacgattttgtgcgtcaacgacacaacaaaggatttcttgatgttcttagttttagtgagacccaggtcacaccgattgttgaaggatatggcggttgggcacttcgtatggagatagtgccaattgaatctgcatacccaggctttggggagcttgtcgttctaccgtccactgatcatataaattcatgtaagccagttaacaagaacgatccttcttatgcggaaaccttggcatttttggagaagaacttcaaattatgtctggagagagcagagtcctaggtcttgtcattggcgccgtggagttttcagcaatctgaaggcttcattttccatttaccgccagagacttttctcccgttaacgacgaatggtggttgatctgaccaaatgatctgggcgtgctgtggtttatgaagctcgcaccgaactttgtagtaacattgcacatagcggttaggctgtaaatagctgtcatttaccttttagttgacatgagttgcccccatgtaagatcaagctatataccccaatgcctgtatcgtctcaacagttttcagcaacagatttttttacaaaacaatctcataatatataagccattttcataaaatt

SEQ ID NO: 110925 - protein, 270 aa, Zea mays subsp. mays
  misc_feature (1)..(270): Ceres Seq. ID no. 15180383
  misc_feature (36)..(262): Homolog of NCBI NO: 20129595 NR Description: CG10383-PA [Drosophila melanogaster]
  misc_feature (46)..(257): Homolog of NCBI NO: 37523664 NR Description: hypothetical protein gll4095 [Gloeobacter
  misc_feature (1)..(31): Homolog of NCBI NO: 15291485 NR Description: GH23377p [Drosophila melanogaster]
  misc_feature (36)..(262): Homolog of NCBI NO: 15291485 NR Description: GH23377p [Drosophila melanogaster]
  misc_feature (1)..(23): Homolog of NCBI NO: 31198289 NR Description: ENSANGP00000019766 [Anopheles gambiae]
  misc_feature (38)..(259): Homolog of NCBI NO: 31198289 NR Description: ENSANGP00000019766 [Anopheles gambiae]
  misc_feature (1)..(266): Homolog of NCBI NO: 40254995 NR Description: hypothetical protein FLJ14917 [Homo sapiens]
  misc_feature (1)..(266): Homolog of NCBI NO: 14042785 NR Description: unnamed protein product [Homo sapiens]
  misc_feature (1)..(257): Homolog of NCBI NO: 28893415 NR Description: serine active site containing 1 [Mus musculus]
  misc_feature (1)..(139): Homolog of NCBI NO: 15235327 NR Description: hypothetical protein [Arabidopsis thaliana]
MDVVFVHGLRGGPFNSWRIADDKSSTTKAGLVESIDEDAGKEGTCWPREWLAADFPQARFFTVKYKTNLTQWTGASLPLQEVSSMLLRKLVAAGIGSRPVIFVTHSMGGLVVKQLLYQAKLNNYDKFLNNTIGLVFYSCPHFGSKLADMPWRMGLVFRPAPSIGELRSGSPRLVELNDFVRQRHNKGFLDVLSFSETQVTPIVEGYGGWALRMEIVPIESAYPGFGELVVLPSTDHINSCKPVNKNDPSYAETLAFLEKNFKLCLERAES

SEQ ID NO: 110926 - protein, 186 aa, Zea mays subsp. mays
  misc_feature (1)..(186): Ceres Seq. ID no. 15180384
  misc_feature (1)..(179): Homolog of NCBI NO: 23041874 NR Description: hypothetical protein [Trichodesmium erythraeum
  misc_feature (1)..(174): Homolog of NCBI NO: 17567095 NR Description: serine active site containing 1 like (57.4 kD)
  misc_feature (1)..(178): Homolog of NCBI NO: 20129595 NR Description: CG10383-PA [Drosophila melanogaster]
  misc_feature (1)..(173): Homolog of NCBI NO: 37523664 NR Description: hypothetical protein gll4095 [Gloeobacter
  misc_feature (1)..(178): Homolog of NCBI NO: 15291485 NR Description: GH23377p [Drosophila melanogaster]
  misc_feature (1)..(175): Homolog of NCBI NO: 31198289 NR Description: ENSANGP00000019766 [Anopheles gambiae]
  misc_feature (1)..(182): Homolog of NCBI NO: 40254995 NR Description: hypothetical protein FLJ14917 [Homo sapiens]
  misc_feature (1)..(182): Homolog of NCBI NO: 14042785 NR Description: unnamed protein product [Homo sapiens]
  misc_feature (1)..(173): Homolog of NCBI NO: 28893415 NR Description: serine active site containing 1 [Mus musculus]
  misc_feature (1)..(55): Homolog of NCBI NO: 15235327 NR Description: hypothetical protein [Arabidopsis thaliana]
MLLRKLVAAGIGSRPVIFVTHSMGGLVVKQLLYQAKLNNYDKFLNNTIGLVFYSCPHFGSKLADMPWRMGLVFRPAPSIGELRSGSPRLVELNDFVRQRHNKGFLDVLSFSETQVTPIVEGYGGWALRMEIVPIESAYPGFGELVVLPSTDHINSCKPVNKNDPSYAETLAFLEKNFKLCLERAES

SEQ ID NO: 110927 - protein, 164 aa, Zea mays subsp. mays
  misc_feature (1)..(164): Ceres Seq. ID no. 15180385
  misc_feature (1)..(157): Homolog of NCBI NO: 23041874 NR Description: hypothetical protein [Trichodesmium erythraeum
  misc_feature (1)..(152): Homolog of NCBI NO: 17567095 NR Description: serine active site containing 1 like (57.4 kD)
  misc_feature (1)..(156): Homolog of NCBI NO: 20129595 NR Description: CG10383-PA [Drosophila melanogaster]
  misc_feature (1)..(151): Homolog of NCBI NO: 37523664 NR Description: hypothetical protein gll4095 [Gloeobacter
  misc_feature (1)..(156): Homolog of NCBI NO: 15291485 NR Description: GH23377p [Drosophila melanogaster]
  misc_feature (1)..(153): Homolog of NCBI NO: 31198289 NR Description: ENSANGP00000019766 [Anopheles gambiae]
  misc_feature (1)..(160): Homolog of NCBI NO: 40254995 NR Description: hypothetical protein FLJ14917 [Homo sapiens]
  misc_feature (1)..(160): Homolog of NCBI NO: 14042785 NR Description: unnamed protein product [Homo sapiens]
  misc_feature (1)..(151): Homolog of NCBI NO: 28893415 NR Description: serine active site containing 1 [Mus musculus]
  misc_feature (1)..(33): Homolog of NCBI NO: 15235327 NR Description: hypothetical protein [Arabidopsis thaliana]
MGGLVVKQLLYQAKLNNYDKFLNNTIGLVFYSCPHFGSKLADMPWRMGLVFRPAPSIGELRSGSPRLVELNDFVRQRHNKGFLDVLSFSETQVTPIVEGYGGWALRMEIVPIESAYPGFGELVVLPSTDHINSCKPVNKNDPSYAETLAFLEKNFKLCLERAES

SEQ ID NO: 110928 - DNA, 529 bp, Zea mays subsp. mays
  misc_feature (1)..(529): Ceres Seq. ID no. 13586389
aatagattctacacttctaccgttccactctcgtgcgctcttgttttcttctctccgttgccgccctacgtcaggtgcccaattctccattttcgggcccttctccagcgacgagcacccgccagaggattatggattggctggggcagaaacgcgcggagatgctgatgcaggtgctgctggtggcgtctgcggtggtggcgttcctggtgggctacgtgcgcgcggacttccagctcatgctgctcgtctacgccggcggcgtcgtgctcacggctctggtcaccgtccccaactggcctttctacaaccgtaacccgctcaagtggctcgacgctgccgaggccgagcgccacccgcggccccaggtcagcgccgcccccgcggcagggggtaagaagaggtccgggaagaacaagtagttggtcgatgtgtgtgttcttggtcgacctgactcaacctgtttaagatctattcgcagaactaatcaattataaaaagagatattgagatatttgacagttttcgc

SEQ ID NO: 110929 - protein, 104 aa, Zea mays subsp. mays
  misc_feature (1)..(104): Ceres Seq. ID no. 13586390
IDSTLLPFHSRALLFSSLRCRPTSGAQFSIFGPFSSDEHPPEDYGLAGAETRGDADAGAAGGVCGGGVPGGLRARGLPAHAARLRRRRRAHGSGHRPQLAFLQP

SEQ ID NO: 110930 - protein, 96 aa, Zea mays subsp. mays
  misc_feature (1)..(96): Ceres Seq. ID no. 13586391
  misc_feature (1)..(72): Homolog of NCBI NO: 7661746 NR Description: signal peptidase 12kDa [Homo sapiens]
  misc_feature (1)..(94): Homolog of NCBI NO: 18399963 NR Description: expressed protein [Arabidopsis thaliana]
  misc_feature (1)..(96): Homolog of NCBI NO: 30102562 NR Description: At4g40042 [Arabidopsis thaliana]
  misc_feature (1)..(96): Homolog of NCBI NO: 22329270 NR Description: Probable microsomal signal peptidase 12 kDa
  misc_feature (1)..(72): Homolog of NCBI NO: 12654137 NR Description: Similar to HSPC033 protein [Homo sapiens]
  misc_feature (1)..(67): Homolog of NCBI NO: 16975492 NR Description: similar to signal peptidase 12kDa [Mus musculus]
  misc_feature (1)..(67): Homolog of NCBI NO: 26350113 NR Description: unnamed protein product [Mus musculus]
  misc_feature (1)..(72): Homolog of NCBI NO: 27667224 NR Description: similar to Microsomal signal peptidase 12 kDa
  misc_feature (1)..(72): Homolog of NCBI NO: 16905460 NR Description: signal peptidase 12kDa subunit [Homo sapiens]
  misc_feature (1)..(72): Homolog of NCBI NO: 20140350 NR Description: Microsomal signal peptidase 12 kDa subunit (SPase
MDWLGQKRAEMLMQVLLVASAVVAFLVGYVRADFQLMLLVYAGGVVLTALVTVPNWPFYNRNPLKWLDAAEAERHPRPQVSAAPAAGGKKRSGKNK

SEQ ID NO: 110931 - protein, 86 aa, Zea mays subsp. mays
  misc_feature (1)..(86): Ceres Seq. ID no. 13586392
  misc_feature (1)..(62): Homolog of NCBI NO: 12654137 NR Description: Similar to HSPC033 protein [Homo sapiens]
  misc_feature (1)..(57): Homolog of NCBI NO: 16975492 NR Description: similar to signal peptidase 12kDa [Mus musculus]
  misc_feature (1)..(57): Homolog of NCBI NO: 26350113 NR Description: unnamed protein product [Mus musculus]
  misc_feature (1)..(62): Homolog of NCBI NO: 27667224 NR Description: similar to Microsomal signal peptidase 12 kDa
  misc_feature (1)..(62): Homolog of NCBI NO: 16905460 NR Description: signal peptidase 12kDa subunit [Homo sapiens]
  misc_feature (1)..(62): Homolog of NCBI NO: 20140350 NR Description: Microsomal signal peptidase 12 kDa subunit (SPase
  misc_feature (1)..(62): Homolog of NCBI NO: 7661746 NR Description: signal peptidase 12kDa [Homo sapiens]
  misc_feature (1)..(84): Homolog of NCBI NO: 18399963 NR Description: expressed protein [Arabidopsis thaliana]
  misc_feature (1)..(86): Homolog of NCBI NO: 30102562 NR Description: At4g40042 [Arabidopsis thaliana]
  misc_feature (1)..(86): Homolog of NCBI NO: 22329270 NR Description: Probable microsomal signal peptidase 12 kDa
MLMQVLLVASAVVAFLVGYVRADFQLMLLVYAGGVVLTALVTVPNWPFYNRNPLKWLDAAEAERHPRPQVSAAPAAGGKKRSGKNK

SEQ ID NO: 110932 - DNA, 1152 bp, Zea mays subsp. mays
  misc_feature (1)..(1152): Ceres Seq. ID no. 14305152
acaagctgtcacaaactcagcacacaatcacactgacacacacaccaccaccacggcaccgctagtgagaagcggagcgggaggacacgcggcgcggactgcgatggctcgtgcgctcggcgcttgcgtgctgctcgccgtcctgctcggtgccctggcgccggcggcggccgcgcgcgcccacgacgaccagggcagcggggccggcatacggcagccgagcggcgagtaccgcgggaggaaggtgggggccaggacggaggtgcgggacgtggagggcgacggcgaggtgcaggagctcggccggttctccgtcgccgagtacaaccggcagctccgagaaggtggcggcggcggcggcaggctcgagttcggcagggtggtggcggcgcagcggcaggtggtgtcggggctcaagtactacctccccacccattcactcgccttgcgcttcctcgccgccccagttccccaccccctgctcacccacccgtcccctcctgctcgcccatggctcccatcgctgtcggcgacgccctccccgacggccagctcgggtggttcgacgagaacgaccagctgcagcaggtctccgtccacgcgctcgccgccggcaagaaggtcatcctcttcggcgtccccggcgccttcaccccgacctgcagcaaccagcatgtgccaggcttcatcacacaggctgagcagctcaaagccaagggtgtagacgagatcctgcttatcagcgttaacgaccccttcgtcatgaaggcgtgggcgaagacctaccccgagaacaagcacgtgaagttcctcgccgacggatctggagcgtacaccaaggcgctcgacctcgagctcgatctcacggacaaaggtctgggcgtgcgctcgaagaggttcgctctcctggccgacgacctcacggtcaccgtcgcaaacatcgaggaaggcgggcagttcacgatctctggcgctgaggagatcctgaaggcgctttagaagccgcagcaacgatcggtctagtttgaactcgcctttgaataacttgtcgttggacaaggtctagttcggtgttgtgtatggaacggtcgtcactgagtcatgcacgatttggtatccgtgtgtttatgttcgccggtttgaggaactctc

SEQ ID NO: 110933 - protein, 240 aa, Zea mays subsp. mays
  misc_feature (1)..(240): Ceres Seq. ID no. 14305153
  misc_feature (176)..(240): Pfam Name: Equine herpesvirus glycoprotein gp2 Pfam Description: Equine herpesvirus glycoprotein gp2
  misc_feature (165)..(240): Homolog of NCBI NO: 13592175 NR Description: ppg3 [Leishmania major]
  misc_feature (164)..(240): Homolog of NCBI NO: 34809534 NR Description: Epa4p [Candida glabrata]
  misc_feature (173)..(240): Homolog of NCBI NO: 13592175 NR Description: ppg3 [Leishmania major]
  misc_feature (173)..(240): Homolog of NCBI NO: 13592175 NR Description: ppg3 [Leishmania major]
  misc_feature (173)..(240): Homolog of NCBI NO: 13592175 NR Description: ppg3 [Leishmania major]
  misc_feature (173)..(240): Homolog of NCBI NO: 13592175 NR Description: ppg3 [Leishmania major]
QAVTNSAHNHTDTHTTTTAPLVRSGAGGHAARTAMARALGACVLLAVLLGALAPAAAARAHDDQGSGAGIRQPSGEYRGRKVGARTEVRDVEGDGEVQELGRFSVAEYNRQLREGGGGGGRLEFGRVVAAQRQVVSGLKYYLPTHSLALRFLAAPVPHPLLTHPSPPARPWLPSLSATPSPTASSGGSTRTTSCSRSPSTRSPPARRSSSSASPAPSPRPAATSMCQASSHRLSSSKPRV

SEQ ID NO: 110934 - protein, 206 aa, Zea mays subsp. mays
  misc_feature (1)..(206): Ceres Seq. ID no. 14305154
  misc_feature (142)..(206): Pfam Name: Equine herpesvirus glycoprotein gp2 Pfam Description: Equine herpesvirus glycoprotein gp2
  misc_feature (131)..(206): Homolog of NCBI NO: 13592175 NR Description: ppg3 [Leishmania major]
  misc_feature (130)..(206): Homolog of NCBI NO: 34809534 NR Description: Epa4p [Candida glabrata]
  misc_feature (139)..(206): Homolog of NCBI NO: 13592175 NR Description: ppg3 [Leishmania major]
  misc_feature (139)..(206): Homolog of NCBI NO: 13592175 NR Description: ppg3 [Leishmania major]
  misc_feature (139)..(206): Homolog of NCBI NO: 13592175 NR Description: ppg3 [Leishmania major]
  misc_feature (139)..(206): Homolog of NCBI NO: 13592175 NR Description: ppg3 [Leishmania major]
MARALGACVLLAVLLGALAPAAAARAHDDQGSGAGIRQPSGEYRGRKVGARTEVRDVEGDGEVQELGRFSVAEYNRQLREGGGGGGRLEFGRVVAAQRQVVSGLKYYLPTHSLALRFLAAPVPHPLLTHPSPPARPWLPSLSATPSPTASSGGSTRTTSCSRSPSTRSPPARRSSSSASPAPSPRPAATSMCQASSHRLSSSKPRV

SEQ ID NO: 110935 - protein, 162 aa, Zea mays subsp. mays; identical to SEQ ID NO: 110396
  misc_feature (1)..(162): Ceres Seq. ID no. 14305155
  misc_feature (6)..(160): Pfam Name: AhpC/TSA family Pfam Description: AhpC/TSA family
  misc_feature (1)..(162): Homolog of NCBI NO: 4704732 NR Description: peroxiredoxin TPx2 [Arabidopsis thaliana]
  misc_feature (1)..(162): Homolog of NCBI NO: 19548660 NR Description: peroxiredoxin [Populus tremula x Populus
  misc_feature (1)..(162): Homolog of NCBI NO: 30841938 NR Description: thioredoxin peroxidase 1 [Lycopersicon esculentum]
  misc_feature (1)..(162): Homolog of NCBI NO: 21593881 NR Description: type 2 peroxiredoxin, putative [Arabidopsis
  misc_feature (1)..(162): Homolog of NCBI NO: 18406870 NR Description: peroxiredoxin -related [Arabidopsis thaliana]
  misc_feature (1)..(162): Homolog of NCBI NO: 18654477 NR Description: thioredoxin peroxidase [Capsicum annuum]
  misc_feature (1)..(162): Homolog of NCBI NO: 15218876 NR Description: type 2 peroxiredoxin -related [Arabidopsis
  misc_feature (1)..(162): Homolog of NCBI NO: 15218877 NR Description: type 2 peroxiredoxin -related [Arabidopsis
  misc_feature (1)..(162): Homolog of NCBI NO: 4928472 NR Description: type 2 peroxiredoxin [Brassica rapa subsp.
  misc_feature (1)..(162): Homolog of NCBI NO: 34911078 NR Description: peroxiredoxin [Oryza sativa (japonica

SEQ ID NO: 110936 - DNA, 706 bp, Zea mays subsp. mays
  misc_feature (1)..(706): Ceres Seq. ID no. 13600701
cgcagtagtttttatgtaaacgacttctaaataataatttaaaaataaaatttagaaaaactatggaagattaaatatctaaatttggctagtctctctctggatgctctaattactttattttgttgcaggactcccgcgtgattcccgagggtccctcgaagtcttcaatccagacgcccctgtttcagatcgagcaaccacctccccgtttctcctccctcctgcggccgcgtcccatcccagcctcctcgccgccggagatggcggcgatgctgacgtgggtcgggcgacacagagggccgccgagtggggcctcgtcctccagaccgacgagcacaccggccgcccccagggtgtcgtcgcccgtccctccggttccaaccgcaccagcgagagtggcaactccatcgacgagagggccgccgccgccggtgctggtagagctctcccccgggtgtcggaggagcttcgcgccgcgctctcagcgttccagcagaccttcgtcgtgtccgatgccacccgccctgaccaccccatcctctacgccagcgctggattcttcaacatgacgggctactcctccaatgaggtcgtcggaaggaactggtgagtcaatggtttcaattcaatatattcctattctattccatgccaatcgaatcgaataacacttcaactaatacgcactgcacttacgcctcgc

SEQ ID NO: 110937 - protein, 102 aa, Zea mays subsp. mays
  misc_feature (1)..(102): Ceres Seq. ID no. 13600702
  misc_feature (1)..(102): Pfam Name: Formin Homology 2 Domain Pfam Description: Formin Homology 2 Domain
  misc_feature (1)..(102): Homolog of NCBI NO: 1076802 NR Description: extensin-like protein - maize
  misc_feature (1)..(102): Homolog of NCBI NO: 2429362 NR Description: proline rich protein [Santalum album]
  misc_feature (1)..(102): Homolog of NCBI NO: 1076802 NR Description: extensin-like protein - maize
  misc_feature (1)..(102): Homolog of NCBI NO: 39580549 NR Description: Hypothetical protein CBG22491 [Caenorhabditis
  misc_feature (1)..(101): Homolog of NCBI NO: 20138131 NR Description: Vegetative cell wall protein gp1 precursor
  misc_feature (1)..(102): Homolog of NCBI NO: 25056007 NR Description: extensin-like protein [Zea mays]
  misc_feature (1)..(102): Homolog of NCBI NO: 15226024 NR Description: arabinogalactan-protein (AGP9) [Arabidopsis
  misc_feature (1)..(102): Homolog of NCBI NO: 1076802 NR Description: extensin-like protein - maize
  misc_feature (1)..(102): Homolog of NCBI NO: 27375632 NR Description: blr0521 [Bradyrhizobium japonicum]
  misc_feature (1)..(94): Homolog of NCBI NO: 13447449 NR Description: receptor protein kinase PERK1 [Brassica napus]
MAAMLTWVGRHRGPPSGASSSRPTSTPAAPRVSSPVPPVPTAPARVATPSTRGPPPPVLVELSPGCRRSFAPRSQRSSRPSSCPMPPALTTPSSTPALDSST

SEQ ID NO: 110938 - protein, 99 aa, Zea mays subsp. mays
  misc_feature (1)..(99): Ceres Seq. ID no. 13600703
  misc_feature (1)..(99): Pfam Name: Formin Homology 2 Domain Pfam Description: Formin Homology 2 Domain
  misc_feature (1)..(99): Homolog of NCBI NO: 1076802 NR Description: extensin-like protein - maize
  misc_feature (1)..(99): Homolog of NCBI NO: 2429362 NR Description: proline rich protein [Santalum album]
  misc_feature (1)..(99): Homolog of NCBI NO: 1076802 NR Description: extensin-like protein - maize
  misc_feature (1)..(99): Homolog of NCBI NO: 39580549 NR Description: Hypothetical protein CBG22491 [Caenorhabditis
  misc_feature (1)..(98): Homolog of NCBI NO: 20138131 NR Description: Vegetative cell wall protein gp1 precursor
  misc_feature (1)..(99): Homolog of NCBI NO: 25056007 NR Description: extensin-like protein [Zea mays]
  misc_feature (1)..(99): Homolog of NCBI NO: 15226024 NR Description: arabinogalactan-protein (AGP9) [Arabidopsis
  misc_feature (1)..(99): Homolog of NCBI NO: 1076802 NR Description: extensin-like protein - maize
  misc_feature (1)..(99): Homolog of NCBI NO: 27375632 NR Description: blr0521 [Bradyrhizobium japonicum]
  misc_feature (1)..(91): Homolog of NCBI NO: 13447449 NR Description: receptor protein kinase PERK1 [Brassica napus]
MLTWVGRHRGPPSGASSSRPTSTPAAPRVSSPVPPVPTAPARVATPSTRGPPPPVLVELSPGCRRSFAPRSQRSSRPSSCPMPPALTTPSSTPALDSST

SEQ ID NO: 110939 - DNA, 1547 bp, Zea mays subsp. mays
  misc_feature (1)..(1547): Ceres Seq. ID no. 15180400
caagacaatacaatgctgaaaatggagggcgacatggcactgcaaaacaagcaattcctagtcctgctgatacttttagtccagctaggaaggacaatacttcaactgcgtatgctctcaaagaagcccgtgatttaaagcataaggctaatcgtttgaaggaagaaggaaaagagcttgaaagtacaagactctactttgactccgccttaaaatttttgcatgttgcatcacttttggaacctcctagttttgatggtttgaaacaaggcgatgcagcccagagcatgtattcagatactgcaaaactttgcaactttgttggtcacgcgtatgaaaaatgcaagaagatggctgctgctgctttagcatacaagtgtgttgaagttgcttatctgaaggctgcatactgcaagcacccaactgcaagcaaggatagacaagtgttacaggcagttgtacagactgcaccaggtgaatcaccatcatcttcagcctcagacattgataatttaaataacaatggattatccaagggcccttcaagcaaggatgccaattcaccacaagtggttggaaatcatttgttgctggccactcgaaatcaaccacacttgatgcggttacttgcttatacaaatgatgtcaatagtgcctttgaggctactcggaagtctcacatggcaattgcttctgcttctggcaatcatgaaaatggagttgatggtctttcttcagtaaaaacagtactggattttaacttccgaagtgtgaatgatctactaaggtttgtgcggatttcaatggagtctatcagctgctgatgtgtgcagaatctgagaaagtgccatctgatggaagttcctgttggatgtttaatctaattaactttgttttttatgaagtagcatgaagctgaatatagtccaacagtgcaaaagcataggtctttcatttgagcttgctggtcaacttgtacagagagtgatcatattccttctttttttacgttgattacacccaattagtatatatagttgcatacccacttggatgatttagttagtgaggaacacaagtgaagatgagctttgcactgttcaatgcttgtgcttggaagaaggatgctcttgcgcccgcagttcattgttatctggaaagtggcttgctactgagcattctcttactacatgatgtaaattgtgaatctccatcaaggctggcttatggctgaagagtcagtatcatagtttcctttgatgggagaggacagcaaagccagctaatctcgctaaccaagaaatcggctagtagttttttcccttttgaaccttgtcatgatgccttgtcttctggataaagttcacgcaggtttcaaataagaaatcacatggacgactatcagacttgtatggaatatggatgctgtacaaaggtttctaatgtacattagtctaactttttttttcatgatccccgaaatgccgactatcaccagcgcatgtacatgtatatatacatacactaaaggttggggcatttttatc

SEQ ID NO: 110940 - protein, 273 aa, Zea mays subsp. mays
  misc_feature (1)..(273): Ceres Seq. ID no. 15180401
  misc_feature (6)..(105): Homolog of NCBI NO: 22329307 NR Description: expressed protein [Arabidopsis thaliana]
  misc_feature (109)..(272): Homolog of NCBI NO: 7452411 NR Description: hypothetical protein dl3905c - Arabidopsis
  misc_feature (16)..(272): Homolog of NCBI NO: 30683379 NR Description: expressed protein [Arabidopsis thaliana]
  misc_feature (15)..(270): Homolog of NCBI NO: 15229341 NR Description: hypothetical protein [Arabidopsis thaliana]
  misc_feature (6)..(272): Homolog of NCBI NO: 25518543 NR Description: hypothetical protein F22D16.1 - Arabidopsis
  misc_feature (4)..(273): Homolog of NCBI NO: 34899330 NR Description: contains ESTs AU056898(S20963)~similar to Arabidopsis thaliana chromosome3,
RQYNAENGGRHGTAKQAIPSPADTFSPARKDNTSTAYALKEARDLKHKANRLKEEGKELESTRLYFDSALKFLHVASLLEPPSFDGLKQGDAAQSMYSDTAKLCNFVGHAYEKCKKMAAAALAYKCVEVAYLKAAYCKHPTASKDRQVLQAVVQTAPGESPSSSASDIDNLNNNGLSKGPSSKDANSPQVVGNHLLLATRNQPHLMRLLAYTNDVNSAFEATRKSHMAIASASGNHENGVDGLSSVKTVLDFNFRSVNDLLRFVRISMESISC

SEQ ID NO: 110941 - protein, 178 aa, Zea mays subsp. mays
  misc_feature (1)..(178): Ceres Seq. ID no. 15180402
  misc_feature (14)..(177): Homolog of NCBI NO: 7452411 NR Description: hypothetical protein dl3905c - Arabidopsis
  misc_feature (1)..(177): Homolog of NCBI NO: 30683379 NR Description: expressed protein [Arabidopsis thaliana]
  misc_feature (1)..(175): Homolog of NCBI NO: 15229341 NR Description: hypothetical protein [Arabidopsis thaliana]
  misc_feature (1)..(177): Homolog of NCBI NO: 25518543 NR Description: hypothetical protein F22D16.1 - Arabidopsis
  misc_feature (1)..(178): Homolog of NCBI NO: 34899330 NR Description: contains ESTs AU056898(S20963)~similar to Arabidopsis thaliana chromosome3,
MYSDTAKLCNFVGHAYEKCKKMAAAALAYKCVEVAYLKAAYCKHPTASKDRQVLQAVVQTAPGESPSSSASDIDNLNNNGLSKGPSSKDANSPQVVGNHLLLATRNQPHLMRLLAYTNDVNSAFEATRKSHMAIASASGNHENGVDGLSSVKTVLDFNFRSVNDLLRFVRISMESISC

SEQ ID NO: 110942 - protein, 157 aa, Zea mays subsp. mays
  misc_feature (1)..(157): Ceres Seq. ID no. 15180403
  misc_feature (1)..(156): Homolog of NCBI NO: 7452411 NR Description: hypothetical protein dl3905c - Arabidopsis
  misc_feature (1)..(156): Homolog of NCBI NO: 30683379 NR Description: expressed protein [Arabidopsis thaliana]
  misc_feature (1)..(154): Homolog of NCBI NO: 15229341 NR Description: hypothetical protein [Arabidopsis thaliana]
  misc_feature (1)..(156): Homolog of NCBI NO: 25518543 NR Description: hypothetical protein F22D16.1 - Arabidopsis
  misc_feature (1)..(157): Homolog of NCBI NO: 34899330 NR Description: contains ESTs AU056898(S20963)~similar to Arabidopsis thaliana chromosome3,
MAAAALAYKCVEVAYLKAAYCKHPTASKDRQVLQAVVQTAPGESPSSSASDIDNLNNNGLSKGPSSKDANSPQVVGNHLLLATRNQPHLMRLLAYTNDVNSAFEATRKSHMAIASASGNHENGVDGLSSVKTVLDFNFRSVNDLLRFVRISMESISC

SEQ ID NO: 110943 - DNA, 1103 bp, Zea mays subsp. mays
  misc_feature (1)..(1103): Ceres Seq. ID no. 15180424
  misc_feature: MA Experiment ID: 108527 Result: Up-regulated in Transcription
  misc_feature: MA Experiment 108527 PARAMETER Experiment Name: Zm_5mM_NO_P Parameter: Age (day) Value: 8
  misc_feature: MA Experiment 108527 PARAMETER Experiment Name: Zm_5mM_NO_P Parameter: Organism Value: Zea mays
  misc_feature: MA Experiment 108527 PARAMETER Experiment Name: Zm_5mM_NO_P Parameter: Plant Line Value: 35A19
  misc_feature: MA Experiment 108527 PARAMETER Experiment Name: Zm_5mM_NO_P Parameter: Timepoint (hr) Value: 6
  misc_feature: MA Experiment 108527 PARAMETER Experiment Name: Zm_5mM_NO_P Parameter: Tissue Value: Aerial
  misc_feature: MA Experiment 108527 PARAMETER Experiment Name: Zm_5mM_NO_P Parameter: Treatment Value: 5mM NO vs. No Treatment
  misc_feature: MA Experiment ID: 108529 Result: Up-regulated in Transcription
  misc_feature: MA Experiment 108529 PARAMETER Experiment Name: Zm_Imbibed_Seeds_P Parameter: Age (day) Value: 5 vs. 2
  misc_feature: MA Experiment 108529 PARAMETER Experiment Name: Zm_Imbibed_Seeds_P Parameter: Organism Value: Zea mays
  misc_feature: MA Experiment 108529 PARAMETER Experiment Name: Zm_Imbibed_Seeds_P Parameter: Plant Line Value: 35A19
  misc_feature: MA Experiment 108529 PARAMETER Experiment Name: Zm_Imbibed_Seeds_P Parameter: Tissue Value: Roots vs. Embryo
  misc_feature: MA Experiment ID: 108530 Result: Up-regulated in Transcription
  misc_feature: MA Experiment 108530 PARAMETER Experiment Name: Zm_Imbibed_Seeds_P Parameter: Age (day) Value: 6 vs. 2
  misc_feature: MA Experiment 108530 PARAMETER Experiment Name: Zm_Imbibed_Seeds_P Parameter: Organism Value: Zea mays
  misc_feature: MA Experiment 108530 PARAMETER Experiment Name: Zm_Imbibed_Seeds_P Parameter: Plant Line Value: 35A19
  misc_feature: MA Experiment 108530 PARAMETER Experiment Name: Zm_Imbibed_Seeds_P Parameter: Tissue Value: Aerial vs. Embryo
  misc_feature: MA Experiment ID: 108535 Result: Down-regulated in Transcription
  misc_feature: MA Experiment 108535 PARAMETER Experiment Name: Zm_Meristem_P Parameter: Age (day) Value: 8
  misc_feature: MA Experiment 108535 PARAMETER Experiment Name: Zm_Meristem_P Parameter: Organism Value: Zea mays
  misc_feature: MA Experiment 108535 PARAMETER Experiment Name: Zm_Meristem_P Parameter: Plant Line Value: 35A19
  misc_feature: MA Experiment 108535 PARAMETER Experiment Name: Zm_Meristem_P Parameter: Tissue Value: Root Meristem vs. Above Root Meristem
  misc_feature: MA Experiment ID: 108546 Result: Up-regulated in Transcription
  misc_feature: MA Experiment 108546 PARAMETER Experiment Name: Zm_Imbibed_Seeds_P Parameter: Age (day) Value: 3 vs. 2
  misc_feature: MA Experiment 108546 PARAMETER Experiment Name: Zm_Imbibed_Seeds_P Parameter: Organism Value: Zea mays
  misc_feature: MA Experiment 108546 PARAMETER Experiment Name: Zm_Imbibed_Seeds_P Parameter: Plant Line Value: 35A19
  misc_feature: MA Experiment 108546 PARAMETER Experiment Name: Zm_Imbibed_Seeds_P Parameter: Tissue Value: Roots vs. Embryo
  misc_feature: MA Experiment ID: 108556 Result: Down-regulated in Transcription
  misc_feature: MA Experiment 108556 PARAMETER Experiment Name: Zm_Drought_P Parameter: Age (day) Value: 9
  misc_feature: MA Experiment 108556 PARAMETER Experiment Name: Zm_Drought_P Parameter: Organism Value: Zea mays
  misc_feature: MA Experiment 108556 PARAMETER Experiment Name: Zm_Drought_P Parameter: Plant Line Value: 35A19
  misc_feature: MA Experiment 108556 PARAMETER Experiment Name: Zm_Drought_P Parameter: Timepoint (hr) Value: 24
  misc_feature: MA Experiment 108556 PARAMETER Experiment Name: Zm_Drought_P Parameter: Tissue Value: Aerial
  misc_feature: MA Experiment 108556 PARAMETER Experiment Name: Zm_Drought_P Parameter: Treatment Value: Drought vs. No Drought
  misc_feature: MA Experiment ID: 108559 Result: Up-regulated in Transcription
  misc_feature: MA Experiment 108559 PARAMETER Experiment Name: Zm_5mM_NO_P Parameter: Age (day) Value: 8
  misc_feature: MA Experiment 108559 PARAMETER Experiment Name: Zm_5mM_NO_P Parameter: Organism Value: Zea mays
  misc_feature: MA Experiment 108559 PARAMETER Experiment Name: Zm_5mM_NO_P Parameter: Plant Line Value: 35A19
  misc_feature: MA Experiment 108559 PARAMETER Experiment Name: Zm_5mM_NO_P Parameter: Timepoint (hr) Value: 12
  misc_feature: MA Experiment 108559 PARAMETER Experiment Name: Zm_5mM_NO_P Parameter: Tissue Value: Aerial
  misc_feature: MA Experiment 108559 PARAMETER Experiment Name: Zm_5mM_NO_P Parameter: Treatment Value: 5mM NO vs. No Treatment
  misc_feature: MA Experiment ID: 108597 Result: Down-regulated in Transcription
  misc_feature: MA Experiment 108597 PARAMETER Experiment Name: Zm_100uM_ABA_P Parameter: Age (day) Value: 9
  misc_feature: MA Experiment 108597 PARAMETER Experiment Name: Zm_100uM_ABA_P Parameter: Organism Value: Zea mays
  misc_feature: MA Experiment 108597 PARAMETER Experiment Name: Zm_100uM_ABA_P Parameter: Plant Line Value: 35A19
  misc_feature: MA Experiment 108597 PARAMETER Experiment Name: Zm_100uM_ABA_P Parameter: Timepoint (hr) Value: 24
  misc_feature: MA Experiment 108597 PARAMETER Experiment Name: Zm_100uM_ABA_P Parameter: Tissue Value: Aerial
  misc_feature: MA Experiment 108597 PARAMETER Experiment Name: Zm_100uM_ABA_P Parameter: Treatment Value: 100uM ABA vs. No Treatment
  misc_feature: MA Experiment ID: 108689 Result: Down-regulated in Transcription
  misc_feature: MA Experiment 108689 PARAMETER Experiment Name: Zm_Drought_Roots_P Parameter: Age (day) Value: 9
  misc_feature: MA Experiment 108689 PARAMETER Experiment Name: Zm_Drought_Roots_P Parameter: Organism Value: Zea mays
  misc_feature: MA Experiment 108689 PARAMETER Experiment Name: Zm_Drought_Roots_P Parameter: Plant Line Value: 35A19
  misc_feature: MA Experiment 108689 PARAMETER Experiment Name: Zm_Drought_Roots_P Parameter: Timepoint (hr) Value: 24
  misc_feature: MA Experiment 108689 PARAMETER Experiment Name: Zm_Drought_Roots_P Parameter: Tissue Value: Roots
  misc_feature: MA Experiment 108689 PARAMETER Experiment Name: Zm_Drought_Roots_P Parameter: Treatment Value: Drought vs. No Drought
  misc_feature: MA Experiment ID: 20000108 Result: Down-regulated in Transcription
  misc_feature: MA Experiment 20000108 PARAMETER Experiment Name: Zm_Root-Tips_P Parameter: Age (day) Value: 12
  misc_feature: MA Experiment 20000108 PARAMETER Experiment Name: Zm_Root-Tips_P Parameter: Organism Value: Zea mays
  misc_feature: MA Experiment 20000108 PARAMETER Experiment Name: Zm_Root-Tips_P Parameter: Tissue Value: Root tips vs. Root mid region    35
  misc_feature: MA Experiment 20000108 PARAMETER Experiment Name: Zm_Root-Tips_P Parameter: Tissue Value: Root tips vs. Root mid region   Sequence Listing-Misc Features (4)
  misc_feature: MA Experiment ID: 20000492 Result: Down-regulated in Transcription
  misc_feature: MA Experiment 20000492 PARAMETER Experiment Name: Zm_Hybrid_Seed_Dev_P Parameter: DAP Value: 12
  misc_feature: MA Experiment 20000492 PARAMETER Experiment Name: Zm_Hybrid_Seed_Dev_P Parameter: Organism Value: Zea mays
  misc_feature: MA Experiment 20000492 PARAMETER Experiment Name: Zm_Hybrid_Seed_Dev_P Parameter: Plant Line Value: 35A19
  misc_feature: MA Experiment 20000492 PARAMETER Experiment Name: Zm_Hybrid_Seed_Dev_P Parameter: Tissue Value: Fert Kernel vs. Unfert Floret
  misc_feature: MA Experiment ID: 20000535 Result: Down-regulated in Transcription
  misc_feature: MA Experiment 20000535 PARAMETER Experiment Name: Zm_Hybrid_Seed_Dev_P Parameter: DAP Value: 30 vs. 12
  misc_feature: MA Experiment 20000535 PARAMETER Experiment Name: Zm_Hybrid_Seed_Dev_P Parameter: Organism Value: Zea mays
  misc_feature: MA Experiment 20000535 PARAMETER Experiment Name: Zm_Hybrid_Seed_Dev_P Parameter: Plant Line Value: 35A19
  misc_feature: MA Experiment 20000535 PARAMETER Experiment Name: Zm_Hybrid_Seed_Dev_P Parameter: Tissue Value: Embryo vs. Unfert Floret
attcatccaacactactccaagtttaatttcccacaccaaacctcagctcccaccgatcggttccatcaacctaacaatccctcgcttgttagcccgcgcgcgtgtgtcgtgtgcgctgcgtgcgtcccatggctcagcctcgcgtgcacccaaacgcggcggcggcggcgggtgacctggagatgggcggcaacggcggcgtgttcccgccgctgccagttcgcgggcagcccgcctccgtgaaccagcagcagctcggcggcggcccccacacctgggtgggcaacgacgccaacacgctgctggtggtggccacgctgatcaccacgctcacctaccagttcggcaccagcatccccggcggctactggcagcaggacacgacggcggcgtcgagggacggcaaggagcaggtcacgtaccgcgccggcgaccccatcatgcgcgacctgcaccggccaaggtactgggtgttcatgggcgcgagctgggtggggttcgcgagctccatgatgatgacgctgagcctgctggtgcggatgcccgttgactcgcgccacgtgcgctggtccttcgtggtggcctactccagcctggtgctcaccttcgtggtgtcgcagcccaagacgcacctgtcgctggacctcctcatctgggccgccgtcctcgtcttcctctggatcatcgtcagcctccacccggaccgccgcgcgcgcgtcatccaggagctctgctgcggtggccgcgagacctgaagcagagcaaaccccgaccgacgtaccacgaatgattagttgttgctttttttcttttctttttttggtgacgatggggtaattgactgtcttttctcttctagtcgaccaagatgtaaacaaaatatcccgctgcacaaggtagccagagcctatgtccttgattgagcgctatagtgctctacattcgtatcaagtagaatctagataggcagatgaacacgctggcatgatttagcgtaatcttttcggcacccgcctgcaatttaaaaaactagactagatatttccatgtcaacgtgtaaagaaaaaaaagaaaaatcaatggccattcgctagttttcttt

SEQ ID NO: 110944 - protein, 208 aa, Zea mays subsp. mays
  misc_feature (1)..(208): Ceres Seq. ID no. 15180425
  misc_feature (73)..(183): Homolog of NCBI NO: 34902874 NR Description: unnamed protein product [Oryza sativa (japonica
  misc_feature (40)..(185): Homolog of NCBI NO: 34902868 NR Description: unnamed protein product [Oryza sativa (japonica
MAQPRVHPNAAAAAGDLEMGGNGGVFPPLPVRGQPASVNQQQLGGGPHTWVGNDANTLLVVATLITTLTYQFGTSIPGGYWQQDTTAASRDGKEQVTYRAGDPIMRDLHRPRYWVFMGASWVGFASSMMMTLSLLVRMPVDSRHVRWSFVVAYSSLVLTFVVSQPKTHLSLDLLIWAAVLVFLWIIVSLHPDRRARVIQELCCGGRET

SEQ ID NO: 110945 - protein, 190 aa, Zea mays subsp. mays
  misc_feature (1)..(190): Ceres Seq. ID no. 15180426
  misc_feature (55)..(165): Homolog of NCBI NO: 34902874 NR Description: unnamed protein product [Oryza sativa (japonica
  misc_feature (22)..(167): Homolog of NCBI NO: 34902868 NR Description: unnamed protein product [Oryza sativa (japonica
MGGNGGVFPPLPVRGQPASVNQQQLGGGPHTWVGNDANTLLVVATLITTLTYQFGTSIPGGYWQQDTTAASRDGKEQVTYRAGDPIMRDLHRPRYWVFMGASWVGFASSMMMTLSLLVRMPVDSRHVRWSFVVAYSSLVLTFVVSQPKTHLSLDLLIWAAVLVFLWIIVSLHPDRRARVIQELCCGGRET

SEQ ID NO: 110946 - protein, 104 aa, Zea mays subsp. mays
  misc_feature (1)..(104): Ceres Seq. ID no. 15180427
  misc_feature (1)..(79): Homolog of NCBI NO: 34902874 NR Description: unnamed protein product [Oryza sativa (japonica
  misc_feature (1)..(81): Homolog of NCBI NO: 34902868 NR Description: unnamed protein product [Oryza sativa (japonica
MRDLHRPRYWVFMGASWVGFASSMMMTLSLLVRMPVDSRHVRWSFVVAYSSLVLTFVVSQPKTHLSLDLLIWAAVLVFLWIIVSLHPDRRARVIQELCCGGRET

SEQ ID NO: 110947 - DNA, 520 bp, Zea mays subsp. mays
  misc_feature (1)..(520): Ceres Seq. ID no. 13586393
actttccccgcctccatcaccaattcacgatctcctttcccgcaccgcgccccggatcgccggctcgcaattccggagttaaattcccctccaccgcaaccgtcatgggcggctcccacagccgcgaggacgtcgatctcacctcctccgacgaagaggaggaattcgaggacgactatgacgcccgatcccatcgcggaggccgcagcgagcgcggggcagcgcgacgacgacctcctccgcaccgccacaccttcctcgcttgaggccatcgacgccaagctcaggtcgctggatctcaagtaccagagacctaccgccgccaagctctacctccacgtcggcggggcctcgccttccgcgcgctgggtgcccgccgagcgccgcgcgacctacgcattcgtcgaccagtcgagcgacgacgcctyctcccccaggtggttcctagaggttgggccggggccgcgggtctccgcgcccgtggactcggcgctccagctgaagacgatccccgcgcagc

SEQ ID NO: 110948 - protein, 173 aa, Zea mays subsp. mays
  misc_feature (1)..(173): Ceres Seq. ID no. 13586394
  misc_feature (78)..(172): Homolog of NCBI NO: 7488984 NR Description: dem protein - tomato
TFPASITNSRSPFPHRAPDRRLAIPELNSPPPQPSWAAPTAARTSISPPPTKRRNSRTTMTPDPIAEAAASAGQRDDDLLRTATPSSLEAIDAKLRSLDLKYQRPTAAKLYLHVGGASPSARWVPAERRATYAFVDQSSDDAXSPRWFLEVGPGPRVSAPVDSALQLKTIPAQ

SEQ ID NO: 110949 - protein, 114 aa, Zea mays subsp. mays
  misc_feature (1)..(114): Ceres Seq. ID no. 13586395
  misc_feature (19)..(113): Homolog of NCBI NO: 7488984 NR Description: dem protein - tomato
MTPDPIAEAAASAGQRDDDLLRTATPSSLEAIDAKLRSLDLKYQRPTAAKLYLHVGGASPSARWVPAERRATYAFVDQSSDDAXSPRWFLEVGPGPRVSAPVDSALQLKTIPAQ

SEQ ID NO: 110950 - protein, 87 aa, Zea mays subsp. mays
  misc_feature (1)..(87): Ceres Seq. ID no. 13586396
  misc_feature (35)..(78): Homolog of NCBI NO: 7488984 NR Description: dem protein - tomato
FPRLHHQFTISFPAPRPGSPARNSGVKFPSTATVMGGSHSREDVDLTSSDEEEEFEDDYDARSHRGGRSERGAARRRPPPHRHTFLA

SEQ ID NO: 110951 - DNA, 728 bp, Zea mays subsp. mays
  misc_feature (1)..(728): Ceres Seq. ID no. 14305101
agaacaaggggggaaaaagttgacatacgcttgcagctatggcccttgccgcccgcgccgcgctcgtgcgcgtcctccctccgcgaccatcgccgacctcccaacagaagcagctcaagcaaggtctaggcggccgcagtgggtcctcgctcgccgttcgggcgaaggactccgatgacttcggggcccttctgtcggagaagctcgatgcgcaggcgcctgagaagcgggatgggcgggagggttttgggagggaggcgagtagcgtggaggaggagaaggaggtggtggaggtgcagggcgagccggcttcgtggggtgtgctcaaccaaatcggcttcgagttggactctgacaaatcatattctgctctcatatatggcacatctgctcttgttgcaatttggatatcatcaattgtggtttctgcacttgattcagtccctttggttcctcaggtgatggaagttgttggtcttggcttcacaatttggttcacatcgagatacctgatatttaaggagaaccgtgatgaacttttcacgagagtcagctccatcaagaagcaaattttggggtctcatgagaactgagcgtctctcttacgttctgttctgttaactggtactgtgttttattgaagatgttttttttggaataaacagtacatttttttgtttttcgcctgcatttttttactaatcgaaaggtaagtgcactgtactctc

SEQ ID NO: 110952 - protein, 184 aa, Zea mays subsp. mays
  misc_feature (1)..(184): Ceres Seq. ID no. 14305102
  misc_feature (72)..(181): Homolog of NCBI NO: 34393236 NR Description: unknown protein [Oryza sativa (japonica
  misc_feature (73)..(181): Homolog of NCBI NO: 21555057 NR Description: unknown [Arabidopsis thaliana]
  misc_feature (73)..(181): Homolog of NCBI NO: 18407178 NR Description: expressed protein [Arabidopsis thaliana]
  misc_feature (106)..(181): Homolog of NCBI NO: 18411555 NR Description: expressed protein [Arabidopsis thaliana]
  misc_feature (106)..(181): Homolog of NCBI NO: 687677 NR Description: unknown
  misc_feature (73)..(183): Homolog of NCBI NO: 38175474 NR Description: unknown protein [Oryza sativa (japonica
  misc_feature (62)..(181): Homolog of NCBI NO: 18420175 NR Description: expressed protein [Arabidopsis thaliana]
  misc_feature (62)..(181): Homolog of NCBI NO: 7485852 NR Description: hypothetical protein F20D10.220 - Arabidopsis
  misc_feature (104)..(180): Homolog of NCBI NO: 18403896 NR Description: expressed protein [Arabidopsis thaliana]
  misc_feature (96)..(179): Homolog of NCBI NO: 37536446 NR Description: hypothetical protein [Oryza sativa (japonica
MALAARAALVRVLPPRPSPTSQQKQLKQGLGGRSGSSLAVRAKDSDDFGALLSEKLDAQAPEKRDGREGFGREASSVEEEKEVVEVQGEPASWGVLNQIGFELDSDKSYSALIYGTSALVAIWISSIVVSALDSVPLVPQVMEVVGLGFTIWFTSRYLIFKENRDELFTRVSSIKKQILGSHEN

SEQ ID NO: 110953 - protein, 95 aa, Zea mays subsp. mays
  misc_feature (1)..(95): Ceres Seq. ID no. 14305103
MTSGPFCRRSSMRRRLRSGMGGRVLGGRRVAWRRRRRWWRCRASRLRGVCSTKSASSWTLTNHILLSYMAHLLLLQFGYHQLWFLHLIQSLWFLR

SEQ ID NO: 110954 - DNA, 841 bp, Zea mays subsp. mays
  misc_feature (1)..(841): Ceres Seq. ID no. 15180292
gttttttcgtcttcctcgcagcgccgccgctccatcttccgctgatccgctcgctcccgcctctcgccacgcaggcggcggcgctcaggcccgtgatttcagcgacggcgtcagcggcttcccctcccgtctcttcccagtcgcctcgcgccctcgcctccggtcctccgcacaccggccggtgaccctgcatccaccatgactggtgtcagcactgggagaccggcgggtcggaggccccgcaggaggcggaggcggagcccgcgacgccgacgtccgtggggagccagctgcggcggccggccgagtgcccgccggcgccgcggaagccggcgtgggcgcctccgccgccgtccacgcccgcctacaagcgcagcaggccgtccccgccctcctccgcggcgccggcgccggcgcgccgggccttcttccccgtcgcgcgcgacctcaccaccgtgttccgcgccctggcgccgcccaagaagcggatccgcgcgggctgacgacgggggcggtggcgttctccctggcgcgcagcacgggacgggaccggcgtggcgtggatctggtgcccagtccgccattggccgtggcgacgccgtcagtcatcagtaggtgcgcggtcatggcatggtacagagctctcgtacaaataagttctgttttttttatttggggggagggggagtgtagaattgggaaagaggctgttgtttacgtatgggggaggatgaatggggcattgaaagcttgtaaagagaattcctacagatttgttcattgtatttgttaaactatacttgctgacagtttgagaaaaatagtgaactttcacctgaat

SEQ ID NO: 110955 - protein, 138 aa, Zea mays subsp. mays
  misc_feature (1)..(138): Ceres Seq. ID no. 15180293
  misc_feature (1)..(76): Pfam Name: Cupin Pfam Description: Cupin
  misc_feature (1)..(132): Homolog of NCBI NO: 38346512 NR Description: OSJNBa0027H09.7 [Oryza sativa (japonica
  misc_feature (1)..(95): Homolog of NCBI NO: 15027957 NR Description: putative arginine/serine-rich protein
  misc_feature (1)..(119): Homolog of NCBI NO: 39592411 NR Description: Hypothetical protein CBG07956 [Caenorhabditis
  misc_feature (1)..(99): Homolog of NCBI NO: 34905768 NR Description: P0401G10.10 [Oryza sativa (japonica
  misc_feature (1)..(132): Homolog of NCBI NO: 23019271 NR Description: hypothetical protein [Thermobifida fusca]
  misc_feature (1)..(104): Homolog of NCBI NO: 9843651 NR Description: SRM102 [Arabidopsis thaliana]
  misc_feature (1)..(104): Homolog of NCBI NO: 30684163 NR Description: proline-rich protein -related [Arabidopsis
  misc_feature (1)..(104): Homolog of NCBI NO: 25408026 NR Description: probable proline-rich protein [imported] -
  misc_feature (1)..(98): Homolog of NCBI NO: 25143299 NR Description: pre-mRNA splicing SR protein related (68.2 kD)
  misc_feature (1)..(98): Homolog of NCBI NO: 39592411 NR Description: Hypothetical protein CBG07956 [Caenorhabditis
MTGVSTGRPAGRRPRRRRRRSPRRRRPWGASCGGRPSARRRRGSRRGRLRRRPRPPTSAAGRPRPPPRRRRRRAGPSSPSRATSPPCSAPWRRPRSGSARADDGGGGVLPGAQHGTGPAWRGSGAQSAIGRGDAVSHQ

SEQ ID NO: 110956 - DNA, 772 bp, Zea mays subsp. mays
  misc_feature (1)..(772): Ceres Seq. ID no. 14312444
atattcatcagggtactctacccggtcccggttggacacttggacagcccagcagccaatggcgttggtataaaacacaggtcgcatcgccgctacgagtcgcgcgcacacgataccattatattccatggaccacgacgcgtcacggcaagaagcggcggcggccgtgtggcgcggcacggtgcgcgcggtggcgtcggggccgacgcccgacgaggcgtgggcgctgctgggcgacttctgctcgctgcaccggtgggtgtccacggtgcgggcgtgccggcgcgtggaggtggagggcgcggcggcggcggagccggagccggaggggcgccccgcccccggctgcgtgcgctactgcgagggccccgtgaacatggccgcgccgggggagctcgtgggctggtccaaggagcggctcctggagatggaccacgcggggcggtggtacagctacgagctgctggagagcaacaagggcttcggcaggtaccgggccaccgtgcgggtggagcatgacccggcgggatgcgctgtcaggtggtcgttcgaggccgacccggtgaagggctggacgctcgacgggttcctggggttcctggagaaactcgcgcgtggcgtcgcccagcggctccaagaggagatcatggtgaagccgtgaagtcgcctaggattggtttgtggccgcgcgttcgtttacacttattttcaatccatatggatatggattgaagtgaattgatacagattgaaagatattttgatttactat

SEQ ID NO: 110957 - protein, 177 aa, Zea mays subsp. mays
  misc_feature (1)..(177): Ceres Seq. ID no. 14312445
  misc_feature (12)..(171): Homolog of NCBI NO: 24460080 NR Description: lachrymatory factor synthase [Allium ampeloprasum]
  misc_feature (15)..(171): Homolog of NCBI NO: 24460078 NR Description: lachrymatory factor synthase [Allium porrum]
  misc_feature (12)..(171): Homolog of NCBI NO: 25008713 NR Description: Lachrymatory-factor synthase precursor
  misc_feature (12)..(171): Homolog of NCBI NO: 24460072 NR Description: lachrymatory factor synthase [Allium chinense]
  misc_feature (12)..(171): Homolog of NCBI NO: 24460068 NR Description: lachrymatory factor synthase [Allium fistulosum]
  misc_feature (12)..(171): Homolog of NCBI NO: 24460070 NR Description: lachrymatory factor synthase [Allium fistulosum]
  misc_feature (9)..(170): Homolog of NCBI NO: 15233966 NR Description: expressed protein [Arabidopsis thaliana]
  misc_feature (15)..(174): Homolog of NCBI NO: 15225189 NR Description: hypothetical protein [Arabidopsis thaliana]
  misc_feature (15)..(177): Homolog of NCBI NO: 34903624 NR Description: transport protein-like [Oryza sativa (japonica
  misc_feature (1)..(174): Homolog of NCBI NO: 34903618 NR Description: B1046G12.16 [Oryza sativa (japonica
MDHDASRQEAAAAVWRGTVRAVASGPTPDEAWALLGDFCSLHRWVSTVRACRRVEVEGAAAAEPEPEGRPAPGCVRYCEGPVNMAAPGELVGWSKERLLEMDHAGRWYSYELLESNKGFGRYRATVRVEHDPAGCAVRWSFEADPVKGWTLDGFLGFLEKLARGVAQRLQEEIMVKP

SEQ ID NO: 110958 - protein, 172 aa, Zea mays subsp. mays
  misc_feature (1)..(172): Ceres Seq. ID no. 14312446
  misc_feature (51)..(172): Homolog of NCBI NO: 13561976 NR Description: major ampullate spidroin 1 [Argiope aurantia]
  misc_feature (51)..(172): Homolog of NCBI NO: 15609263 NR Description: PE_PGRS [Mycobacterium tuberculosis H37Rv]
  misc_feature (50)..(172): Homolog of NCBI NO: 9625624 NR Description: nuclear antigen EBNA1 [Human herpesvirus 4]
  misc_feature (25)..(172): Homolog of NCBI NO: 17540706 NR Description: COLlagen structural gene (33.8 kD) (col-103)
  misc_feature (44)..(172): Homolog of NCBI NO: 13561998 NR Description: major ampullate spidroin 1 [Latrodectus
  misc_feature (43)..(172): Homolog of NCBI NO: 421936 NR Description: glycine-rich protein - common tobacco
  misc_feature (50)..(172): Homolog of NCBI NO: 9625624 NR Description: nuclear antigen EBNA1 [Human herpesvirus 4]
  misc_feature (52)..(172): Homolog of NCBI NO: 9625624 NR Description: nuclear antigen EBNA1 [Human herpesvirus 4]
  misc_feature (53)..(172): Homolog of NCBI NO: 24652652 NR Description: CG13214-PA [Drosophila melanogaster]
  misc_feature (12)..(172): Homolog of NCBI NO: 9625624 NR Description: nuclear antigen EBNA1 [Human herpesvirus 4]
IFIRVLYPVPVGHLDSPAANGVGIKHRSHRRYESRAHDTIIFHGPRRVTARSGGGRVARHGARGGVGADARRGVGAAGRLLLAAPVGVHGAGVPARGGGGRGGGGAGAGGAPRPRLRALLRGPREHGRAGGARGLVQGAAPGDGPRGAVVQLRAAGEQQGLRQVPGHRAGGA

SEQ ID NO: 110959 - protein, 123 aa, Zea mays subsp. mays
  misc_feature (1)..(123): Ceres Seq. ID no. 14312447
IHQGTLPGPGWTLGQPSSQWRWYKTQVASPLRVARTRYHYIPWTTTRHGKKRRRPCGAARCARWRRGRRPTRRGRCWATSARCTGGCPRCGRAGAWRWRARRRRSRSRRGAPPPAACATARAP

SEQ ID NO: 110960 - DNA, 1216 bp, Zea mays subsp. mays
  misc_feature (1)..(1216): Ceres Seq. ID no. 13622721
gaacaaataaaaatatataattaatttagtgcacacggagtggggaaacgaaaaggaaagctctctcattgccaaattgcccccgactcaagccccccgcgccgccggcgttggtggaatcgatcgacccggcctcgccggacaatccaccagcgttggtttcacctcaggtttttgtgcatggaagatgacaatgaggtcactggagagtcacctgtggctgatgaatgggatatgttgtccctgacttcatcaatatatgctagcccattattccgaagaggatttgatccaattaatttgcctggatatgggaatgtgattaatattcaggaaggcacacaaactggattagtcatgtcagatggcttcgtgttccctccaagtgagcatgaaaatttgccaatagaaccagagcatgaggatttgccaatagaaccagggcatgatgaatcaaatacaaacagcgttgaaaaggaaagtagttgtgctggaaataacgatgatgactggtgtcatgtttcacctgaagaaatcgatgacgtaagtaatgaaaatctagctgacaacagtgacttgcctactgccagtgaagctacggtaccagattcccagcctacagaaataaatgctaagcgagagaaagatcataggacatgcaaggctgatcatacttgtgaaagatggtggaaaaagaaaaccacgtatctatttcatcatataaaaggagtgactacactctgctcagttgtggcagctggtgctgttgttggttttgttgtaatgggtcagaggtggcagcaggaccattggcaccttcatcaatttaagttcagtgtcagcggtgagagcatgaatcgagtcattggagcattcagtcgtttgaaggatgggcttcctgggagtgagcaactaagatctatgctgccgactcgcgtactcccacaacagccgctgagcgcttgagtacatgcaccaaattttggtgggctgcttctagtgtcaatttttgttgcttatatgatcttgagaaagttcattctttttcttgtgctacttgattttatgttactgtaaattagtggtcgagacttctcacggtgctgttctttaaaacatagcaaccgtgaagggacatggtggaaacacagagggcactataacaatatgtatccaaaaaaaaaaaaaaaaaaattcgataccgtcgacctcgagg

SEQ ID NO: 110961 - protein, 261 aa, Zea mays subsp. mays
  misc_feature (1)..(261): Ceres Seq. ID no. 13622722
  misc_feature (2)..(106): Homolog of NCBI NO: 10241633 NR Description: hypothetical protein [Oryza sativa (indica
  misc_feature (15)..(221): Homolog of NCBI NO: 30678620 NR Description: expressed protein [Arabidopsis thaliana]
  misc_feature (15)..(249): Homolog of NCBI NO: 18411306 NR Description: expressed protein [Arabidopsis thaliana]
  misc_feature (2)..(225): Homolog of NCBI NO: 38346457 NR Description: OSJNBa0019G23.5 [Oryza sativa (japonica
  misc_feature (12)..(223): Homolog of NCBI NO: 7486469 NR Description: hypothetical protein At2g45980 [imported] -
  misc_feature (12)..(249): Homolog of NCBI NO: 21553358 NR Description: unknown [Arabidopsis thaliana]
  misc_feature (12)..(249): Homolog of NCBI NO: 18406940 NR Description: expressed protein [Arabidopsis thaliana]
  misc_feature (1)..(261): Homolog of NCBI NO: 22324443 NR Description: contains ESTs
MEDDNEVTGESPVADEWDMLSLTSSIYASPLFRRGFDPINLPGYGNVINIQEGTQTGLVMSDGFVFPPSEHENLPIEPEHEDLPIEPGHDESNTNSVEKESSCAGNNDDDWCHVSPEEIDDVSNENLADNSDLPTASEATVPDSQPTEINAKREKDHRTCKADHTCERWWKKKTTYLFHHIKGVTTLCSVVAAGAVVGFVVMGQRWQQDHWHLHQFKFSVSGESMNRVIGAFSRLKDGLPGSEQLRSMLPTRVLPQQPLSA

SEQ ID NO: 110962 - protein, 243 aa, Zea mays subsp. mays
  misc_feature (1)..(243): Ceres Seq. ID no. 13622723
  misc_feature (1)..(88): Homolog of NCBI NO: 10241633 NR Description: hypothetical protein [Oryza sativa (indica
  misc_feature (1)..(203): Homolog of NCBI NO: 30678620 NR Description: expressed protein [Arabidopsis thaliana]
  misc_feature (1)..(231): Homolog of NCBI NO: 18411306 NR Description: expressed protein [Arabidopsis thaliana]
  misc_feature (1)..(207): Homolog of NCBI NO: 38346457 NR Description: OSJNBa0019G23.5 [Oryza sativa (japonica
  misc_feature (1)..(205): Homolog of NCBI NO: 7486469 NR Description: hypothetical protein At2g45980 [imported] -
  misc_feature (1)..(231): Homolog of NCBI NO: 21553358 NR Description: unknown [Arabidopsis thaliana]
  misc_feature (1)..(231): Homolog of NCBI NO: 18406940 NR Description: expressed protein [Arabidopsis thaliana]
  misc_feature (1)..(243): Homolog of NCBI NO: 22324443 NR Description: contains ESTs
MLSLTSSIYASPLFRRGFDPINLPGYGNVINIQEGTQTGLVMSDGFVFPPSEHENLPIEPEHEDLPIEPGHDESNTNSVEKESSCAGNNDDDWCHVSPEEIDDVSNENLADNSDLPTASEATVPDSQPTEINAKREKDHRTCKADHTCERWWKKKTTYLFHHIKGVTTLCSVVAAGAVVGFVVMGQRWQQDHWHLHQFKFSVSGESMNRVIGAFSRLKDGLPGSEQLRSMLPTRVLPQQPLSA

SEQ ID NO: 110963 - protein, 202 aa, Zea mays subsp. mays
  misc_feature (1)..(202): Ceres Seq. ID no. 13622724
  misc_feature (1)..(47): Homolog of NCBI NO: 10241633 NR Description: hypothetical protein [Oryza sativa (indica
  misc_feature (1)..(162): Homolog of NCBI NO: 30678620 NR Description: expressed protein [Arabidopsis thaliana]
  misc_feature (1)..(190): Homolog of NCBI NO: 18411306 NR Description: expressed protein [Arabidopsis thaliana]
  misc_feature (1)..(166): Homolog of NCBI NO: 38346457 NR Description: OSJNBa0019G23.5 [Oryza sativa (japonica
  misc_feature (1)..(164): Homolog of NCBI NO: 7486469 NR Description: hypothetical protein At2g45980 [imported] -
  misc_feature (1)..(190): Homolog of NCBI NO: 21553358 NR Description: unknown [Arabidopsis thaliana]
  misc_feature (1)..(190): Homolog of NCBI NO: 18406940 NR Description: expressed protein [Arabidopsis thaliana]
  misc_feature (1)..(202): Homolog of NCBI NO: 22324443 NR Description: contains ESTs
MSDGFVFPPSEHENLPIEPEHEDLPIEPGHDESNTNSVEKESSCAGNNDDDWCHVSPEEIDDVSNENLADNSDLPTASEATVPDSQPTEINAKREKDHRTCKADHTCERWWKKKTTYLFHHIKGVTTLCSVVAAGAVVGFVVMGQRWQQDHWHLHQFKFSVSGESMNRVIGAFSRLKDGLPGSEQLRSMLPTRVLPQQPLSA

SEQ ID NO: 110964 - DNA, 2616 bp, Zea mays subsp. mays
  misc_feature (1)..(2616): Ceres Seq. ID no. 13565116
  misc_feature: MA Experiment ID: 108523 Result: Down-regulated in Transcription
  misc_feature: MA Experiment 108523 PARAMETER Experiment Name: Zm_42deg_Heat_P Parameter: Age (day) Value: 8
  misc_feature: MA Experiment 108523 PARAMETER Experiment Name: Zm_42deg_Heat_P Parameter: Organism Value: Zea mays
  misc_feature: MA Experiment 108523 PARAMETER Experiment Name: Zm_42deg_Heat_P Parameter: Plant Line Value: 35A19
  misc_feature: MA Experiment 108523 PARAMETER Experiment Name: Zm_42deg_Heat_P Parameter: Temperature (deg C) Value: 42 vs. 22
  misc_feature: MA Experiment 108523 PARAMETER Experiment Name: Zm_42deg_Heat_P Parameter: Timepoint (hr) Value: 6
  misc_feature: MA Experiment 108523 PARAMETER Experiment Name: Zm_42deg_Heat_P Parameter: Tissue Value: Aerial
  misc_feature: MA Experiment ID: 108527 Result: Down-regulated in Transcription
  misc_feature: MA Experiment 108527 PARAMETER Experiment Name: Zm_5mM_NO_P Parameter: Age (day) Value: 8
  misc_feature: MA Experiment 108527 PARAMETER Experiment Name: Zm_5mM_NO_P Parameter: Organism Value: Zea mays
  misc_feature: MA Experiment 108527 PARAMETER Experiment Name: Zm_5mM_NO_P Parameter: Plant Line Value: 35A19
  misc_feature: MA Experiment 108527 PARAMETER Experiment Name: Zm_5mM_NO_P Parameter: Timepoint (hr) Value: 6
  misc_feature: MA Experiment 108527 PARAMETER Experiment Name: Zm_5mM_NO_P Parameter: Tissue Value: Aerial
  misc_feature: MA Experiment 108527 PARAMETER Experiment Name: Zm_5mM_NO_P Parameter: Treatment Value: 5mM NO vs. No Treatment
  misc_feature: MA Experiment ID: 108544 Result: Up-regulated in Transcription
  misc_feature: MA Experiment ID: 108689 Result: Up-regulated in Transcription
  misc_feature: MA Experiment 108689 PARAMETER Experiment Name: Zm_Drought_Roots_P Parameter: Age (day) Value: 9
  misc_feature: MA Experiment 108689 PARAMETER Experiment Name: Zm_Drought_Roots_P Parameter: Organism Value: Zea mays
  misc_feature: MA Experiment 108689 PARAMETER Experiment Name: Zm_Drought_Roots_P Parameter: Plant Line Value: 35A19
  misc_feature: MA Experiment 108689 PARAMETER Experiment Name: Zm_Drought_Roots_P Parameter: Timepoint (hr) Value: 24
  misc_feature: MA Experiment 108689 PARAMETER Experiment Name: Zm_Drought_Roots_P Parameter: Tissue Value: Roots
  misc_feature: MA Experiment 108689 PARAMETER Experiment Name: Zm_Drought_Roots_P Parameter: Treatment Value: Drought vs. No Drought
acctagaacatcctaatcgaaaaaaactcaaatttcgcagcagctgagccgagttccatgccttctcgggaaacaaagcagtagatggatgaggcacatcgcgtcagcggcaaccgcctgcggtacgcgccataaataataattaggggatcctgataagtgttggcacaagtagcttgccagcacccaactccaagcaagccataactgcaagaaagcaacggcagcaagaaaccttgtaaacatcggagcatagatcgcggcggtgatggcggccaaggggaggacggagctggacgtgggcgccgacggcgtggccgtaatcaccatctacaatccgcccgtcaactcgctctccatcgacgtcttacatagcttaaaagaaagctatgaagaagcacttcggagaaacgatgttaaagctattgtcgttacagggaaaggagggaaattttctggaggatttgatattagttcctttggtggtgttcaaggaggccaaacaatgcaaccaaaggttggctacatagcaatagatattctcacagatactgtagaagctgcgacaaagccatcagtggcagcaattgatggtcttgctcttggtggaggtttagaagttgccatggcatgccatgcacggattgcaactccaacagctcaattaggtcttccagaacttcagttaggaattattccaggatttggaggaacacagcgactcccacgactggttggtctgacaaaatctttggaaatgatgctgttatctaagccaatcaagggcggtgaggcacaccaactgggcctggttgatgccttagtttctcctaatgatttggtgaatactgctcgtcaatgggctttggatatatatgaatgtaggaggccctggatcaaaagcctttataagactgacaagctagaacctcttggggaggctagggaaattctgaagtttgcaagagctcaagctcaaaagcaggcagctaatcttcatcacccacttgtttgtattgatgtcattgaagaaggtatagttgcaggaccacgggctggactctggaaggaagcaacttctttccaggaactgcttttctcagatacttgtaaaagcttagttcatgtgttcttttctcagcgggcaacgtctaagattccaggtgctacagacttggggttgatgcctaggaaaataactaaagttgccattctaggtggtgggcttatgggttcaggaattgcaactgcgatggtattaagtaactatcctgtgctacttaaagaagtaaatgagaagttcctaactgctggaatcaacagaatccaagccaatttgcagagtcgagtaaggaaaggaaaaatgaccgatgagcgatatgagaaggctatgtctctcgttactggtgtccttgattatgaacgtttcaaagatgtagacctcgttatagaggcagttattgagaatgtgaagttgaagcagcaaatattttctgacttagagaagtactgtccttcacattgcatccttgctactaacacatctacaattgatcttaatctgattggggagaaaacaaaggctcaagatcgtattgctggtgcacacttctttagtcctgcgcatgtgatgccacttctggaaatagttcgtactcagcacacttcaccacaagttgttgttgacttgctggatgttgggaagaagattaaaaagacaccaatagtcgtcgggaactgtactggctttgcagttaataggatgttctttccatacactcaatcagcactcttttatgttgatcttggtatggatgtttataagattgatcgtgcttgtaccaaatttggaatgcctatgggtcctttcagactggcagatctggttggttttggtgtggctgtggccactggtatgcaataccttgaaaatttcccagagagggtctacaaatcaatgctacttcctctgatgatggaggacaatagggcaggtgaagccacccaaaaaggattttacaagtatgagggcaagaggaaagcgactcctgatcctgaaattatgaaatatattgaaaaatctaggagcatggcaggagttacaccagatcctgagctgatgaagctaagtgagaaagacatagtcgagatggtgtttttcccggtgataaatgaagcctgccgagtccttgatgagggtatcgccgtcaaggcttctgacctagacatcgcttcgatcttcggcatggggttcccaccttataggggaggtgtcatgcactgggcagattccatcggcgcaaagtacatccatggaaagttggaggagtggacaaagcggtatgggggcttcttcaagccctgctcttacctcgctgaaagagctgcaaaagggattcctctgagtgcaccaacaaagaaagttcaggctcggctataagatgatttccttgtggacggaggagactacgttgaataatggattccggtgaagcatttggaatgcgtagagctgtaggctaccactatcacatgcatgtaacgcaatatactactgtgaaaataaagtgcactgcacggcggtttttttatatataaatacaaggatttttttct

SEQ ID NO: 110965 - protein, 723 aa, Zea mays subsp. mays
  misc_feature (1)..(723): Ceres Seq. ID no. 15222580
  misc_feature (307)..(491): Pfam Name: 3-hydroxyacyl-CoA dehydrogenase, NAD binding domain Pfam Description: 3-hydroxyacyl-CoA dehydrogenase, NAD binding
  misc_feature (46)..(709): Homolog of NCBI NO: 15641060 NR Description: fatty oxidation complex, alpha subunit [Vibrio
  misc_feature (14)..(721): Homolog of NCBI NO: 22960932 NR Description: hypothetical protein [Rhodopseudomonas palustris]
  misc_feature (4)..(395): Homolog of NCBI NO: 17065148 NR Description: fatty acid multifunctional protein (AtMFP2)
  misc_feature (1)..(723): Homolog of NCBI NO: 15235527 NR Description: abnormal inflorescence meristem 1 (fatty acid
  misc_feature (1)..(721): Homolog of NCBI NO: 39931684 NR Description: Peroxisomal fatty acid beta-oxidation
  misc_feature (91)..(723): Homolog of NCBI NO: 551444 NR Description: protein MFP-b [Cucumis sativus]
  misc_feature (3)..(723): Homolog of NCBI NO: 34922495 NR Description: Glyoxysomal fatty acid beta-oxidation
  misc_feature (4)..(723): Homolog of NCBI NO: 15231317 NR Description: fatty acid multifunctional protein (AtMFP2)
  misc_feature (4)..(723): Homolog of NCBI NO: 34922417 NR Description: Glyoxysomal fatty acid beta-oxidation
  misc_feature (9)..(723): Homolog of NCBI NO: 34897626 NR Description: putative tetrafunctional protein for glyoxysomal
MAAKGRTELDVGADGVAVITIYNPPVNSLSIDVLHSLKESYEEALRRNDVKAIVVTGKGGKFSGGFDISSFGGVQGGQTMQPKVGYIAIDILTDTVEAATKPSVAAIDGLALGGGLEVAMACHARIATPTAQLGLPELQLGIIPGFGGTQRLPRLVGLTKSLEMMLLSKPIKGGEAHQLGLVDALVSPNDLVNTARQWALDIYECRRPWIKSLYKTDKLEPLGEAREILKFARAQAQKQAANLHHPLVCIDVIEEGIVAGPRAGLWKEATSFQELLFSDTCKSLVHVFFSQRATSKIPGATDLGLMPRKITKVAILGGGLMGSGIATAMVLSNYPVLLKEVNEKFLTAGINRIQANLQSRVRKGKMTDERYEKAMSLVTGVLDYERFKDVDLVIEAVIENVKLKQQIFSDLEKYCPSHCILATNTSTIDLNLIGEKTKAQDRIAGAHFFSPAHVMPLLEIVRTQHTSPQVVVDLLDVGKKIKKTPIVVGNCTGFAVNRMFFPYTQSALFYVDLGMDVYKIDRACTKFGMPMGPFRLADLVGFGVAVATGMQYLENFPERVYKSMLLPLMMEDNRAGEATQKGFYKYEGKRKATPDPEIMKYIEKSRSMAGVTPDPELMKLSEKDIVEMVFFPVINEACRVLDEGIAVKASDLDIASIFGMGFPPYRGGVMHWADSIGAKYIHGKLEEWTKRYGGFFKPCSYLAERAAKGIPLSAPTKKVQARL

SEQ ID NO: 110966 - protein, 644 aa, Zea mays subsp. mays
  misc_feature (1)..(644): Ceres Seq. ID no. 15222581
  misc_feature (228)..(412): Pfam Name: 3-hydroxyacyl-CoA dehydrogenase, NAD binding domain Pfam Description: 3-hydroxyacyl-CoA dehydrogenase, NAD binding
  misc_feature (1)..(630): Homolog of NCBI NO: 15641060 NR Description: fatty oxidation complex, alpha subunit [Vibrio
  misc_feature (1)..(642): Homolog of NCBI NO: 22960932 NR Description: hypothetical protein [Rhodopseudomonas palustris]
  misc_feature (1)..(316): Homolog of NCBI NO: 17065148 NR Description: fatty acid multifunctional protein (AtMFP2)
  misc_feature (1)..(644): Homolog of NCBI NO: 15235527 NR Description: abnormal inflorescence meristem 1 (fatty acid
  misc_feature (1)..(642): Homolog of NCBI NO: 39931684 NR Description: Peroxisomal fatty acid beta-oxidation
  misc_feature (12)..(644): Homolog of NCBI NO: 551444 NR Description: protein MFP-b [Cucumis sativus]
  misc_feature (1)..(644): Homolog of NCBI NO: 34922495 NR Description: Glyoxysomal fatty acid beta-oxidation
  misc_feature (1)..(644): Homolog of NCBI NO: 15231317 NR Description: fatty acid multifunctional protein (AtMFP2)
  misc_feature (1)..(644): Homolog of NCBI NO: 34922417 NR Description: Glyoxysomal fatty acid beta-oxidation
  misc_feature (1)..(644): Homolog of NCBI NO: 34897626 NR Description: putative tetrafunctional protein for glyoxysomal
MQPKVGYIAIDILTDTVEAATKPSVAAIDGLALGGGLEVAMACHARIATPTAQLGLPELQLGIIPGFGGTQRLPRLVGLTKSLEMMLLSKPIKGGEAHQLGLVDALVSPNDLVNTARQWALDIYECRRPWIKSLYKTDKLEPLGEAREILKFARAQAQKQAANLHHPLVCIDVIEEGIVAGPRAGLWKEATSFQELLFSDTCKSLVHVFFSQRATSKIPGATDLGLMPRKITKVAILGGGLMGSGIATAMVLSNYPVLLKEVNEKFLTAGINRIQANLQSRVRKGKMTDERYEKAMSLVTGVLDYERFKDVDLVIEAVIENVKLKQQIFSDLEKYCPSHCILATNTSTIDLNLIGEKTKAQDRIAGAHFFSPAHVMPLLEIVRTQHTSPQVVVDLLDVGKKIKKTPIVVGNCTGFAVNRMFFPYTQSALFYVDLGMDVYKIDRACTKFGMPMGPFRLADLVGFGVAVATGMQYLENFPERVYKSMLLPLMMEDNRAGEATQKGFYKYEGKRKATPDPEIMKYIEKSRSMAGVTPDPELMKLSEKDIVEMVFFPVINEACRVLDEGIAVKASDLDIASIFGMGFPPYRGGVMHWADSIGAKYIHGKLEEWTKRYGGFFKPCSYLAERAAKGIPLSAPTKKVQARL

SEQ ID NO: 110967 - protein, 604 aa, Zea mays subsp. mays
  misc_feature (1)..(604): Ceres Seq. ID no. 15222582
  misc_feature (188)..(372): Pfam Name: 3-hydroxyacyl-CoA dehydrogenase, NAD binding domain Pfam Description: 3-hydroxyacyl-CoA dehydrogenase, NAD binding
  misc_feature (1)..(604): Homolog of NCBI NO: 551444 NR Description: protein MFP-b [Cucumis sativus]
  misc_feature (1)..(604): Homolog of NCBI NO: 34922495 NR Description: Glyoxysomal fatty acid beta-oxidation
  misc_feature (1)..(604): Homolog of NCBI NO: 15231317 NR Description: fatty acid multifunctional protein (AtMFP2)
  misc_feature (1)..(602): Homolog of NCBI NO: 22960932 NR Description: hypothetical protein [Rhodopseudomonas palustris]
  misc_feature (1)..(604): Homolog of NCBI NO: 15235527 NR Description: abnormal inflorescence meristem 1 (fatty acid
  misc_feature (1)..(602): Homolog of NCBI NO: 39931684 NR Description: Peroxisomal fatty acid beta-oxidation
  misc_feature (1)..(276): Homolog of NCBI NO: 17065148 NR Description: fatty acid multifunctional protein (AtMFP2)
  misc_feature (1)..(590): Homolog of NCBI NO: 15641060 NR Description: fatty oxidation complex, alpha subunit [Vibrio
  misc_feature (1)..(604): Homolog of NCBI NO: 34922417 NR Description: Glyoxysomal fatty acid beta-oxidation
  misc_feature (1)..(604): Homolog of NCBI NO: 34897626 NR Description: putative tetrafunctional protein for glyoxysomal
MACHARIATPTAQLGLPELQLGIIPGFGGTQRLPRLVGLTKSLEMMLLSKPIKGGEAHQLGLVDALVSPNDLVNTARQWALDIYECRRPWIKSLYKTDKLEPLGEAREILKFARAQAQKQAANLHHPLVCIDVIEEGIVAGPRAGLWKEATSFQELLFSDTCKSLVHVFFSQRATSKIPGATDLGLMPRKITKVAILGGGLMGSGIATAMVLSNYPVLLKEVNEKFLTAGINRIQANLQSRVRKGKMTDERYEKAMSLVTGVLDYERFKDVDLVIEAVIENVKLKQQIFSDLEKYCPSHCILATNTSTIDLNLIGEKTKAQDRIAGAHFFSPAHVMPLLEIVRTQHTSPQVVVDLLDVGKKIKKTPIVVGNCTGFAVNRMFFPYTQSALFYVDLGMDVYKIDRACTKFGMPMGPFRLADLVGFGVAVATGMQYLENFPERVYKSMLLPLMMEDNRAGEATQKGFYKYEGKRKATPDPEIMKYIEKSRSMAGVTPDPELMKLSEKDIVEMVFFPVINEACRVLDEGIAVKASDLDIASIFGMGFPPYRGGVMHWADSIGAKYIHGKLEEWTKRYGGFFKPCSYLAERAAKGIPLSAPTKKVQARL

SEQ ID NO: 110968 - DNA, 1599 bp, Zea mays subsp. mays
  misc_feature (1)..(1599): Ceres Seq. ID no. 12589137
  misc_feature: MA Experiment ID: 108522 Result: Up-regulated in Transcription
  misc_feature: MA Experiment 108522 PARAMETER Experiment Name: Zm_42deg_Heat_P Parameter: Age (day) Value: 8
  misc_feature: MA Experiment 108522 PARAMETER Experiment Name: Zm_42deg_Heat_P Parameter: Organism Value: Zea mays
  misc_feature: MA Experiment 108522 PARAMETER Experiment Name: Zm_42deg_Heat_P Parameter: Plant Line Value: 35A19
  misc_feature: MA Experiment 108522 PARAMETER Experiment Name: Zm_42deg_Heat_P Parameter: Temperature (deg C) Value: 42 vs. 22
  misc_feature: MA Experiment 108522 PARAMETER Experiment Name: Zm_42deg_Heat_P Parameter: Timepoint (hr) Value: 1
  misc_feature: MA Experiment 108522 PARAMETER Experiment Name: Zm_42deg_Heat_P Parameter: Tissue Value: Aerial
catcctaatcgaaaactctgcgcgctgcttcctgttcggccgtgcctgcgtgccgctcgccccagctcccagctatggcgtctggccgagagagcttctctcatctcctccctgctcaatctccagccacgcgccctccagttctgagctcctctgcgcgcgcgaagtcctctgcgccgcaccctgaagccccctgctcggcgcccgagatccctcccatggccggtgttcggtccctgcgctcgtccgaccgaactccctggccatcgcgcttgccgtttccccacgcgcaggaattcaccagtgttcggtccgcgcgcagcctccctcccagctcagccgcccatctccatggccagagctccttcatctccctcctctcagcgtcttctccgtgctcccgctcggctccacccatggccggaatccccttcctgccgagctcccatggcggcgcccatcccctgctccctccagttctccctaccacgcccaccgccggtctatgcgcgcgcgctctgctcccatgccgcgcgcctagaccggcggtggtggaggtcgggcccgaggtggccaagtacggcgtcggcgacgtggtaggcgtcggggtgatcgttgggtgctgccgcgagtgcagcccctgcaaggccaacgttgagcagtactgcaacaagaagatctggtcatacaacgacgtctacactgatggacggcccacgcagggtggattcgcctccaccatggtcgtcgaccagaagtttgtggtgaagatcccggcgggtctggctccggagcaagcggcgccgctgctgtgcgctggcgtgacggtgtacagcccgctgaagcactttgggctgacgaccccgggcctccgtggcggcatcctgggcctcggcggcgtgggccacatgggcgtgaaggtagccaaggccatgggccaccacgtgacggtgatcagctcgtcgtccaagaagcgcgcggaggcaatggaccacctcggcgcggacgcgtacctagtgagctcggacgccgcggccatggcggcggccgccgactcgctggactacatcatcgacacggtgcccgtgcaccacccgctggagccgtacctggcgctgctgaagctggacggcaagctcgtgctgctgggcgtcatcggcgagcccctgagcttcgtgtcgcccatggtgatgctggggcggaaggccatcacggggagcttcatcggcagcatcgacgagaccgctgaggtgcttcagttctgcgtcgacaaggggctcacctcccagatcgaggtggtcaagatggggtacgtgaacgaggcgctggagcggctggagcgcaacgacgtccgctaccgcttcgtcgtcgacgtcgccggtagcaacgtcgaggcggaggcggcggcggcggatgcggccagcaactgatggcaccgcgtcgtcgagtcgaaccacgtctgtgcgccgcgtgcaacgttcgttcgggtcgagtctgcgtgcaacgttctgcttcctttactagttgttgtctttccgccttcttgccgttctgttctgggctttgagatgagacgatggatggtcagtttttaatgtc

SEQ ID NO: 110969 - protein, 451 aa, Zea mays subsp. mays
  misc_feature (1)..(451): Ceres Seq. ID no. 12589138
  misc_feature (159)..(439): Homolog of NCBI NO: 9998899 NR Description: cinnamyl alcohol dehydrogenase
  misc_feature (159)..(442): Homolog of NCBI NO: 1168727 NR Description: Cinnamyl-alcohol dehydrogenase 1 (CAD)
  misc_feature (159)..(443): Homolog of NCBI NO: 15428282 NR Description: cinnamyl alcohol dehydrogenase 2b [Festuca
  misc_feature (159)..(443): Homolog of NCBI NO: 15428280 NR Description: cinnamyl alcohol dehydrogenase 2a [Festuca
  misc_feature (159)..(444): Homolog of NCBI NO: 15428276 NR Description: cinnamyl alcohol dehydrogenase 1a [Festuca
  misc_feature (159)..(444): Homolog of NCBI NO: 3913181 NR Description: Cinnamyl-alcohol dehydrogenase (CAD)
  misc_feature (159)..(444): Homolog of NCBI NO: 15428278 NR Description: cinnamyl alcohol dehydrogenase 1b [Festuca
  misc_feature (159)..(451): Homolog of NCBI NO: 10719916 NR Description: Cinnamyl-alcohol dehydrogenase (CAD)
  misc_feature (159)..(451): Homolog of NCBI NO: 7430938 NR Description: cinnamyl-alcohol dehydrogenase (EC 1.1.1.195) -
  misc_feature (159)..(451): Homolog of NCBI NO: 3913182 NR Description: Cinnamyl-alcohol dehydrogenase (CAD)
MASGRESFSHLLPAQSPATRPPVLSSSARAKSSAPHPEAPCSAPEIPPMAGVRSLRSSDRTPWPSRLPFPHAQEFTSVRSARSLPPSSAAHLHGQSSFISLLSASSPCSRSAPPMAGIPFLPSSHGGAHPLLPPVLPTTPTAGLCARALLPCRAPRPAVVEVGPEVAKYGVGDVVGVGVIVGCCRECSPCKANVEQYCNKKIWSYNDVYTDGRPTQGGFASTMVVDQKFVVKIPAGLAPEQAAPLLCAGVTVYSPLKHFGLTTPGLRGGILGLGGVGHMGVKVAKAMGHHVTVISSSSKKRAEAMDHLGADAYLVSSDAAAMAAAADSLDYIIDTVPVHHPLEPYLALLKLDGKLVLLGVIGEPLSFVSPMVMLGRKAITGSFIGSIDETAEVLQFCVDKGLTSQIEVVKMGYVNEALERLERNDVRYRFVVDVAGSNVEAEAAAADAASN

SEQ ID NO: 110970 - protein, 403 aa, Zea mays subsp. mays
  misc_feature (1)..(403): Ceres Seq. ID no. 12589139
  misc_feature (111)..(391): Homolog of NCBI NO: 9998899 NR Description: cinnamyl alcohol dehydrogenase
  misc_feature (111)..(394): Homolog of NCBI NO: 1168727 NR Description: Cinnamyl-alcohol dehydrogenase 1 (CAD)
  misc_feature (111)..(395): Homolog of NCBI NO: 15428282 NR Description: cinnamyl alcohol dehydrogenase 2b [Festuca
  misc_feature (111)..(395): Homolog of NCBI NO: 15428280 NR Description: cinnamyl alcohol dehydrogenase 2a [Festuca
  misc_feature (111)..(396): Homolog of NCBI NO: 15428276 NR Description: cinnamyl alcohol dehydrogenase 1a [Festuca
  misc_feature (111)..(396): Homolog of NCBI NO: 3913181 NR Description: Cinnamyl-alcohol dehydrogenase (CAD)
  misc_feature (111)..(396): Homolog of NCBI NO: 15428278 NR Description: cinnamyl alcohol dehydrogenase 1b [Festuca
  misc_feature (111)..(403): Homolog of NCBI NO: 10719916 NR Description: Cinnamyl-alcohol dehydrogenase (CAD)
  misc_feature (111)..(403): Homolog of NCBI NO: 7430938 NR Description: cinnamyl-alcohol dehydrogenase (EC 1.1.1.195) -
  misc_feature (111)..(403): Homolog of NCBI NO: 3913182 NR Description: Cinnamyl-alcohol dehydrogenase (CAD)
MAGVRSLRSSDRTPWPSRLPFPHAQEFTSVRSARSLPPSSAAHLHGQSSFISLLSASSPCSRSAPPMAGIPFLPSSHGGAHPLLPPVLPTTPTAGLCARALLPCRAPRPAVVEVGPEVAKYGVGDVVGVGVIVGCCRECSPCKANVEQYCNKKIWSYNDVYTDGRPTQGGFASTMVVDQKFVVKIPAGLAPEQAAPLLCAGVTVYSPLKHFGLTTPGLRGGILGLGGVGHMGVKVAKAMGHHVTVISSSSKKRAEAMDHLGADAYLVSSDAAAMAAAADSLDYIIDTVPVHHPLEPYLALLKLDGKLVLLGVIGEPLSFVSPMVMLGRKAITGSFIGSIDETAEVLQFCVDKGLTSQIEVVKMGYVNEALERLERNDVRYRFVVDVAGSNVEAEAAAADAASN

SEQ ID NO: 110971 - protein, 337 aa, Zea mays subsp. mays
  misc_feature (1)..(337): Ceres Seq. ID no. 12589140
  misc_feature (45)..(325): Homolog of NCBI NO: 9998899 NR Description: cinnamyl alcohol dehydrogenase
  misc_feature (45)..(328): Homolog of NCBI NO: 1168727 NR Description: Cinnamyl-alcohol dehydrogenase 1 (CAD)
  misc_feature (45)..(329): Homolog of NCBI NO: 15428282 NR Description: cinnamyl alcohol dehydrogenase 2b [Festuca
  misc_feature (45)..(329): Homolog of NCBI NO: 15428280 NR Description: cinnamyl alcohol dehydrogenase 2a [Festuca
  misc_feature (45)..(330): Homolog of NCBI NO: 15428276 NR Description: cinnamyl alcohol dehydrogenase 1a [Festuca
  misc_feature (45)..(330): Homolog of NCBI NO: 3913181 NR Description: Cinnamyl-alcohol dehydrogenase (CAD)
  misc_feature (45)..(330): Homolog of NCBI NO: 15428278 NR Description: cinnamyl alcohol dehydrogenase 1b [Festuca
  misc_feature (45)..(337): Homolog of NCBI NO: 10719916 NR Description: Cinnamyl-alcohol dehydrogenase (CAD)
  misc_feature (45)..(337): Homolog of NCBI NO: 7430938 NR Description: cinnamyl-alcohol dehydrogenase (EC 1.1.1.195) -
  misc_feature (45)..(337): Homolog of NCBI NO: 3913182 NR Description: Cinnamyl-alcohol dehydrogenase (CAD)
MAGIPFLPSSHGGAHPLLPPVLPTTPTAGLCARALLPCRAPRPAVVEVGPEVAKYGVGDVVGVGVIVGCCRECSPCKANVEQYCNKKIWSYNDVYTDGRPTQGGFASTMVVDQKFVVKIPAGLAPEQAAPLLCAGVTVYSPLKHFGLTTPGLRGGILGLGGVGHMGVKVAKAMGHHVTVISSSSKKRAEAMDHLGADAYLVSSDAAAMAAAADSLDYIIDTVPVHHPLEPYLALLKLDGKLVLLGVIGEPLSFVSPMVMLGRKAITGSFIGSIDETAEVLQFCVDKGLTSQIEVVKMGYVNEALERLERNDVRYRFVVDVAGSNVEAEAAAADAASN

SEQ ID NO: 110972 - DNA, 1610 bp, Zea mays subsp. mays
  misc_feature (1)..(1610): Ceres Seq. ID no. 15180226
  misc_feature: MA Experiment ID: 108527 Result: Up-regulated in Transcription
  misc_feature: MA Experiment 108527 PARAMETER Experiment Name: Zm_5mM_NO_P Parameter: Age (day) Value: 8
  misc_feature: MA Experiment 108527 PARAMETER Experiment Name: Zm_5mM_NO_P Parameter: Organism Value: Zea mays
  misc_feature: MA Experiment 108527 PARAMETER Experiment Name: Zm_5mM_NO_P Parameter: Plant Line Value: 35A19
  misc_feature: MA Experiment 108527 PARAMETER Experiment Name: Zm_5mM_NO_P Parameter: Timepoint (hr) Value: 6
  misc_feature: MA Experiment 108527 PARAMETER Experiment Name: Zm_5mM_NO_P Parameter: Tissue Value: Aerial
  misc_feature: MA Experiment 108527 PARAMETER Experiment Name: Zm_5mM_NO_P Parameter: Treatment Value: 5mM NO vs. No Treatment
agatcagatgagctcgtgcacagggtcctcggccgcagaagatacggcgaacgcattcaaaatccatctccttccaaaagcgtcgagtcgagccgatccaccttcccgaacaacgccgcccgccgcccttcgaatccgaaggaagccgcaacaacgaccccatccgaatctctcgcaacgatcaccaccgccaacttatcttcctcgttcgggtcgcccccaccctcgcccgccgtccagcagcgaaaccttcacccttcctcgtcccgccaccccccgcacgccatggtgcagaggaagcccgcgcgcaagcgcaaggagcccaaatgccccgacgccgtgccggcctggggcggcggccgtggcccgggaagcagggctggcgatggcggcatagccccggcgcaactccccaactacatgagggcgacgagctgctccggcgccaaggccggcgccgcacaagcccactccgcgccgcagccggggagggcgagcgtggcgcgggcggctgccgcggcgccgcgggcgggcagggccacgtgctcctccgccatgaaggggcccggggcgcgcgcgtgcccgtacgcgttctgctccgtcaagggccacgcccacgcgccgcccctgcgcagcttcgtggcggcgcggaggcgggggcagcagagcatgaagctcaagggcgcctcgccgttccgcaagcccacggtgggttgggacgcgagccgcggcgacgtctccgcggagggcctgggcgcggcttccgtgggcggttcgtgcgcgtccagcggcgtggtctcggttgagcggtcgacgacgaccaggcatcgcgggcgtgaagagaagaaggccttggtggtggaggtggcggatcatgaatgcgacgacgacttgggcgccggcgagtctgacatctccgaggagctgggtgcgaaccatggaggaaacagtactgaaggtggcatatcgtcggtcgacagcatttccagctcgctcagtgggataagctaccaagacgttagctctgcctgtgcctacggagcatcctctcatcatcaccatcagaggaggaggacatccgaagaaaagggtgcccagcaactgcgtccttccaaacccggtccaaaggcggagaaggtcggtctcagacatgaggcggtggacggtcggagggccgctgaggagtggatggtcgactacgctctccggaaggaagtcaagaggctggctcgtgctcagaagaggaaagttgagatgcttgtccaggccttcgaatctgttctgcccacggtagcaatagcaagcgagaagaagcccgggcaacacgatggccttcgaaagcatgcatgtagctgacagatagatagatagaatcatagatagccgacactcatcttgagtcaggtagtagtaggacgtgacaatttgagtcaggtagatgaaacgtttcaattcagtcaaacactagtcacaacggatacaaggtttgatgctccaccaaccactgatccgttgtgaacttgtagtagaagcaggccaccgctggcaatgtggcatgccatgccatcaacctaacatggaccattctgaatgtcggctcaaaacgtgac

SEQ ID NO: 110973 - protein, 451 aa, Zea mays subsp. mays
  misc_feature (1)..(451): Ceres Seq. ID no. 15180227
  misc_feature (365)..(429): Homolog of NCBI NO: 17933110 NR Description: PNCBP [Solanum tuberosum]
  misc_feature (370)..(428): Homolog of NCBI NO: 25956269 NR Description: unnamed protein product [Lotus corniculatus var.
  misc_feature (370)..(429): Homolog of NCBI NO: 15224955 NR Description: Calmodulin-binding protein [Arabidopsis thaliana]
  misc_feature (373)..(429): Homolog of NCBI NO: 17933110 NR Description: PNCBP [Solanum tuberosum]
  misc_feature (370)..(427): Homolog of NCBI NO: 15237600 NR Description: Calmodulin-binding protein [Arabidopsis thaliana]
  misc_feature (370)..(427): Homolog of NCBI NO: 24637243 NR Description: pathogen-induced calmodulin-binding protein
  misc_feature (355)..(431): Homolog of NCBI NO: 24637279 NR Description: pathogen-induced calmodulin-binding protein
RSDELVHRVLGRRRYGERIQNPSPSKSVESSRSTFPNNAARRPSNPKEAATTTPSESLATITTANLSSSFGSPPPSPAVQQRNLHPSSSRHPPHAMVQRKPARKRKEPKCPDAVPAWGGGRGPGSRAGDGGIAPAQLPNYMRATSCSGAKAGAAQAHSAPQPGRASVARAAAAAPRAGRATCSSAMKGPGARACPYAFCSVKGHAHAPPLRSFVAARRRGQQSMKLKGASPFRKPTVGWDASRGDVSAEGLGAASVGGSCASSGVVSVERSTTTRHRGREEKKALVVEVADHECDDDLGAGESDISEELGANHGGNSTEGGISSVDSISSSLSGISYQDVSSACAYGASSHHHHQRRRTSEEKGAQQLRPSKPGPKAEKVGLRHEAVDGRRAAEEWMVDYALRKEVKRLARAQKRKVEMLVQAFESVLPTVAIASEKKPGQHDGLRKHACS

SEQ ID NO: 110974 - protein, 356 aa, Zea mays subsp. mays
  misc_feature (1)..(356): Ceres Seq. ID no. 15180228
  misc_feature (270)..(334): Homolog of NCBI NO: 17933110 NR Description: PNCBP [Solanum tuberosum]
  misc_feature (275)..(333): Homolog of NCBI NO: 25956269 NR Description: unnamed protein product [Lotus corniculatus var.
  misc_feature (275)..(334): Homolog of NCBI NO: 15224955 NR Description: Calmodulin-binding protein [Arabidopsis thaliana]
  misc_feature (278)..(334): Homolog of NCBI NO: 17933110 NR Description: PNCBP [Solanum tuberosum]
  misc_feature (275)..(332): Homolog of NCBI NO: 15237600 NR Description: Calmodulin-binding protein [Arabidopsis thaliana]
  misc_feature (275)..(332): Homolog of NCBI NO: 24637243 NR Description: pathogen-induced calmodulin-binding protein
  misc_feature (260)..(336): Homolog of NCBI NO: 24637279 NR Description: pathogen-induced calmodulin-binding protein
MVQRKPARKRKEPKCPDAVPAWGGGRGPGSRAGDGGIAPAQLPNYMRATSCSGAKAGAAQAHSAPQPGRASVARAAAAAPRAGRATCSSAMKGPGARACPYAFCSVKGHAHAPPLRSFVAARRRGQQSMKLKGASPFRKPTVGWDASRGDVSAEGLGAASVGGSCASSGVVSVERSTTTRHRGREEKKALVVEVADHECDDDLGAGESDISEELGANHGGNSTEGGISSVDSISSSLSGISYQDVSSACAYGASSHHHHQRRRTSEEKGAQQLRPSKPGPKAEKVGLRHEAVDGRRAAEEWMVDYALRKEVKRLARAQKRKVEMLVQAFESVLPTVAIASEKKPGQHDGLRKHACS

SEQ ID NO: 110975 - protein, 311 aa, Zea mays subsp. mays
  misc_feature (1)..(311): Ceres Seq. ID no. 15180229
  misc_feature (225)..(289): Homolog of NCBI NO: 17933110 NR Description: PNCBP [Solanum tuberosum]
  misc_feature (230)..(288): Homolog of NCBI NO: 25956269 NR Description: unnamed protein product [Lotus corniculatus var.
  misc_feature (230)..(289): Homolog of NCBI NO: 15224955 NR Description: Calmodulin-binding protein [Arabidopsis thaliana]
  misc_feature (233)..(289): Homolog of NCBI NO: 17933110 NR Description: PNCBP [Solanum tuberosum]
  misc_feature (230)..(287): Homolog of NCBI NO: 15237600 NR Description: Calmodulin-binding protein [Arabidopsis thaliana]
  misc_feature (230)..(287): Homolog of NCBI NO: 24637243 NR Description: pathogen-induced calmodulin-binding protein
  misc_feature (215)..(291): Homolog of NCBI NO: 24637279 NR Description: pathogen-induced calmodulin-binding protein
MRATSCSGAKAGAAQAHSAPQPGRASVARAAAAAPRAGRATCSSAMKGPGARACPYAFCSVKGHAHAPPLRSFVAARRRGQQSMKLKGASPFRKPTVGWDASRGDVSAEGLGAASVGGSCASSGVVSVERSTTTRHRGREEKKALVVEVADHECDDDLGAGESDISEELGANHGGNSTEGGISSVDSISSSLSGISYQDVSSACAYGASSHHHHQRRRTSEEKGAQQLRPSKPGPKAEKVGLRHEAVDGRRAAEEWMVDYALRKEVKRLARAQKRKVEMLVQAFESVLPTVAIASEKKPGQHDGLRKHACS

SEQ ID NO: 110976 - DNA, 900 bp, Zea mays subsp. mays
  misc_feature (1)..(900): Ceres Seq. ID no. 13622703
  misc_feature: MA Experiment ID: 108527 Result: Down-regulated in Transcription
  misc_feature: MA Experiment 108527 PARAMETER Experiment Name: Zm_5mM_NO_P Parameter: Age (day) Value: 8
  misc_feature: MA Experiment 108527 PARAMETER Experiment Name: Zm_5mM_NO_P Parameter: Organism Value: Zea mays
  misc_feature: MA Experiment 108527 PARAMETER Experiment Name: Zm_5mM_NO_P Parameter: Plant Line Value: 35A19
  misc_feature: MA Experiment 108527 PARAMETER Experiment Name: Zm_5mM_NO_P Parameter: Timepoint (hr) Value: 6
  misc_feature: MA Experiment 108527 PARAMETER Experiment Name: Zm_5mM_NO_P Parameter: Tissue Value: Aerial
  misc_feature: MA Experiment 108527 PARAMETER Experiment Name: Zm_5mM_NO_P Parameter: Treatment Value: 5mM NO vs. No Treatment
  misc_feature: MA Experiment ID: 108530 Result: Up-regulated in Transcription
  misc_feature: MA Experiment 108530 PARAMETER Experiment Name: Zm_Imbibed_Seeds_P Parameter: Age (day) Value: 6 vs. 2
  misc_feature: MA Experiment 108530 PARAMETER Experiment Name: Zm_Imbibed_Seeds_P Parameter: Organism Value: Zea mays
  misc_feature: MA Experiment 108530 PARAMETER Experiment Name: Zm_Imbibed_Seeds_P Parameter: Plant Line Value: 35A19
  misc_feature: MA Experiment 108530 PARAMETER Experiment Name: Zm_Imbibed_Seeds_P Parameter: Tissue Value: Aerial vs. Embryo
  misc_feature: MA Experiment ID: 108543 Result: Down-regulated in Transcription
  misc_feature: MA Experiment ID: 108545 Result: Up-regulated in Transcription
  misc_feature: MA Experiment 108545 PARAMETER Experiment Name: Zm_Imbibed_Seeds_P Parameter: Age (day) Value: 3 vs. 2
  misc_feature: MA Experiment 108545 PARAMETER Experiment Name: Zm_Imbibed_Seeds_P Parameter: Organism Value: Zea mays
  misc_feature: MA Experiment 108545 PARAMETER Experiment Name: Zm_Imbibed_Seeds_P Parameter: Plant Line Value: 35A19
  misc_feature: MA Experiment 108545 PARAMETER Experiment Name: Zm_Imbibed_Seeds_P Parameter: Tissue Value: Aerial vs. Embryo
  misc_feature: MA Experiment ID: 108556 Result: Down-regulated in Transcription
  misc_feature: MA Experiment 108556 PARAMETER Experiment Name: Zm_Drought_P Parameter: Age (day) Value: 9
  misc_feature: MA Experiment 108556 PARAMETER Experiment Name: Zm_Drought_P Parameter: Organism Value: Zea mays
  misc_feature: MA Experiment 108556 PARAMETER Experiment Name: Zm_Drought_P Parameter: Plant Line Value: 35A19
  misc_feature: MA Experiment 108556 PARAMETER Experiment Name: Zm_Drought_P Parameter: Timepoint (hr) Value: 24
  misc_feature: MA Experiment 108556 PARAMETER Experiment Name: Zm_Drought_P Parameter: Tissue Value: Aerial
  misc_feature: MA Experiment 108556 PARAMETER Experiment Name: Zm_Drought_P Parameter: Treatment Value: Drought vs. No Drought
  misc_feature: MA Experiment ID: 108559 Result: Down-regulated in Transcription
  misc_feature: MA Experiment 108559 PARAMETER Experiment Name: Zm_5mM_NO_P Parameter: Age (day) Value: 8
  misc_feature: MA Experiment 108559 PARAMETER Experiment Name: Zm_5mM_NO_P Parameter: Organism Value: Zea mays
  misc_feature: MA Experiment 108559 PARAMETER Experiment Name: Zm_5mM_NO_P Parameter: Plant Line Value: 35A19
  misc_feature: MA Experiment 108559 PARAMETER Experiment Name: Zm_5mM_NO_P Parameter: Timepoint (hr) Value: 12
  misc_feature: MA Experiment 108559 PARAMETER Experiment Name: Zm_5mM_NO_P Parameter: Tissue Value: Aerial
  misc_feature: MA Experiment 108559 PARAMETER Experiment Name: Zm_5mM_NO_P Parameter: Treatment Value: 5mM NO vs. No Treatment
  misc_feature: MA Experiment ID: 20000479 Result: Down-regulated in Transcription
  misc_feature: MA Experiment 20000479 PARAMETER Experiment Name: Zm_Drought_P Parameter: Age (day) Value: 10
  misc_feature: MA Experiment 20000479 PARAMETER Experiment Name: Zm_Drought_P Parameter: Organism Value: Zea mays
  misc_feature: MA Experiment 20000479 PARAMETER Experiment Name: Zm_Drought_P Parameter: Plant Line Value: 35A19
  misc_feature: MA Experiment 20000479 PARAMETER Experiment Name: Zm_Drought_P Parameter: Timepoint (hr) Value: 48
  misc_feature: MA Experiment 20000479 PARAMETER Experiment Name: Zm_Drought_P Parameter: Tissue Value: Aerial
  misc_feature: MA Experiment 20000479 PARAMETER Experiment Name: Zm_Drought_P Parameter: Treatment Value: Drought vs. No Drought
aaacgaaatccagcagaccgacgcgaaccgagaaaaatcccacgaaatctcgtggccgcggcgaccggaagaagaggacgacgacggacggagcggcgatggcgtgccgcgcacttgccctccgctccctgctcctccccgacccgctacaccgcctcccggccgcggcgccacctgtttggagagcgtcccgcggtggccgccgtccgcacctccgctgctgctccggcggcgggggcggggagcccgggcagccgccgcaagaagctgtgctcgaggccatatccaagatagcaaggtctaaaggaagggttgcactcacaacaaatatggtcatgggtggtactgtgactgacgatgcaagtgatgaatggcttgttctggatcagaaggtaaattcctaccccacagatagaggatttacagcaattggcactggaggtgatgattttgtccagtcaatggtagttgctgttgaatctgttcttcaagaatcaattcccaagggccgggtatctcagaaattatcttcaagagggaaatatgtttctgtaaacattgggccaattcgtgttgtttctagtgagcaggtccaagctgtgtatcgtgccatgagaagagataacaggatgaaatacttcttatgaagtgcaatttcatgtcctggatgttccctagtccattccatgttgtatcctacgatgcattttcgccatatttgctggacctccggtgaattccaatgacttttatgtgccattcaagcccaaattgaagcttctctactacaaaacaatatgttgggtccagctacgttatttagtgcagggggcgtatatagctactatgtattccctttcttctataatgaataagattcaaaggttcacagtttgtcct

SEQ ID NO: 110977 - protein, 214 aa, Zea mays subsp. mays
  misc_feature (1)..(214): Ceres Seq. ID no. 15219364
  misc_feature (123)..(214): Pfam Name: Protein of unknown function (DUF493) Pfam Description: Protein of unknown function (DUF493)
  misc_feature (48)..(214): Homolog of NCBI NO: 18396311 NR Description: expressed protein [Arabidopsis thaliana]
  misc_feature (35)..(171): Homolog of NCBI NO: 38347226 NR Description: OSJNBa0044M19.8 [Oryza sativa (japonica
TKSSRPTRTEKNPTKSRGRGDRKKRTTTDGAAMACRALALRSLLLPDPLHRLPAAAPPVWRASRGGRRPHLRCCSGGGGGEPGQPPQEAVLEAISKIARSKGRVALTTNMVMGGTVTDDASDEWLVLDQKVNSYPTDRGFTAIGTGGDDFVQSMVVAVESVLQESIPKGRVSQKLSSRGKYVSVNIGPIRVVSSEQVQAVYRAMRRDNRMKYFL

SEQ ID NO: 110978 - protein, 182 aa, Zea mays subsp. mays
  misc_feature (1)..(182): Ceres Seq. ID no. 15219365
  misc_feature (91)..(182): Pfam Name: Protein of unknown function (DUF493) Pfam Description: Protein of unknown function (DUF493)
  misc_feature (16)..(182): Homolog of NCBI NO: 18396311 NR Description: expressed protein [Arabidopsis thaliana]
  misc_feature (3)..(139): Homolog of NCBI NO: 38347226 NR Description: OSJNBa0044M19.8 [Oryza sativa (japonica
MACRALALRSLLLPDPLHRLPAAAPPVWRASRGGRRPHLRCCSGGGGGEPGQPPQEAVLEAISKIARSKGRVALTTNMVMGGTVTDDASDEWLVLDQKVNSYPTDRGFTAIGTGGDDFVQSMVVAVESVLQESIPKGRVSQKLSSRGKYVSVNIGPIRVVSSEQVQAVYRAMRRDNRMKYFL

SEQ ID NO: 110979 - DNA, 849 bp, Zea mays subsp. mays
  misc_feature (1)..(849): Ceres Seq. ID no. 14303259
  misc_feature: MA Experiment ID: 108522 Result: Up-regulated in Transcription
  misc_feature: MA Experiment 108522 PARAMETER Experiment Name: Zm_42deg_Heat_P Parameter: Age (day) Value: 8
  misc_feature: MA Experiment 108522 PARAMETER Experiment Name: Zm_42deg_Heat_P Parameter: Organism Value: Zea mays
  misc_feature: MA Experiment 108522 PARAMETER Experiment Name: Zm_42deg_Heat_P Parameter: Plant Line Value: 35A19
  misc_feature: MA Experiment 108522 PARAMETER Experiment Name: Zm_42deg_Heat_P Parameter: Temperature (deg C) Value: 42 vs. 22
  misc_feature: MA Experiment 108522 PARAMETER Experiment Name: Zm_42deg_Heat_P Parameter: Timepoint (hr) Value: 1
  misc_feature: MA Experiment 108522 PARAMETER Experiment Name: Zm_42deg_Heat_P Parameter: Tissue Value: Aerial
atgtcgctgagccgcttctcccagtggatatggccggggagcagaactagaaatcctagaggccgcgagccaccggcggggagcacggccttgacggaaggcctcttcccggactccccgtcggggttccgggatccagaccctggttctggcgcggcacagcggcgtaagggcaagagccgccgtcgcggtggccgcgtggaggcgaaggtcgatggcgagcacggcatggttatcgtgcagtccgacggtgacggctgcctgtctgactcggactccgacggctccgactggtccatcggctggctcgagccgctcgcgccggacctccagagtgacgttgactccgagggaagcttcgccgtcctcgtgcggtgctatcgccgcggccgcgctgaccggcctgaccgtcctgatggcaagttccctgctcctggtggtgtcgctcacggtcacggtggtgtttctggtaacaagaattttgtggagcaatgagtgtcttcccttcagaactgatttctccatttccattcttagttggcttcaatgtgtatacagcatttttacatgacctgtcaaatttctcatgtgcgaaacatatatatgaaggaagagaggaaacccaaaatggggaagaaagaggaaagaatcacagaacaaaacactaccagtggatttttattaaaaaaatgcaatggatggggggggggggggggggtgcatccttcttcctgaggttccaggctacggtattattgcagaataaaacatgttttgtgattggattcaaatgttattgacatttctgacaatgagcaatgaattgatggcctcatcccattttcttgt

SEQ ID NO: 110980 - protein, 164 aa, Zea mays subsp. mays
  misc_feature (1)..(164): Ceres Seq. ID no. 14303260
  misc_feature (82)..(164): Homolog of NCBI NO: 15809848 NR Description: AT4g38060/F20D10_180 [Arabidopsis thaliana]
  misc_feature (1)..(147): Homolog of NCBI NO: 15238477 NR Description: expressed protein [Arabidopsis thaliana]
  misc_feature (1)..(163): Homolog of NCBI NO: 15144509 NR Description: unknown [Lycopersicon esculentum]
MSLSRFSQWIWPGSRTRNPRGREPPAGSTALTEGLFPDSPSGFRDPDPGSGAAQRRKGKSRRRGGRVEAKVDGEHGMVIVQSDGDGCLSDSDSDGSDWSIGWLEPLAPDLQSDVDSEGSFAVLVRCYRRGRADRPDRPDGKFPAPGGVAHGHGGVSGNKNFVEQ

SEQ ID NO: 110981 - protein, 118 aa, Zea mays subsp. mays
  misc_feature (1)..(118): Ceres Seq. ID no. 14303261
MASTAWLSCSPTVTAACLTRTPTAPTGPSAGSSRSRRTSRVTLTPREASPSSCGAIAAAALTGLTVLMASSLLLVVSLTVTVVFLVTRILWSNECLPFRTDFSISILSWLQCVYSIFT

SEQ ID NO: 110982 - protein, 102 aa, Zea mays subsp. mays
  misc_feature (1)..(102): Ceres Seq. ID no. 14303262
MSVFPSELISPFPFLVGFNVYTAFLHDLSNFSCAKHIYEGREETQNGEERGKNHRTKHYQWIFIKKMQWMGGGGGGASFFLRFQATVLLQNKTCFVIGFKCY

SEQ ID NO: 110983 - DNA, 901 bp, Zea mays subsp. mays
  misc_feature (1)..(901): Ceres Seq. ID no. 14305052
  misc_feature: MA Experiment ID: 108522 Result: Up-regulated in Transcription
  misc_feature: MA Experiment 108522 PARAMETER Experiment Name: Zm_42deg_Heat_P Parameter: Age (day) Value: 8
  misc_feature: MA Experiment 108522 PARAMETER Experiment Name: Zm_42deg_Heat_P Parameter: Organism Value: Zea mays
  misc_feature: MA Experiment 108522 PARAMETER Experiment Name: Zm_42deg_Heat_P Parameter: Plant Line Value: 35A19
  misc_feature: MA Experiment 108522 PARAMETER Experiment Name: Zm_42deg_Heat_P Parameter: Temperature (deg C) Value: 42 vs. 22
  misc_feature: MA Experiment 108522 PARAMETER Experiment Name: Zm_42deg_Heat_P Parameter: Timepoint (hr) Value: 1
  misc_feature: MA Experiment 108522 PARAMETER Experiment Name: Zm_42deg_Heat_P Parameter: Tissue Value: Aerial
  misc_feature: MA Experiment ID: 108523 Result: Up-regulated in Transcription
  misc_feature: MA Experiment 108523 PARAMETER Experiment Name: Zm_42deg_Heat_P Parameter: Age (day) Value: 8
  misc_feature: MA Experiment 108523 PARAMETER Experiment Name: Zm_42deg_Heat_P Parameter: Organism Value: Zea mays
  misc_feature: MA Experiment 108523 PARAMETER Experiment Name: Zm_42deg_Heat_P Parameter: Plant Line Value: 35A19
  misc_feature: MA Experiment 108523 PARAMETER Experiment Name: Zm_42deg_Heat_P Parameter: Temperature (deg C) Value: 42 vs. 22
  misc_feature: MA Experiment 108523 PARAMETER Experiment Name: Zm_42deg_Heat_P Parameter: Timepoint (hr) Value: 6
  misc_feature: MA Experiment 108523 PARAMETER Experiment Name: Zm_42deg_Heat_P Parameter: Tissue Value: Aerial
atcgcccgtgccctgcggtgttctactcactcccagctgcgacaatccccctcatcgcccgccccccctggtctcgtctctccttcgcgcatctcaccgccatctcactcccgaaccccccttcctttgcttcccgcgtctaatttagcgccagaacatttgaattccccgcaacttccgcttccagcggcttctcgaaccttccggaggcgccgccgatcgaccccggctccatccccttgcccccctagggtttcgcgttcccctcggggatgggggacgccgccaccgccgcagcggcggcggcagcgtcgcccgcttgcgccgcgcggaagcggcggcgcggcgacgacagcgcggggctgaggcgggtggcggagatcgtgatggtcctggccgcggccggggaggtacgcggcgggaggcagcccacggccgcggagcgcgcgctggcggccgaggcgcgggagactctcgccaccgccgtcgccgagagggccgtgcggcccgaggatctgttcccgggggaagcggtgcgcgcggtcgtcgaggatctcgggctcaaccgctccaaggacccagctgccatggggtttcgcccgcccaaggcctccatcgccgataggctcatgcttactaagcgcaaggttttgccaactctctcgtttgcacccattcccgcacagtttactagccattgtggtggctttgaaattcttaactggggtgataaatgtgatgtgagaacgcttgtgtgactattggactgtattagtttgtatggtatgacactgctgtttgcatggcacaaggtattgcttctgaatgatacattagcgaataatgattcccagggattcttgtatcacactgcttgtatatggatatgctctgttcttcc

SEQ ID NO: 110984 - protein, 161 aa, Zea mays subsp. mays
  misc_feature (1)..(161): Ceres Seq. ID no. 14305053
  misc_feature (20)..(126): Homolog of NCBI NO: 15223606 NR Description: expressed protein [Arabidopsis thaliana]
  misc_feature (13)..(126): Homolog of NCBI NO: 9294545 NR Description: contains similarity to bactericidal
  misc_feature (13)..(126): Homolog of NCBI NO: 30685716 NR Description: expressed protein [Arabidopsis thaliana]
MGDAATAAAAAAASPACAARKRRRGDDSAGLRRVAEIVMVLAAAGEVRGGRQPTAAERALAAEARETLATAVAERAVRPEDLFPGEAVRAVVEDLGLNRSKDPAAMGFRPPKASIADRLMLTKRKVLPTLSFAPIPAQFTSHCGGFEILNWGDKCDVRTLV

SEQ ID NO: 110985 - protein, 123 aa, Zea mays subsp. mays
  misc_feature (1)..(123): Ceres Seq. ID no. 14305054
  misc_feature (1)..(88): Homolog of NCBI NO: 15223606 NR Description: expressed protein [Arabidopsis thaliana]
  misc_feature (1)..(88): Homolog of NCBI NO: 9294545 NR Description: contains similarity to bactericidal
  misc_feature (1)..(88): Homolog of NCBI NO: 30685716 NR Description: expressed protein [Arabidopsis thaliana]
MVLAAAGEVRGGRQPTAAERALAAEARETLATAVAERAVRPEDLFPGEAVRAVVEDLGLNRSKDPAAMGFRPPKASIADRLMLTKRKVLPTLSFAPIPAQFTSHCGGFEILNWGDKCDVRTLV

SEQ ID NO: 110986 - protein, 121 aa, Zea mays subsp. mays
  misc_feature (1)..(121): Ceres Seq. ID no. 14305055
IARALRCSTHSQLRQSPSSPAPPGLVSPSRISPPSHSRTPLPLLPASNLAPEHLNSPQLPLPAASRTFRRRRRSTPAPSPCPPRVSRSPRGWGTPPPPQRRRQRRPLAPRGSGGAATTARG

SEQ ID NO: 110987 - DNA, 1300 bp, Zea mays subsp. mays
  misc_feature (1)..(1300): Ceres Seq. ID no. 15180671
cacagcacgccagcttcctcctttctcttcagccattcttgttcttggctatctatcttctcccctcttcccttctccttatctctcttactcttaatttggtgcttcttaatttctcagaagagactttgcaagcttgtgacttgttctcccaattctattgcaaacttgatcaacatcttgttcttggaaggaaggtattagcttctaagaaagcgcaattgttgtggtttatgcacaccattggcagcgagtctctgctgtttgggttgtccaaaaccaagccatgtccacgcgcgggagcggtagtcttagccctgctgccggtgcgtctgcggcggcgccggaggtggaaggccactgggccccgcacggcgcggtgctgacggcctgcgtcgtgggctccaacgtgctcgtgatcctgctcgtcttcggtttcttctggcggttcttctctgggaaaggggggccgtccacgtcacacggcgccgacgacgacgacgacgaggactcactgcccgtggcgtccccatgggcgtcccgctaccggttcgagggccacggcgcacggtcgacgccgatggaagacgtggtgtcgtccctgcccgtgtccgtgtactccagcgccggcgccgaggaaggaaggaaggcccggcccgagtgcgccgtgtgcatcgtggagctgcgcgacggcgactcggtgcgcgtcctcccgcggtgcgggcaccggttccacgccgactgcgtgggcgcgtggctgcggcgccgcaccacgtgcccgctctgccgcggcagagtcgtgccacccgccgccgcggccctcactgacaagtccagggacgccaaggacgacgtcgccgtcgccgtcgccgcggattgtcccgtgtgatgcggcggcgctccggccgactccgaggacagtatcgctcgctccaactgtaagtctgtaactggcagtgatgctgcatggtgagcaagcaagcggtggaccacgacacgacaccacgcacacatggcggatggtgacagccatcttcttccagggtcggcgtccgtactccgtagccatgtcgcatagctatagctccagcctccagatgaccagctagaaaaggttggtgagacgattgattccttcgtcctgttatttatatttcttgcttcttttctggttttgggattagatatattgcgagtcgtggtatatatatgtgtgtcttgaattgatcgagtcttccgtcatgtgtagtatgcatgtgagatctgcatgattaattactcgtgctacttttagtcgtag

SEQ ID NO: 110988 - protein, 200 aa, Zea mays subsp. mays
  misc_feature (1)..(200): Ceres Seq. ID no. 15180672
  misc_feature (126)..(167): Pfam Name: Zinc finger, C3HC4 type (RING finger) Pfam Description: Zinc finger, C3HC4 type (RING finger)
  misc_feature (76)..(197): Homolog of NCBI NO: 7487705 NR Description: hypothetical protein T5J17.240 - Arabidopsis
  misc_feature (91)..(174): Homolog of NCBI NO: 8698833 NR Description: EL5 [Oryza sativa (japonica cultivar-group)]
  misc_feature (103)..(194): Homolog of NCBI NO: 34903936 NR Description: OSJNBa0038J17.13 [Oryza sativa (japonica
  misc_feature (103)..(183): Homolog of NCBI NO: 34903920 NR Description: OSJNBa0038J17.5 [Oryza sativa (japonica
  misc_feature (102)..(183): Homolog of NCBI NO: 15226628 NR Description: hypothetical protein [Arabidopsis thaliana]
  misc_feature (100)..(175): Homolog of NCBI NO: 30017522 NR Description: putative ring-H2 zinc finger protein
  misc_feature (91)..(181): Homolog of NCBI NO: 34907968 NR Description: P0446G04.15 [Oryza sativa (japonica
  misc_feature (90)..(196): Homolog of NCBI NO: 34907826 NR Description: P0485B12.26 [Oryza sativa (japonica
  misc_feature (11)..(200): Homolog of NCBI NO: 34894514 NR Description: P0551A11.21 [Oryza sativa (japonica
  misc_feature (1)..(200): Homolog of NCBI NO: 34894518 NR Description: P0551A11.23 [Oryza sativa (japonica
MSTRGSGSLSPAAGASAAAPEVEGHWAPHGAVLTACVVGSNVLVILLVFGFFWRFFSGKGGPSTSHGADDDDDEDSLPVASPWASRYRFEGHGARSTPMEDVVSSLPVSVYSSAGAEEGRKARPECAVCIVELRDGDSVRVLPRCGHRFHADCVGAWLRRRTTCPLCRGRVVPPAAAALTDKSRDAKDDVAVAVAADCPV

SEQ ID NO: 110989 - protein, 127 aa, Zea mays subsp. mays
  misc_feature (1)..(127): Ceres Seq. ID no. 15180673
QHASFLLSLQPFLFLAIYLLPSSLLLISLTLNLVLLNFSEETLQACDLFSQFYCKLDQHLVLGRKVLASKKAQLLWFMHTIGSESLLFGLSKTKPCPRAGAVVLALLPVRLRRRRRWKATGPRTARC

SEQ ID NO: 110990 - protein, 102 aa, Zea mays subsp. mays
  misc_feature (1)..(102): Ceres Seq. ID no. 15180674
  misc_feature (28)..(69): Pfam Name: Zinc finger, C3HC4 type (RING finger) Pfam Description: Zinc finger, C3HC4 type (RING finger)
  misc_feature (1)..(99): Homolog of NCBI NO: 7487705 NR Description: hypothetical protein T5J17.240 - Arabidopsis
  misc_feature (1)..(76): Homolog of NCBI NO: 8698833 NR Description: EL5 [Oryza sativa (japonica cultivar-group)]
  misc_feature (5)..(96): Homolog of NCBI NO: 34903936 NR Description: OSJNBa0038J17.13 [Oryza sativa (japonica
  misc_feature (5)..(85): Homolog of NCBI NO: 34903920 NR Description: OSJNBa0038J17.5 [Oryza sativa (japonica
  misc_feature (4)..(85): Homolog of NCBI NO: 15226628 NR Description: hypothetical protein [Arabidopsis thaliana]
  misc_feature (2)..(77): Homolog of NCBI NO: 30017522 NR Description: putative ring-H2 zinc finger protein
  misc_feature (1)..(83): Homolog of NCBI NO: 34907968 NR Description: P0446G04.15 [Oryza sativa (japonica
  misc_feature (1)..(98): Homolog of NCBI NO: 34907826 NR Description: P0485B12.26 [Oryza sativa (japonica
  misc_feature (1)..(102): Homolog of NCBI NO: 34894514 NR Description: P0551A11.21 [Oryza sativa (japonica
  misc_feature (1)..(102): Homolog of NCBI NO: 34894518 NR Description: P0551A11.23 [Oryza sativa (japonica
MEDVVSSLPVSVYSSAGAEEGRKARPECAVCIVELRDGDSVRVLPRCGHRFHADCVGAWLRRRTTCPLCRGRVVPPAAAALTDKSRDAKDDVAVAVAADCPV

SEQ ID NO: 110991 - DNA, 2310 bp, Zea mays subsp. mays
  misc_feature (1)..(2310): Ceres Seq. ID no. 15180650
  misc_feature: MA Experiment ID: 108535 Result: Up-regulated in Transcription
  misc_feature: MA Experiment 108535 PARAMETER Experiment Name: Zm_Meristem_P Parameter: Age (day) Value: 8
  misc_feature: MA Experiment 108535 PARAMETER Experiment Name: Zm_Meristem_P Parameter: Organism Value: Zea mays
  misc_feature: MA Experiment 108535 PARAMETER Experiment Name: Zm_Meristem_P Parameter: Plant Line Value: 35A19
  misc_feature: MA Experiment 108535 PARAMETER Experiment Name: Zm_Meristem_P Parameter: Tissue Value: Root Meristem vs. Above Root Meristem
  misc_feature: MA Experiment ID: 108542 Result: Down-regulated in Transcription
  misc_feature: MA Experiment 108542 PARAMETER Experiment Name: Zm_150mM_NaCl_P Parameter: Age (day) Value: 8
  misc_feature: MA Experiment 108542 PARAMETER Experiment Name: Zm_150mM_NaCl_P Parameter: Organism Value: Zea mays
  misc_feature: MA Experiment 108542 PARAMETER Experiment Name: Zm_150mM_NaCl_P Parameter: Plant Line Value: 35A19
  misc_feature: MA Experiment 108542 PARAMETER Experiment Name: Zm_150mM_NaCl_P Parameter: Timepoint (hr) Value: 6
  misc_feature: MA Experiment 108542 PARAMETER Experiment Name: Zm_150mM_NaCl_P Parameter: Tissue Value: Aerial
  misc_feature: MA Experiment 108542 PARAMETER Experiment Name: Zm_150mM_NaCl_P Parameter: Treatment Value: 150mM NaCl vs. No Treatment
  misc_feature: MA Experiment ID: 108544 Result: Down-regulated in Transcription
  misc_feature: MA Experiment ID: 108556 Result: Down-regulated in Transcription
  misc_feature: MA Experiment 108556 PARAMETER Experiment Name: Zm_Drought_P Parameter: Age (day) Value: 9
  misc_feature: MA Experiment 108556 PARAMETER Experiment Name: Zm_Drought_P Parameter: Organism Value: Zea mays
  misc_feature: MA Experiment 108556 PARAMETER Experiment Name: Zm_Drought_P Parameter: Plant Line Value: 35A19
  misc_feature: MA Experiment 108556 PARAMETER Experiment Name: Zm_Drought_P Parameter: Timepoint (hr) Value: 24
  misc_feature: MA Experiment 108556 PARAMETER Experiment Name: Zm_Drought_P Parameter: Tissue Value: Aerial
  misc_feature: MA Experiment 108556 PARAMETER Experiment Name: Zm_Drought_P Parameter: Treatment Value: Drought vs. No Drought
  misc_feature: MA Experiment ID: 108597 Result: Down-regulated in Transcription
  misc_feature: MA Experiment 108597 PARAMETER Experiment Name: Zm_100uM_ABA_P Parameter: Age (day) Value: 9
  misc_feature: MA Experiment 108597 PARAMETER Experiment Name: Zm_100uM_ABA_P Parameter: Organism Value: Zea mays
  misc_feature: MA Experiment 108597 PARAMETER Experiment Name: Zm_100uM_ABA_P Parameter: Plant Line Value: 35A19
  misc_feature: MA Experiment 108597 PARAMETER Experiment Name: Zm_100uM_ABA_P Parameter: Timepoint (hr) Value: 24
  misc_feature: MA Experiment 108597 PARAMETER Experiment Name: Zm_100uM_ABA_P Parameter: Tissue Value: Aerial
  misc_feature: MA Experiment 108597 PARAMETER Experiment Name: Zm_100uM_ABA_P Parameter: Treatment Value: 100uM ABA vs. No Treatment
  misc_feature: MA Experiment ID: 20000477 Result: Down-regulated in Transcription
  misc_feature: MA Experiment 20000477 PARAMETER Experiment Name: Zm_5mM_SA_P Parameter: Age (day) Value: 10
  misc_feature: MA Experiment 20000477 PARAMETER Experiment Name: Zm_5mM_SA_P Parameter: Organism Value: Zea mays
  misc_feature: MA Experiment 20000477 PARAMETER Experiment Name: Zm_5mM_SA_P Parameter: Plant Line Value: 35A19
  misc_feature: MA Experiment 20000477 PARAMETER Experiment Name: Zm_5mM_SA_P Parameter: Timepoint (hr) Value: 48
  misc_feature: MA Experiment 20000477 PARAMETER Experiment Name: Zm_5mM_SA_P Parameter: Tissue Value: Aerial
  misc_feature: MA Experiment 20000477 PARAMETER Experiment Name: Zm_5mM_SA_P Parameter: Treatment Value: 5mM SA vs. No Treatment
  misc_feature: MA Experiment ID: 20000479 Result: Down-regulated in Transcription
  misc_feature: MA Experiment 20000479 PARAMETER Experiment Name: Zm_Drought_P Parameter: Age (day) Value: 10
  misc_feature: MA Experiment 20000479 PARAMETER Experiment Name: Zm_Drought_P Parameter: Organism Value: Zea mays
  misc_feature: MA Experiment 20000479 PARAMETER Experiment Name: Zm_Drought_P Parameter: Plant Line Value: 35A19
  misc_feature: MA Experiment 20000479 PARAMETER Experiment Name: Zm_Drought_P Parameter: Timepoint (hr) Value: 48
  misc_feature: MA Experiment 20000479 PARAMETER Experiment Name: Zm_Drought_P Parameter: Tissue Value: Aerial
  misc_feature: MA Experiment 20000479 PARAMETER Experiment Name: Zm_Drought_P Parameter: Treatment Value: Drought vs. No Drought
  misc_feature: MA Experiment ID: 20000632 Result: Down-regulated in Transcription
  misc_feature: MA Experiment 20000632 PARAMETER Experiment Name: Zm_Herbicide-Treatments_P Parameter: Timepoint (hr) Value: 4
  misc_feature: MA Experiment 20000632 PARAMETER Experiment Name: Zm_Herbicide-Treatments_P Parameter: Tissue Value: Aerial
  misc_feature: MA Experiment 20000632 PARAMETER Experiment Name: Zm_Herbicide-Treatments_P Parameter: Treatment Value: Glean vs. No Treatment
tcgccgaaaccaaccgccgcagccgccgccgccatggggggttcgcacagccgcgaggacctcgacctatccgactctgactccgaggacgccgagtccccccgggcttccgacaactcctccgactacggcacgcctcccccggcctccgtctcctccaagttagccagcggcgcaggggcggctacccccgcctccatcgacgccatcgaccgccacctccgccagctccacctcaagtacaacgagcccatctccccgaaccctagctccgggcccacccccagcgctaaccccgccgcgctcaacgccgtcaagctctacctccacatcggcggctcctctccctccgccaagtggatcgtctccgaccgcctcgccgccgcctccttcgtgcgcgccggcgccggcgccggcgacggcgacgacgaggatgacgacgcccccgccgccggcgggccgtggtccctcgtcgtgggctcgaagatccgggccagggtcgggcccgagctgcagctcaaggccttccccgcgcagcgccgggtggatttcgtcgccgacggcgtatgggccctcaagttcctgcactccgacggcttcggcgacttctgcgcgaagcaccacagctgtatgtttgagaacagctacggcgtcgccgccacggacgagggccgcgccaaggtattcgggaaggacttcgcggcgtgggcgcgcccggaggacggcgacgagtcgatatgggaggacgccaccgacggcttctccccgggccccaagggcagcccgatgcccccgcggacaccgctactgaaggccgtgctggaggatctgcgggagtttgaggagcccgtcgaggaaggaagtggaatcaagagccttgcgcttggcgcgctggacaacagtttccttgttggagacaagggcattgaggtcgtgaggaatttcgagcatgggatacatggaaagggcatgtccgtgaagttttctggagggagcacaaacttctcgacaccgaaaaaggctcttcttatgcgggccgagaccaacatgcttctgatgagcccagccactgatggaaagccacacgccaagggggtgcatcagttggacattgagacggggaaggtggtttcagaatggaagtttgagaaggatggagcagatattaacatgagggatatcaccaatgatagcaaaggtgctcagctggattcgtctgagtccaccttcttgggactggatgacaaccagttgtgccggtgggatatgagagatcgcaggggcattgtacagaagttggcaagtgcgactgaatcgccagtgttgcagtggactcaggggcatcagttctcccgggggacaaactttcagtgctttgcttcaactggtgatggttcaattgttgttggatcattagatgggaaaattcgcttgtattctaagagctctatgaggatggcaaagacagcctttcctgggttgggttcgcccattacccatgtcgacgtgacatatgatgggaagtggattcttgggacaacagatgcgtacctgattcttgtatgcaccatcttcatcgacaaagatggaaaggagaagactgggtttagtggtagaatggggaaccgtattgctgctccaaggctgctgaagctcaacccactggactctcatctagcaggagcaaacaacaggttcagggagggaagattctcttgggtgacggagaacgggaagcaggagcggcatctagtggcgacggtggggaagtacagcgtggtgtggaacttcctgcaggtgaagaacagccaccacgagtgctaccagtaccaggaggggctgaagagctgctattgctacaaggtgatccccaaggacgagtccatcgtggccagccgcttcatgcacgacaagtactcggtcagcgactccccggaggctccactggtggtggccacgcccatgaaggtcacctccttcagcatatccagcaggcactaactagcctccttgctccgccccgcaacttcgctgccggccgacgcgttccccttggctcctcggcctccggtgatctggtaacattttgttaagcaattgtttgtgcgacggttgcctgttccattgccttctaagttggttcaaattaattagtgatttgctgtgttgagtcgatacgcaacgttgaagaggggatggtagtgtctgttgggttagctacatattgctgaacaatctgatttagctgtgaggaagtggctaatggttgtaagaaagctgaaagttgtttgattaaaataattgttaact

SEQ ID NO: 110992 - protein, 666 aa, Zea mays subsp. mays
  misc_feature (1)..(666): Ceres Seq. ID no. 15180651
  misc_feature (12)..(665): Homolog of NCBI NO: 15230321 NR Description: dem-related protein [Arabidopsis thaliana]
  misc_feature (66)..(665): Homolog of NCBI NO: 37223344 NR Description: DEM2 [Lycopersicon esculentum]
  misc_feature (66)..(665): Homolog of NCBI NO: 37223342 NR Description: DEM2 [Lycopersicon esculentum]
  misc_feature (12)..(665): Homolog of NCBI NO: 7488984 NR Description: dem protein - tomato
  misc_feature (388)..(608): Homolog of NCBI NO: 40744400 NR Description: hypothetical protein AN3005.2 [Aspergillus
  misc_feature (275)..(632): Homolog of NCBI NO: 28829296 NR Description: similar to hypothetical protein
  misc_feature (176)..(663): Homolog of NCBI NO: 729273 NR Description: CYPRO4 PROTEIN
  misc_feature (12)..(665): Homolog of NCBI NO: 15234174 NR Description: Dem -related protein [Arabidopsis thaliana]
SPKPTAAAAAAMGGSHSREDLDLSDSDSEDAESPRASDNSSDYGTPPPASVSSKLASGAGAATPASIDAIDRHLRQLHLKYNEPISPNPSSGPTPSANPAALNAVKLYLHIGGSSPSAKWIVSDRLAAASFVRAGAGAGDGDDEDDDAPAAGGPWSLVVGSKIRARVGPELQLKAFPAQRRVDFVADGVWALKFLHSDGFGDFCAKHHSCMFENSYGVAATDEGRAKVFGKDFAAWARPEDGDESIWEDATDGFSPGPKGSPMPPRTPLLKAVLEDLREFEEPVEEGSGIKSLALGALDNSFLVGDKGIEVVRNFEHGIHGKGMSVKFSGGSTNFSTPKKALLMRAETNMLLMSPATDGKPHAKGVHQLDIETGKVVSEWKFEKDGADINMRDITNDSKGAQLDSSESTFLGLDDNQLCRWDMRDRRGIVQKLASATESPVLQWTQGHQFSRGTNFQCFASTGDGSIVVGSLDGKIRLYSKSSMRMAKTAFPGLGSPITHVDVTYDGKWILGTTDAYLILVCTIFIDKDGKEKTGFSGRMGNRIAAPRLLKLNPLDSHLAGANNRFREGRFSWVTENGKQERHLVATVGKYSVVWNFLQVKNSHHECYQYQEGLKSCYCYKVIPKDESIVASRFMHDKYSVSDSPEAPLVVATPMKVTSFSISSRH

SEQ ID NO: 110993 - protein, 655 aa, Zea mays subsp. mays
  misc_feature (1)..(655): Ceres Seq. ID no. 15180652
  misc_feature (377)..(597): Homolog of NCBI NO: 40744400 NR Description: hypothetical protein AN3005.2 [Aspergillus
  misc_feature (264)..(621): Homolog of NCBI NO: 28829296 NR Description: similar to hypothetical protein
  misc_feature (165)..(652): Homolog of NCBI NO: 729273 NR Description: CYPRO4 PROTEIN
  misc_feature (1)..(654): Homolog of NCBI NO: 15234174 NR Description: Dem -related protein [Arabidopsis thaliana]
  misc_feature (1)..(654): Homolog of NCBI NO: 15230321 NR Description: dem-related protein [Arabidopsis thaliana]
  misc_feature (55)..(654): Homolog of NCBI NO: 37223344 NR Description: DEM2 [Lycopersicon esculentum]
  misc_feature (55)..(654): Homolog of NCBI NO: 37223342 NR Description: DEM2 [Lycopersicon esculentum]
  misc_feature (1)..(654): Homolog of NCBI NO: 7488984 NR Description: dem protein - tomato
MGGSHSREDLDLSDSDSEDAESPRASDNSSDYGTPPPASVSSKLASGAGAATPASIDAIDRHLRQLHLKYNEPISPNPSSGPTPSANPAALNAVKLYLHIGGSSPSAKWIVSDRLAAASFVRAGAGAGDGDDEDDDAPAAGGPWSLVVGSKIRARVGPELQLKAFPAQRRVDFVADGVWALKFLHSDGFGDFCAKHHSCMFENSYGVAATDEGRAKVFGKDFAAWARPEDGDESIWEDATDGFSPGPKGSPMPPRTPLLKAVLEDLREFEEPVEEGSGIKSLALGALDNSFLVGDKGIEVVRNFEHGIHGKGMSVKFSGGSTNFSTPKKALLMRAETNMLLMSPATDGKPHAKGVHQLDIETGKVVSEWKFEKDGADINMRDITNDSKGAQLDSSESTFLGLDDNQLCRWDMRDRRGIVQKLASATESPVLQWTQGHQFSRGTNFQCFASTGDGSIVVGSLDGKIRLYSKSSMRMAKTAFPGLGSPITHVDVTYDGKWILGTTDAYLILVCTIFIDKDGKEKTGFSGRMGNRIAAPRLLKLNPLDSHLAGANNRFREGRFSWVTENGKQERHLVATVGKYSVVWNFLQVKNSHHECYQYQEGLKSCYCYKVIPKDESIVASRFMHDKYSVSDSPEAPLVVATPMKVTSFSISSRH

SEQ ID NO: 110994 - protein, 456 aa, Zea mays subsp. mays
  misc_feature (1)..(456): Ceres Seq. ID no. 15180653
  misc_feature (178)..(398): Homolog of NCBI NO: 40744400 NR Description: hypothetical protein AN3005.2 [Aspergillus
  misc_feature (65)..(422): Homolog of NCBI NO: 28829296 NR Description: similar to hypothetical protein
  misc_feature (1)..(453): Homolog of NCBI NO: 729273 NR Description: CYPRO4 PROTEIN
  misc_feature (1)..(455): Homolog of NCBI NO: 15234174 NR Description: Dem -related protein [Arabidopsis thaliana]
  misc_feature (1)..(455): Homolog of NCBI NO: 15230321 NR Description: dem-related protein [Arabidopsis thaliana]
  misc_feature (1)..(455): Homolog of NCBI NO: 37223344 NR Description: DEM2 [Lycopersicon esculentum]
  misc_feature (1)..(455): Homolog of NCBI NO: 37223342 NR Description: DEM2 [Lycopersicon esculentum]
  misc_feature (1)..(455): Homolog of NCBI NO: 7488984 NR Description: dem protein - tomato
MFENSYGVAATDEGRAKVFGKDFAAWARPEDGDESIWEDATDGFSPGPKGSPMPPRTPLLKAVLEDLREFEEPVEEGSGIKSLALGALDNSFLVGDKGIEVVRNFEHGIHGKGMSVKFSGGSTNFSTPKKALLMRAETNMLLMSPATDGKPHAKGVHQLDIETGKVVSEWKFEKDGADINMRDITNDSKGAQLDSSESTFLGLDDNQLCRWDMRDRRGIVQKLASATESPVLQWTQGHQFSRGTNFQCFASTGDGSIVVGSLDGKIRLYSKSSMRMAKTAFPGLGSPITHVDVTYDGKWILGTTDAYLILVCTIFIDKDGKEKTGFSGRMGNRIAAPRLLKLNPLDSHLAGANNRFREGRFSWVTENGKQERHLVATVGKYSVVWNFLQVKNSHHECYQYQEGLKSCYCYKVIPKDESIVASRFMHDKYSVSDSPEAPLVVATPMKVTSFSISSRH

SEQ ID NO: 110995 - DNA, 1686 bp, Zea mays subsp. mays
  misc_feature (1)..(1686): Ceres Seq. ID no. 15180657
aaagtggtccttttccatccccaaacctcggctgccatggatttcggcttcggcgccggcgaccggaggccgctctgctcttccccggaccgacacttcgcaccaccgcgagccgagcttttccatggcggtccgccgccctcgctgttcgagtgtgaggccgcggcgtggcgcgagaggatcatccgcgaggaggtggagcggcggctcatcgagaaggaggtccgccgcgatctctcccttgcgcgcgcccgcggcggtttcggccccgtcccgttcgtcggacccaatggccacatcgtgcggtcaccacgccaaggcacgttcttcaggccggacggcccattcacgtcgccaatgccgctgaccccgatgccggtcggcatgcatccgaactggccaccgctgccttcgttcgggtcgtgggaggggtttggttctcggcggctcgcgggatttgggcagccgatgctcctcaacgagacgagaacgaggtccctgccgccgccaaagccgatgcatcagctccagctgcgcatggtcacgcccagcgagagctccgaggttttttcatcagaaacaaaggattctggtgtgaaaaggaaggcacatgcgatttctgcaactactgaatcaacaaaaatacaaaatgctgcaagggactggagctgtgcactctgtcaagtgagcgcaaccagtgagtctggtctgaatcagcatcttcaagggaaaaagcataaggcgaagctggttcaatgtggagcgatcaaggtgatggatactaataaaagtggtttacatgtaactactggaaataacaatggcgcaggcccaagtgacgcgcctaagaaaatccacatcctggtcgatggagaaatgcaccaggtcgtccaaaaaagcaagcgtgtatggtgtgagcgttgcagggtcagctgtaccaatgccggtgccatggctgaccatctgcggggcaagaagcacagtttattgaataaagtctgggcgtcaataaaagccgtgagaaggaacaatggaattaaggaagattcagctactgctacatgtgagagaaaggtaaatgaaagcggccctgctggaattccagaggaagaggaacatgaggaggagggagacacatacatggctagcgaattcagcggagatgcttcttccgaaattcctagatggtggatctggtactactggatttgcccattggcatggacagtgtatgggctcatcgtgacacaatacggagacctgcaagaccccatcacagtccctggcgaaagcaaccagacgattagctactatataacacatcattttggataccatagggattttatgccagtcgttgcgccagttctcgtgctctttgcagtattcttcgctttcatgtacgcagtctgcatcaagaagttgaactttcagcaacgataggaacaagatatggcagaaaagctcttgagagtattttttctttttttggaaaatacttccttttctcctttcatttttgagtccctttaatatattgcaatgtatatagggtgtagcttcggtattccacacatcgtcaaatgtggcgaggtcttatacagatttctagccgtttaactgtggaacattgtaatttgtaagagcacatctatgagaaagttttgttcatgcccaattcatttc

SEQ ID NO: 110996 - protein, 480 aa, Zea mays subsp. mays
  misc_feature (1)..(480): Ceres Seq. ID no. 15180658
  misc_feature (392)..(480): Homolog of NCBI NO: 34912544 NR Description: putative ABC transporter protein
  misc_feature (393)..(480): Homolog of NCBI NO: 14331118 NR Description: ABC1 protein [Nicotiana plumbaginifolia]
  misc_feature (392)..(480): Homolog of NCBI NO: 25384958 NR Description: F9L1.15 protein - Arabidopsis thaliana
  misc_feature (392)..(480): Homolog of NCBI NO: 15218084 NR Description: ABC transporter family protein [Arabidopsis
  misc_feature (392)..(480): Homolog of NCBI NO: 15218936 NR Description: ABC transporter family protein [Arabidopsis
  misc_feature (392)..(480): Homolog of NCBI NO: 18377973 NR Description: putative ABC transporter protein [Arabidopsis
  misc_feature (393)..(480): Homolog of NCBI NO: 18401096 NR Description: ABC transporter family protein [Arabidopsis
  misc_feature (392)..(480): Homolog of NCBI NO: 34910744 NR Description: putative ABC transporter [Oryza sativa (japonica
  misc_feature (393)..(480): Homolog of NCBI NO: 15215837 NR Description: AT3g16340/MYA6_15 [Arabidopsis thaliana]
  misc_feature (393)..(480): Homolog of NCBI NO: 27368815 NR Description: PDR-like ABC transporter [Oryza sativa (japonica
KVVLFHPQTSAAMDFGFGAGDRRPLCSSPDRHFAPPRAELFHGGPPPSLFECEAAAWRERIIREEVERRLIEKEVRRDLSLARARGGFGPVPFVGPNGHIVRSPRQGTFFRPDGPFTSPMPLTPMPVGMHPNWPPLPSFGSWEGFGSRRLAGFGQPMLLNETRTRSLPPPKPMHQLQLRMVTPSESSEVFSSETKDSGVKRKAHAISATTESTKIQNAARDWSCALCQVSATSESGLNQHLQGKKHKAKLVQCGAIKVMDTNKSGLHVTTGNNNGAGPSDAPKKIHILVDGEMHQVVQKSKRVWCERCRVSCTNAGAMADHLRGKKHSLLNKVWASIKAVRRNNGIKEDSATATCERKVNESGPAGIPEEEEHEEEGDTYMASEFSGDASSEIPRWWIWYYWICPLAWTVYGLIVTQYGDLQDPITVPGESNQTISYYITHHFGYHRDFMPVVAPVLVLFAVFFAFMYAVCIKKLNFQQR

SEQ ID NO: 110997 - protein, 468 aa, Zea mays subsp. mays
  misc_feature (1)..(468): Ceres Seq. ID no. 15180659
  misc_feature (380)..(468): Homolog of NCBI NO: 34912544 NR Description: putative ABC transporter protein
  misc_feature (381)..(468): Homolog of NCBI NO: 14331118 NR Description: ABC1 protein [Nicotiana plumbaginifolia]
  misc_feature (380)..(468): Homolog of NCBI NO: 25384958 NR Description: F9L1.15 protein - Arabidopsis thaliana
  misc_feature (380)..(468): Homolog of NCBI NO: 15218084 NR Description: ABC transporter family protein [Arabidopsis
  misc_feature (380)..(468): Homolog of NCBI NO: 15218936 NR Description: ABC transporter family protein [Arabidopsis
  misc_feature (380)..(468): Homolog of NCBI NO: 18377973 NR Description: putative ABC transporter protein [Arabidopsis
  misc_feature (381)..(468): Homolog of NCBI NO: 18401096 NR Description: ABC transporter family protein [Arabidopsis
  misc_feature (380)..(468): Homolog of NCBI NO: 34910744 NR Description: putative ABC transporter [Oryza sativa (japonica
  misc_feature (381)..(468): Homolog of NCBI NO: 15215837 NR Description: AT3g16340/MYA6_15 [Arabidopsis thaliana]
  misc_feature (381)..(468): Homolog of NCBI NO: 27368815 NR Description: PDR-like ABC transporter [Oryza sativa (japonica
MDFGFGAGDRRPLCSSPDRHFAPPRAELFHGGPPPSLFECEAAAWRERIIREEVERRLIEKEVRRDLSLARARGGFGPVPFVGPNGHIVRSPRQGTFFRPDGPFTSPMPLTPMPVGMHPNWPPLPSFGSWEGFGSRRLAGFGQPMLLNETRTRSLPPPKPMHQLQLRMVTPSESSEVFSSETKDSGVKRKAHAISATTESTKIQNAARDWSCALCQVSATSESGLNQHLQGKKHKAKLVQCGAIKVMDTNKSGLHVTTGNNNGAGPSDAPKKIHILVDGEMHQVVQKSKRVWCERCRVSCTNAGAMADHLRGKKHSLLNKVWASIKAVRRNNGIKEDSATATCERKVNESGPAGIPEEEEHEEEGDTYMASEFSGDASSEIPRWWIWYYWICPLAWTVYGLIVTQYGDLQDPITVPGESNQTISYYITHHFGYHRDFMPVVAPVLVLFAVFFAFMYAVCIKKLNFQQR

SEQ ID NO: 110998 - protein, 361 aa, Zea mays subsp. mays
  misc_feature (1)..(361): Ceres Seq. ID no. 15180660
  misc_feature (273)..(361): Homolog of NCBI NO: 34912544 NR Description: putative ABC transporter protein
  misc_feature (274)..(361): Homolog of NCBI NO: 14331118 NR Description: ABC1 protein [Nicotiana plumbaginifolia]
  misc_feature (273)..(361): Homolog of NCBI NO: 25384958 NR Description: F9L1.15 protein - Arabidopsis thaliana
  misc_feature (273)..(361): Homolog of NCBI NO: 15218084 NR Description: ABC transporter family protein [Arabidopsis
  misc_feature (273)..(361): Homolog of NCBI NO: 15218936 NR Description: ABC transporter family protein [Arabidopsis
  misc_feature (273)..(361): Homolog of NCBI NO: 18377973 NR Description: putative ABC transporter protein [Arabidopsis
  misc_feature (274)..(361): Homolog of NCBI NO: 18401096 NR Description: ABC transporter family protein [Arabidopsis
  misc_feature (273)..(361): Homolog of NCBI NO: 34910744 NR Description: putative ABC transporter [Oryza sativa (japonica
  misc_feature (274)..(361): Homolog of NCBI NO: 15215837 NR Description: AT3g16340/MYA6_15 [Arabidopsis thaliana]
  misc_feature (274)..(361): Homolog of NCBI NO: 27368815 NR Description: PDR-like ABC transporter [Oryza sativa (japonica
MPLTPMPVGMHPNWPPLPSFGSWEGFGSRRLAGFGQPMLLNETRTRSLPPPKPMHQLQLRMVTPSESSEVFSSETKDSGVKRKAHAISATTESTKIQNAARDWSCALCQVSATSESGLNQHLQGKKHKAKLVQCGAIKVMDTNKSGLHVTTGNNNGAGPSDAPKKIHILVDGEMHQVVQKSKRVWCERCRVSCTNAGAMADHLRGKKHSLLNKVWASIKAVRRNNGIKEDSATATCERKVNESGPAGIPEEEEHEEEGDTYMASEFSGDASSEIPRWWIWYYWICPLAWTVYGLIVTQYGDLQDPITVPGESNQTISYYITHHFGYHRDFMPVVAPVLVLFAVFFAFMYAVCIKKLNFQQR

SEQ ID NO: 110999 - DNA, 1056 bp, Zea mays subsp. mays
  misc_feature (1)..(1056): Ceres Seq. ID no. 14305124
  misc_feature: MA Experiment ID: 20000492 Result: Up-regulated in Transcription
  misc_feature: MA Experiment 20000492 PARAMETER Experiment Name: Zm_Hybrid_Seed_Dev_P Parameter: DAP Value: 12
  misc_feature: MA Experiment 20000492 PARAMETER Experiment Name: Zm_Hybrid_Seed_Dev_P Parameter: Organism Value: Zea mays
  misc_feature: MA Experiment 20000492 PARAMETER Experiment Name: Zm_Hybrid_Seed_Dev_P Parameter: Plant Line Value: 35A19
  misc_feature: MA Experiment 20000492 PARAMETER Experiment Name: Zm_Hybrid_Seed_Dev_P Parameter: Tissue Value: Fert Kernel vs. Unfert Floret
  misc_feature: MA Experiment ID: 20000534 Result: Up-regulated in Transcription
  misc_feature: MA Experiment 20000534 PARAMETER Experiment Name: Zm_Hybrid_Pollen_P Parameter: Age (day) Value: 8
  misc_feature: MA Experiment 20000534 PARAMETER Experiment Name: Zm_Hybrid_Pollen_P Parameter: Organism Value: Zea mays
  misc_feature: MA Experiment 20000534 PARAMETER Experiment Name: Zm_Hybrid_Pollen_P Parameter: Plant Line Value: 35A19
  misc_feature: MA Experiment 20000534 PARAMETER Experiment Name: Zm_Hybrid_Pollen_P Parameter: Tissue Value: Pollen vs. Aerial
atctccgcggggatccccaggctagctaggccagagatgggcaactcgagcggtcgggcggaagacctcgcggacgccgacatggacgacggtaacaacgtgcgtcgtgcctcttcctcctctgcgggctacgtccggggcggtgggtcgtcatcatccccaccggtgagcccgccgcggccgcattcaccacggatgttcgtgccccagagtcctgtaactccgttgcaaagagctgcagaagtgcctcctccggtgttcaaccaaatattgatgaatcaacaacaggaagattctgatggcccgcctcaaaagaaaattcccacgttgctcatgtggactcttggagggaggaatatctacgttgaaggatcatgggacaactggacatcaaagaaactcgttgagaaatccggaaaagatcacaccattcttttgatgctttcatctggagttcaccgttatagattcattgtagatggagaaagaagatttatacccgaccttccctgcgaaactgacaacatgggtcagattgtgaacctagtagatgttcatgacttcgttcctgacagcgtggaaagtgtatctgagctgatggctcctccctccccggactccagctacggtttccatgttcccggcgagaaggagttctccaaggagcctcctcagctgccgtcccagctctacctcggcgtgctgaattcccggagcaccgaagaaggctgcgcgaggccgaggcacgtcgtcctcgaccatctctacatcgagaagggctggggcgcacagccgctggtggccctcggctacacccacaggttccgctccaagtacgtcacctgcgtcctgtacaaggccatcgagcggtagcctagctaaccattgctgtgctgttgtgggccggcaactatagctagccgtggtggacttggcagttcattcaggtttagaagtctctcctgcataatttgttcatctgctaaactaaagaggtgggtgcaaatccatgtgaatcttgttttttttagctgccagagcttacatattcttatc

SEQ ID NO: 111000 - protein, 290 aa, Zea mays subsp. mays
  misc_feature (1)..(290): Ceres Seq. ID no. 14305125
  misc_feature (202)..(288): Pfam Name: 5'-AMP-activated protein kinase, beta subunit, Pfam Description: 5'-AMP-activated protein kinase, beta subunit,
  misc_feature (14)..(248): Homolog of NCBI NO: 29725558 NR Description: SNF1 kinase complex anchoring protein
  misc_feature (13)..(290): Homolog of NCBI NO: 32364488 NR Description: AKIN beta2 [Medicago truncatula]
  misc_feature (53)..(290): Homolog of NCBI NO: 15234895 NR Description: kinase like protein [Arabidopsis thaliana]
  misc_feature (9)..(290): Homolog of NCBI NO: 6686784 NR Description: AKIN beta2 [Arabidopsis thaliana]
  misc_feature (13)..(290): Homolog of NCBI NO: 5702015 NR Description: GAL83 protein [Solanum tuberosum]
  misc_feature (13)..(290): Homolog of NCBI NO: 32364486 NR Description: AKIN beta1 [Medicago truncatula]
  misc_feature (13)..(290): Homolog of NCBI NO: 6686782 NR Description: AKIN gamma [Arabidopsis thaliana]
  misc_feature (13)..(290): Homolog of NCBI NO: 15242175 NR Description: AMPKBI (5'-AMP-activated protein kinase, beta
  misc_feature (13)..(56): Homolog of NCBI NO: 22324436 NR Description: AKIN beta1-like protein [Oryza sativa (japonica
  misc_feature (36)..(290): Homolog of NCBI NO: 22324436 NR Description: AKIN beta1-like protein [Oryza sativa (japonica
ISAGIPRLARPEMGNSSGRAEDLADADMDDGNNVRRASSSSAGYVRGGGSSSSPPVSPPRPHSPRMFVPQSPVTPLQRAAEVPPPVFNQILMNQQQEDSDGPPQKKIPTLLMWTLGGRNIYVEGSWDNWTSKKLVEKSGKDHTILLMLSSGVHRYRFIVDGERRFIPDLPCETDNMGQIVNLVDVHDFVPDSVESVSELMAPPSPDSSYGFHVPGEKEFSKEPPQLPSQLYLGVLNSRSTEEGCARPRHVVLDHLYIEKGWGAQPLVALGYTHRFRSKYVTCVLYKAIER

SEQ ID NO: 111001 - protein, 278 aa, Zea mays subsp. mays
  misc_feature (1)..(278): Ceres Seq. ID no. 14305126
  misc_feature (190)..(276): Pfam Name: 5'-AMP-activated protein kinase, beta subunit, Pfam Description: 5'-AMP-activated protein kinase, beta subunit,
  misc_feature (2)..(236): Homolog of NCBI NO: 29725558 NR Description: SNF1 kinase complex anchoring protein
  misc_feature (1)..(278): Homolog of NCBI NO: 32364488 NR Description: AKIN beta2 [Medicago truncatula]
  misc_feature (41)..(278): Homolog of NCBI NO: 15234895 NR Description: kinase like protein [Arabidopsis thaliana]
  misc_feature (1)..(278): Homolog of NCBI NO: 6686784 NR Description: AKIN beta2 [Arabidopsis thaliana]
  misc_feature (1)..(278): Homolog of NCBI NO: 5702015 NR Description: GAL83 protein [Solanum tuberosum]
  misc_feature (1)..(278): Homolog of NCBI NO: 32364486 NR Description: AKIN beta1 [Medicago truncatula]
  misc_feature (1)..(278): Homolog of NCBI NO: 6686782 NR Description: AKIN gamma [Arabidopsis thaliana]
  misc_feature (1)..(278): Homolog of NCBI NO: 15242175 NR Description: AMPKBI (5'-AMP-activated protein kinase, beta
  misc_feature (1)..(44): Homolog of NCBI NO: 22324436 NR Description: AKIN beta1-like protein [Oryza sativa (japonica
  misc_feature (24)..(278): Homolog of NCBI NO: 22324436 NR Description: AKIN beta1-like protein [Oryza sativa (japonica
MGNSSGRAEDLADADMDDGNNVRRASSSSAGYVRGGGSSSSPPVSPPRPHSPRMFVPQSPVTPLQRAAEVPPPVFNQILMNQQQEDSDGPPQKKIPTLLMWTLGGRNIYVEGSWDNWTSKKLVEKSGKDHTILLMLSSGVHRYRFIVDGERRFIPDLPCETDNMGQIVNLVDVHDFVPDSVESVSELMAPPSPDSSYGFHVPGEKEFSKEPPQLPSQLYLGVLNSRSTEEGCARPRHVVLDHLYIEKGWGAQPLVALGYTHRFRSKYVTCVLYKAIER

SEQ ID NO: 111002 - protein, 263 aa, Zea mays subsp. mays
  misc_feature (1)..(263): Ceres Seq. ID no. 14305127
  misc_feature (175)..(261): Pfam Name: 5'-AMP-activated protein kinase, beta subunit, Pfam Description: 5'-AMP-activated protein kinase, beta subunit,
  misc_feature (1)..(221): Homolog of NCBI NO: 29725558 NR Description: SNF1 kinase complex anchoring protein
  misc_feature (1)..(263): Homolog of NCBI NO: 32364488 NR Description: AKIN beta2 [Medicago truncatula]
  misc_feature (26)..(263): Homolog of NCBI NO: 15234895 NR Description: kinase like protein [Arabidopsis thaliana]
  misc_feature (1)..(263): Homolog of NCBI NO: 6686784 NR Description: AKIN beta2 [Arabidopsis thaliana]
  misc_feature (1)..(263): Homolog of NCBI NO: 5702015 NR Description: GAL83 protein [Solanum tuberosum]
  misc_feature (1)..(263): Homolog of NCBI NO: 32364486 NR Description: AKIN beta1 [Medicago truncatula]
  misc_feature (1)..(263): Homolog of NCBI NO: 6686782 NR Description: AKIN gamma [Arabidopsis thaliana]
  misc_feature (1)..(263): Homolog of NCBI NO: 15242175 NR Description: AMPKBI (5'-AMP-activated protein kinase, beta
  misc_feature (1)..(29): Homolog of NCBI NO: 22324436 NR Description: AKIN beta1-like protein [Oryza sativa (japonica
  misc_feature (9)..(263): Homolog of NCBI NO: 22324436 NR Description: AKIN beta1-like protein [Oryza sativa (japonica
MDDGNNVRRASSSSAGYVRGGGSSSSPPVSPPRPHSPRMFVPQSPVTPLQRAAEVPPPVFNQILMNQQQEDSDGPPQKKIPTLLMWTLGGRNIYVEGSWDNWTSKKLVEKSGKDHTILLMLSSGVHRYRFIVDGERRFIPDLPCETDNMGQIVNLVDVHDFVPDSVESVSELMAPPSPDSSYGFHVPGEKEFSKEPPQLPSQLYLGVLNSRSTEEGCARPRHVVLDHLYIEKGWGAQPLVALGYTHRFRSKYVTCVLYKAIER

SEQ ID NO: 111003 - DNA, 952 bp, Zea mays subsp. mays
  misc_feature (1)..(952): Ceres Seq. ID no. 12634256
atcttctcccccatgccggaagctcaacaaaaacaggcaatgggcaacgcataggcatagcttggctcgcacggtgtcgctggctcccctccccttccctccccactgttacatccagcgagctgttcacggccgtgccgagctcagtgaggcagcgtttgcgagtccgggacgaggggagcggcgggcgacatggggaggggccgcagcgagataaagcggatcgagaaccccacgcagcggcagtccaccttctacaagcgcagggacggcctcttcaagaaggctagggagctctccgttctgtgcgacgtggacctgctgctgctcctcttctccacctccggcaagctctaccactacctctcgcccaccgtcccctccgtcaaggacctggtcgagaggtacgaggccacgacgcacaccaaggtctggaccgacatccgccaggagcggcgcgcggagctggagaaggcggagcagatgtgcgagctgatggagaaggagctgcgggtcatgacggtggacgacggggagcagtacacggtgccgtcgctggagctgctggagcacagcctggaggcggccgtgcgcaaggtgcgctccgagaaggaccgcaagatcggcggcgagatcaactacctcgagaacattatcagaggacgccacgaggagcgctacgggttgtgcaacaagcttgcgcactctcaggcctcgaacaacgagggaggaggtgggtcgaccccaccaagcagcggcctggaactcaaactgggtctcaactgacgggctgggctggatggaaagctcgtggactatgctctgttccttgggtactgtactctgtaggttttggttgagtggtcgttgtcagcagttgtcctttgctgcttcgattggtggtgttaatgtactccattattcaggtgggatcaagtacctttgctgcttc

SEQ ID NO: 111004 - protein, 197 aa, Zea mays subsp. mays
  misc_feature (1)..(197): Ceres Seq. ID no. 12634257
  misc_feature (72)..(171): Pfam Name: K-box region Pfam Description: K-box region
  misc_feature (1)..(174): Homolog of NCBI NO: 21396795 NR Description: MADS-box gene 2 protein [Lycopodium annotinum]
  misc_feature (1)..(189): Homolog of NCBI NO: 15667638 NR Description: putative MADS-box family transcription factor
  misc_feature (1)..(184): Homolog of NCBI NO: 20513264 NR Description: MADS-box transcription factor [Lilium regale]
  misc_feature (1)..(179): Homolog of NCBI NO: 23304678 NR Description: MADS-box protein FUL-d [Brassica oleracea var.
  misc_feature (1)..(178): Homolog of NCBI NO: 4887235 NR Description: AGAMOUS homolog transcription factor [Hyacinthus
  misc_feature (1)..(165): Homolog of NCBI NO: 3170502 NR Description: APETALA3 homolog PnAP3-2 [Papaver nudicaule]
  misc_feature (1)..(192): Homolog of NCBI NO: 29372756 NR Description: m23 [Zea mays]
  misc_feature (1)..(175): Homolog of NCBI NO: 27151621 NR Description: MADS box protein GGM13
  misc_feature (4)..(180): Homolog of NCBI NO: 40644782 NR Description: putative transcription factor MADS32 [Triticum
  misc_feature (1)..(197): Homolog of NCBI NO: 34910770 NR Description: P0042A10.14 [Oryza sativa (japonica
MGRGRSEIKRIENPTQRQSTFYKRRDGLFKKARELSVLCDVDLLLLLFSTSGKLYHYLSPTVPSVKDLVERYEATTHTKVWTDIRQERRAELEKAEQMCELMEKELRVMTVDDGEQYTVPSLELLEHSLEAAVRKVRSEKDRKIGGEINYLENIIRGRHEERYGLCNKLAHSQASNNEGGGGSTPPSSGLELKLGLN

SEQ ID NO: 111005 - protein, 100 aa, Zea mays subsp. mays
  misc_feature (1)..(100): Ceres Seq. ID no. 12634258
  misc_feature (1)..(74): Pfam Name: K-box region Pfam Description: K-box region
  misc_feature (1)..(82): Homolog of NCBI NO: 23304678 NR Description: MADS-box protein FUL-d [Brassica oleracea var.
  misc_feature (1)..(81): Homolog of NCBI NO: 4887235 NR Description: AGAMOUS homolog transcription factor [Hyacinthus
  misc_feature (1)..(68): Homolog of NCBI NO: 3170502 NR Description: APETALA3 homolog PnAP3-2 [Papaver nudicaule]
  misc_feature (1)..(95): Homolog of NCBI NO: 29372756 NR Description: m23 [Zea mays]
  misc_feature (1)..(87): Homolog of NCBI NO: 20513264 NR Description: MADS-box transcription factor [Lilium regale]
  misc_feature (1)..(77): Homolog of NCBI NO: 21396795 NR Description: MADS-box gene 2 protein [Lycopodium annotinum]
  misc_feature (1)..(92): Homolog of NCBI NO: 15667638 NR Description: putative MADS-box family transcription factor
  misc_feature (1)..(78): Homolog of NCBI NO: 27151621 NR Description: MADS box protein GGM13
  misc_feature (1)..(83): Homolog of NCBI NO: 40644782 NR Description: putative transcription factor MADS32 [Triticum
  misc_feature (1)..(100): Homolog of NCBI NO: 34910770 NR Description: P0042A10.14 [Oryza sativa (japonica
MCELMEKELRVMTVDDGEQYTVPSLELLEHSLEAAVRKVRSEKDRKIGGEINYLENIIRGRHEERYGLCNKLAHSQASNNEGGGGSTPPSSGLELKLGLN

SEQ ID NO: 111006 - DNA, 1120 bp, Zea mays subsp. mays
  misc_feature (1)..(1120): Ceres Seq. ID no. 12634262
  misc_feature: MA Experiment ID: 108523 Result: Up-regulated in Transcription
  misc_feature: MA Experiment 108523 PARAMETER Experiment Name: Zm_42deg_Heat_P Parameter: Age (day) Value: 8
  misc_feature: MA Experiment 108523 PARAMETER Experiment Name: Zm_42deg_Heat_P Parameter: Organism Value: Zea mays
  misc_feature: MA Experiment 108523 PARAMETER Experiment Name: Zm_42deg_Heat_P Parameter: Plant Line Value: 35A19
  misc_feature: MA Experiment 108523 PARAMETER Experiment Name: Zm_42deg_Heat_P Parameter: Temperature (deg C) Value: 42 vs. 22
  misc_feature: MA Experiment 108523 PARAMETER Experiment Name: Zm_42deg_Heat_P Parameter: Timepoint (hr) Value: 6
  misc_feature: MA Experiment 108523 PARAMETER Experiment Name: Zm_42deg_Heat_P Parameter: Tissue Value: Aerial
  misc_feature: MA Experiment ID: 108543 Result: Down-regulated in Transcription
  misc_feature: MA Experiment ID: 20000478 Result: Up-regulated in Transcription
  misc_feature: MA Experiment 20000478 PARAMETER Experiment Name: Zm_5mM_SA_P Parameter: Age (day) Value: 11
  misc_feature: MA Experiment 20000478 PARAMETER Experiment Name: Zm_5mM_SA_P Parameter: Organism Value: Zea mays
  misc_feature: MA Experiment 20000478 PARAMETER Experiment Name: Zm_5mM_SA_P Parameter: Plant Line Value: 35A19
  misc_feature: MA Experiment 20000478 PARAMETER Experiment Name: Zm_5mM_SA_P Parameter: Timepoint (hr) Value: 72
  misc_feature: MA Experiment 20000478 PARAMETER Experiment Name: Zm_5mM_SA_P Parameter: Tissue Value: Aerial
  misc_feature: MA Experiment 20000478 PARAMETER Experiment Name: Zm_5mM_SA_P Parameter: Treatment Value: 5mM SA vs. No Treatment
  misc_feature: MA Experiment ID: 20000479 Result: Up-regulated in Transcription
  misc_feature: MA Experiment 20000479 PARAMETER Experiment Name: Zm_Drought_P Parameter: Age (day) Value: 10
  misc_feature: MA Experiment 20000479 PARAMETER Experiment Name: Zm_Drought_P Parameter: Organism Value: Zea mays
  misc_feature: MA Experiment 20000479 PARAMETER Experiment Name: Zm_Drought_P Parameter: Plant Line Value: 35A19
  misc_feature: MA Experiment 20000479 PARAMETER Experiment Name: Zm_Drought_P Parameter: Timepoint (hr) Value: 48
  misc_feature: MA Experiment 20000479 PARAMETER Experiment Name: Zm_Drought_P Parameter: Tissue Value: Aerial
  misc_feature: MA Experiment 20000479 PARAMETER Experiment Name: Zm_Drought_P Parameter: Treatment Value: Drought vs. No Drought
  misc_feature: MA Experiment ID: 20000487 Result: Up-regulated in Transcription
  misc_feature: MA Experiment 20000487 PARAMETER Experiment Name: Zm_50mM_NH4NO3_L_to_H_P Parameter: Organism Value: Zea mays
  misc_feature: MA Experiment 20000487 PARAMETER Experiment Name: Zm_50mM_NH4NO3_L_to_H_P Parameter: Timepoint (hr) Value: 4
  misc_feature: MA Experiment 20000487 PARAMETER Experiment Name: Zm_50mM_NH4NO3_L_to_H_P Parameter: Tissue Value: Leaves
  misc_feature: MA Experiment 20000487 PARAMETER Experiment Name: Zm_50mM_NH4NO3_L_to_H_P Parameter: Treatment Value: 50mM NH4NO3 vs. 100mM Mannitol
  misc_feature: MA Experiment ID: 20000626 Result: Up-regulated in Transcription
  misc_feature: MA Experiment 20000626 PARAMETER Experiment Name: Zm_Herbicide-Treatments_P Parameter: Timepoint (hr) Value: 12
  misc_feature: MA Experiment 20000626 PARAMETER Experiment Name: Zm_Herbicide-Treatments_P Parameter: Tissue Value: Aerial
  misc_feature: MA Experiment 20000626 PARAMETER Experiment Name: Zm_Herbicide-Treatments_P Parameter: Treatment Value: Roundup vs. No Treatment
  misc_feature: MA Experiment ID: 20000630 Result: Up-regulated in Transcription
  misc_feature: MA Experiment 20000630 PARAMETER Experiment Name: Zm_Herbicide-Treatments_P Parameter: Timepoint (hr) Value: 4
  misc_feature: MA Experiment 20000630 PARAMETER Experiment Name: Zm_Herbicide-Treatments_P Parameter: Tissue Value: Aerial
  misc_feature: MA Experiment 20000630 PARAMETER Experiment Name: Zm_Herbicide-Treatments_P Parameter: Treatment Value: Roundup vs. No Treatment
aaggaacctatgtatgcttgctttgcagtatcgcattactattttccctttagtttttcggaaatcttaaatgaacttaatcctcggttgactagattcacatctgtatcctataattatgacctgattgctctatttctaaatattttcatgcgagttctttttttcatagttaaaaggaactaggtagcatttcattagaaataggcacccaaattcgcctggatggtctgggtatacatccacacccttgaccaactgagctagctcagcttcctttttttcgtagttaaattctgtaagattccaaagttatcttagggaaagccgtaaaagaacagaagttcaccatcttatgagtcagacctttgatgcagggtgttacacttggaggtacaggcaaggaacatggagataggcaccccaagattggtcagggagctctaattggagccagtgctactatcctcggcaatattaatgtaggcgaaggtgccatgattgctgctggctcccttgttttaaaggacgtacctccccacagtatggctgtaggtaatcctgcaaaggtagttggttatacagagaaagaagatccttctttaactatgaaacatgatgcaaggagagattattttgagcatgctgccatcagattgagatgattgatacacctaatgacgagtcttctttctattcgtctgtggaatactgtggagtaaaaaaagttccaaatcgccttattggcaagaagttttgtggagttaaaaaaaggtttcgtcgtcttactcgcaggaaaccttgtgaagttaaaaaaaaaatgtttgacgaaacgcatacggatgccattccggacatttcgtcacaggcacaaggctggatagtcgatgagctctgtgtttccctttctgcccagacaaccaaatgaagatggaaaagggtcacccagggctccaaaatctagagtgtagacaagcatgtccttaatgcgccttaaattggtctggatggcacttttttgtgataaactatctatctaaaccattgactaatgtctactctactctcaacaagatcaattaattgtatatttgatattaannntngaatgtttagtatg

SEQ ID NO: 111007 - protein, 97 aa, Zea mays subsp. mays
  misc_feature (1)..(97): Ceres Seq. ID no. 12634263
  misc_feature (1)..(87): Homolog of NCBI NO: 23028301 NR Description: hypothetical protein [Microbulbifer degradans
  misc_feature (1)..(89): Homolog of NCBI NO: 25286519 NR Description: probable serine acetyltransferase
  misc_feature (1)..(89): Homolog of NCBI NO: 20198259 NR Description: serine acetyltransferase (GB:AF112303)
  misc_feature (1)..(82): Homolog of NCBI NO: 7433701 NR Description: serine O-acetyltransferase (EC 2.3.1.30)
  misc_feature (1)..(82): Homolog of NCBI NO: 7433700 NR Description: serine O-acetyltransferase (EC 2.3.1.30)
  misc_feature (1)..(93): Homolog of NCBI NO: 18398491 NR Description: expressed protein
  misc_feature (1)..(93): Homolog of NCBI NO: 5597011 NR Description: serine acetyltranferase 2 [Arabidopsis thaliana]
  misc_feature (1)..(97): Homolog of NCBI NO: 17225592 NR Description: serine acetyltransferase [Arabidopsis thaliana]
  misc_feature (1)..(97): Homolog of NCBI NO: 30690434 NR Description: acetyltransferase family [Arabidopsis thaliana]
  misc_feature (1)..(94): Homolog of NCBI NO: 22758278 NR Description: Putative serine acetyltransferase
MQGVTLGGTGKEHGDRHPKIGQGALIGASATILGNINVGEGAMIAAGSLVLKDVPPHSMAVGNPAKVVGYTEKEDPSLTMKHDARRDYFEHAAIRLR

SEQ ID NO: 111008 - protein, 88 aa, Zea mays subsp. mays
  misc_feature (1)..(88): Ceres Seq. ID no. 12634264
MIDTPNDESSFYSSVEYCGVKKVPNRLIGKKFCGVKKRFRRLTRRKPCEVKKKMFDETHTDAIPDISSQAQGWIVDELCVSLSAQTTK

SEQ ID NO: 111009 - protein, 61 aa, Zea mays subsp. mays
  misc_feature (1)..(61): Ceres Seq. ID no. 12634265
KEPMYACFAVSHYYFPFSFSEILNELNPRLTRFTSVSYNYDLIALFLNIFMRVLFFIVKRN

SEQ ID NO: 111010 - DNA, 1157 bp, Zea mays subsp. mays
  misc_feature (1)..(1157): Ceres Seq. ID no. 15180844
  misc_feature: MA Experiment ID: 108522 Result: Up-regulated in Transcription
  misc_feature: MA Experiment 108522 PARAMETER Experiment Name: Zm_42deg_Heat_P Parameter: Age (day) Value: 8
  misc_feature: MA Experiment 108522 PARAMETER Experiment Name: Zm_42deg_Heat_P Parameter: Organism Value: Zea mays
  misc_feature: MA Experiment 108522 PARAMETER Experiment Name: Zm_42deg_Heat_P Parameter: Plant Line Value: 35A19
  misc_feature: MA Experiment 108522 PARAMETER Experiment Name: Zm_42deg_Heat_P Parameter: Temperature (deg C) Value: 42 vs. 22
  misc_feature: MA Experiment 108522 PARAMETER Experiment Name: Zm_42deg_Heat_P Parameter: Timepoint (hr) Value: 1
  misc_feature: MA Experiment 108522 PARAMETER Experiment Name: Zm_42deg_Heat_P Parameter: Tissue Value: Aerial
  misc_feature: MA Experiment ID: 108528 Result: Up-regulated in Transcription
  misc_feature: MA Experiment 108528 PARAMETER Experiment Name: Zm_Imbibed_Seeds_P Parameter: Age (day) Value: 5 vs. 2
  misc_feature: MA Experiment 108528 PARAMETER Experiment Name: Zm_Imbibed_Seeds_P Parameter: Organism Value: Zea mays
  misc_feature: MA Experiment 108528 PARAMETER Experiment Name: Zm_Imbibed_Seeds_P Parameter: Plant Line Value: 35A19
  misc_feature: MA Experiment 108528 PARAMETER Experiment Name: Zm_Imbibed_Seeds_P Parameter: Tissue Value: Aerial vs. Embryo
  misc_feature: MA Experiment ID: 108529 Result: Up-regulated in Transcription
  misc_feature: MA Experiment 108529 PARAMETER Experiment Name: Zm_Imbibed_Seeds_P Parameter: Age (day) Value: 5 vs. 2
  misc_feature: MA Experiment 108529 PARAMETER Experiment Name: Zm_Imbibed_Seeds_P Parameter: Organism Value: Zea mays
  misc_feature: MA Experiment 108529 PARAMETER Experiment Name: Zm_Imbibed_Seeds_P Parameter: Plant Line Value: 35A19
  misc_feature: MA Experiment 108529 PARAMETER Experiment Name: Zm_Imbibed_Seeds_P Parameter: Tissue Value: Roots vs. Embryo
  misc_feature: MA Experiment ID: 108530 Result: Up-regulated in Transcription
  misc_feature: MA Experiment 108530 PARAMETER Experiment Name: Zm_Imbibed_Seeds_P Parameter: Age (day) Value: 6 vs. 2
  misc_feature: MA Experiment 108530 PARAMETER Experiment Name: Zm_Imbibed_Seeds_P Parameter: Organism Value: Zea mays
  misc_feature: MA Experiment 108530 PARAMETER Experiment Name: Zm_Imbibed_Seeds_P Parameter: Plant Line Value: 35A19
  misc_feature: MA Experiment 108530 PARAMETER Experiment Name: Zm_Imbibed_Seeds_P Parameter: Tissue Value: Aerial vs. Embryo
  misc_feature: MA Experiment ID: 108535 Result: Down-regulated in Transcription
  misc_feature: MA Experiment 108535 PARAMETER Experiment Name: Zm_Meristem_P Parameter: Age (day) Value: 8
  misc_feature: MA Experiment 108535 PARAMETER Experiment Name: Zm_Meristem_P Parameter: Organism Value: Zea mays
  misc_feature: MA Experiment 108535 PARAMETER Experiment Name: Zm_Meristem_P Parameter: Plant Line Value: 35A19
  misc_feature: MA Experiment 108535 PARAMETER Experiment Name: Zm_Meristem_P Parameter: Tissue Value: Root Meristem vs. Above Root Meristem
  misc_feature: MA Experiment ID: 108542 Result: Up-regulated in Transcription
  misc_feature: MA Experiment 108542 PARAMETER Experiment Name: Zm_150mM_NaCl_P Parameter: Age (day) Value: 8
  misc_feature: MA Experiment 108542 PARAMETER Experiment Name: Zm_150mM_NaCl_P Parameter: Organism Value: Zea mays
  misc_feature: MA Experiment 108542 PARAMETER Experiment Name: Zm_150mM_NaCl_P Parameter: Plant Line Value: 35A19
  misc_feature: MA Experiment 108542 PARAMETER Experiment Name: Zm_150mM_NaCl_P Parameter: Timepoint (hr) Value: 6
  misc_feature: MA Experiment 108542 PARAMETER Experiment Name: Zm_150mM_NaCl_P Parameter: Tissue Value: Aerial
  misc_feature: MA Experiment 108542 PARAMETER Experiment Name: Zm_150mM_NaCl_P Parameter: Treatment Value: 150mM NaCl vs. No Treatment
  misc_feature: MA Experiment ID: 108547 Result: Up-regulated in Transcription
  misc_feature: MA Experiment 108547 PARAMETER Experiment Name: Zm_Imbibed_Seeds_P Parameter: Age (day) Value: 4 vs. 2
  misc_feature: MA Experiment 108547 PARAMETER Experiment Name: Zm_Imbibed_Seeds_P Parameter: Organism Value: Zea mays
  misc_feature: MA Experiment 108547 PARAMETER Experiment Name: Zm_Imbibed_Seeds_P Parameter: Plant Line Value: 35A19
  misc_feature: MA Experiment 108547 PARAMETER Experiment Name: Zm_Imbibed_Seeds_P Parameter: Tissue Value: Aerial vs. Embryo
  misc_feature: MA Experiment ID: 108559 Result: Down-regulated in Transcription
  misc_feature: MA Experiment 108559 PARAMETER Experiment Name: Zm_5mM_NO_P Parameter: Age (day) Value: 8
  misc_feature: MA Experiment 108559 PARAMETER Experiment Name: Zm_5mM_NO_P Parameter: Organism Value: Zea mays
  misc_feature: MA Experiment 108559 PARAMETER Experiment Name: Zm_5mM_NO_P Parameter: Plant Line Value: 35A19
  misc_feature: MA Experiment 108559 PARAMETER Experiment Name: Zm_5mM_NO_P Parameter: Timepoint (hr) Value: 12
  misc_feature: MA Experiment 108559 PARAMETER Experiment Name: Zm_5mM_NO_P Parameter: Tissue Value: Aerial
  misc_feature: MA Experiment 108559 PARAMETER Experiment Name: Zm_5mM_NO_P Parameter: Treatment Value: 5mM NO vs. No Treatment
  misc_feature: MA Experiment ID: 108687 Result: Down-regulated in Transcription
  misc_feature: MA Experiment 108687 PARAMETER Experiment Name: Zm_Embryos-Flowers__P Parameter: Tissue Value: Embryo vs. Aerial+
  misc_feature: MA Experiment ID: 20000477 Result: Up-regulated in Transcription
  misc_feature: MA Experiment 20000477 PARAMETER Experiment Name: Zm_5mM_SA_P Parameter: Age (day) Value: 10
  misc_feature: MA Experiment 20000477 PARAMETER Experiment Name: Zm_5mM_SA_P Parameter: Organism Value: Zea mays
  misc_feature: MA Experiment 20000477 PARAMETER Experiment Name: Zm_5mM_SA_P Parameter: Plant Line Value: 35A19
  misc_feature: MA Experiment 20000477 PARAMETER Experiment Name: Zm_5mM_SA_P Parameter: Timepoint (hr) Value: 48
  misc_feature: MA Experiment 20000477 PARAMETER Experiment Name: Zm_5mM_SA_P Parameter: Tissue Value: Aerial
  misc_feature: MA Experiment 20000477 PARAMETER Experiment Name: Zm_5mM_SA_P Parameter: Treatment Value: 5mM SA vs. No Treatment
  misc_feature: MA Experiment ID: 20000478 Result: Up-regulated in Transcription
  misc_feature: MA Experiment 20000478 PARAMETER Experiment Name: Zm_5mM_SA_P Parameter: Age (day) Value: 11
  misc_feature: MA Experiment 20000478 PARAMETER Experiment Name: Zm_5mM_SA_P Parameter: Organism Value: Zea mays
  misc_feature: MA Experiment 20000478 PARAMETER Experiment Name: Zm_5mM_SA_P Parameter: Plant Line Value: 35A19
  misc_feature: MA Experiment 20000478 PARAMETER Experiment Name: Zm_5mM_SA_P Parameter: Timepoint (hr) Value: 72
  misc_feature: MA Experiment 20000478 PARAMETER Experiment Name: Zm_5mM_SA_P Parameter: Tissue Value: Aerial
  misc_feature: MA Experiment 20000478 PARAMETER Experiment Name: Zm_5mM_SA_P Parameter: Treatment Value: 5mM SA vs. No Treatment
  misc_feature: MA Experiment ID: 20000487 Result: Down-regulated in Transcription
  misc_feature: MA Experiment 20000487 PARAMETER Experiment Name: Zm_50mM_NH4NO3_L_to_H_P Parameter: Organism Value: Zea mays
  misc_feature: MA Experiment 20000487 PARAMETER Experiment Name: Zm_50mM_NH4NO3_L_to_H_P Parameter: Timepoint (hr) Value: 4
  misc_feature: MA Experiment 20000487 PARAMETER Experiment Name: Zm_50mM_NH4NO3_L_to_H_P Parameter: Tissue Value: Leaves
  misc_feature: MA Experiment 20000487 PARAMETER Experiment Name: Zm_50mM_NH4NO3_L_to_H_P Parameter: Treatment Value: 50mM NH4NO3 vs. 100mM Mannitol
  misc_feature: MA Experiment ID: 20000488 Result: Down-regulated in Transcription
  misc_feature: MA Experiment 20000488 PARAMETER Experiment Name: Zm_50mM_NH4NO3_L_to_H_P Parameter: Organism Value: Zea mays
  misc_feature: MA Experiment 20000488 PARAMETER Experiment Name: Zm_50mM_NH4NO3_L_to_H_P Parameter: Timepoint (hr) Value: 8
  misc_feature: MA Experiment 20000488 PARAMETER Experiment Name: Zm_50mM_NH4NO3_L_to_H_P Parameter: Tissue Value: Leaves
  misc_feature: MA Experiment 20000488 PARAMETER Experiment Name: Zm_50mM_NH4NO3_L_to_H_P Parameter: Treatment Value: 50mM NH4NO3 vs. 100mM Mannitol
  misc_feature: MA Experiment ID: 20001606 Result: Down-regulated in Transcription
  misc_feature: MA Experiment 20001606 PARAMETER Experiment Name: Zm_50ppm_KNO3_L-to-H_P Parameter: Age (day) Value: 19
  misc_feature: MA Experiment 20001606 PARAMETER Experiment Name: Zm_50ppm_KNO3_L-to-H_P Parameter: Organism Value: Zea mays
  misc_feature: MA Experiment 20001606 PARAMETER Experiment Name: Zm_50ppm_KNO3_L-to-H_P Parameter: Plant Line Value: 35A19
  misc_feature: MA Experiment 20001606 PARAMETER Experiment Name: Zm_50ppm_KNO3_L-to-H_P Parameter: Timepoint (hr) Value: 8
  misc_feature: MA Experiment 20001606 PARAMETER Experiment Name: Zm_50ppm_KNO3_L-to-H_P Parameter: Tissue Value: Shoots
  misc_feature: MA Experiment 20001606 PARAMETER Experiment Name: Zm_50ppm_KNO3_L-to-H_P Parameter: Treatment Value: 50ppm KNO3 vs. 50ppm KCl
  misc_feature: MA Experiment ID: 20001608 Result: Down-regulated in Transcription
  misc_feature: MA Experiment 20001608 PARAMETER Experiment Name: Zm_50ppm_KNO3_L-to-H_P Parameter: Age (day) Value: 21
  misc_feature: MA Experiment 20001608 PARAMETER Experiment Name: Zm_50ppm_KNO3_L-to-H_P Parameter: Organism Value: Zea mays
  misc_feature: MA Experiment 20001608 PARAMETER Experiment Name: Zm_50ppm_KNO3_L-to-H_P Parameter: Plant Line Value: 35A19
  misc_feature: MA Experiment 20001608 PARAMETER Experiment Name: Zm_50ppm_KNO3_L-to-H_P Parameter: Timepoint (hr) Value: 48
  misc_feature: MA Experiment 20001608 PARAMETER Experiment Name: Zm_50ppm_KNO3_L-to-H_P Parameter: Tissue Value: Shoots
  misc_feature: MA Experiment 20001608 PARAMETER Experiment Name: Zm_50ppm_KNO3_L-to-H_P Parameter: Treatment Value: 50ppm KNO3 vs. 50ppm KCl
cctctccgctcgtctccgctagctagctgcaccatcgtgcatgcgttcccggccgccgcgccgcccgcctgcaggacccgcgctgccgatcgacgtcggtgcacaatgtggaactgctcgtcgctcctgctgcagtacggcgacgactacgcagccaggtgcgagagctctagttcaccggcaggagctgtgggcctggacaggatactagcggcggagtatggccggttcgattctctggacctgtcgccgccgccgccgcttcacggtcttcaggcgcagacgctttttgctattcacggttcttcagagaactgcctaggaataggcgcgaatccaatctacagcaccgaggcccggcccgcgttctcgcagctcagcttcacccagccagctgctgataccgctgcccactactcgatgaaatggacggcagcgggggagacggcgaccggtggcgggggaagccgtctcaggggatcgaagaggctcaagacaaagacgccagccacagcacaaggtccacagcaccacggccagcggtgcagtccgaaaccaacaacaagtcagtctatcaaggcaccaccatgtaagaggagccagaagctgggggacaagatcacgacgcttcagcagctagtctccccttatggcaagacggatacggcatcagtgctccacgaggcagccacctgcatcaagcacctccacgagcagatccagattctgacgccctcctaccctgaactcagttctccagcgtcacagcaggacacgggcgacgaagagggcggcgcgacgggtctgcgccggcgaggcctgtgcgtggcgtcgctgtccccggccgtcgtgcagctcgtgtcggccgaggccgcgctcggcaaccgcgacacggaagaccactggcgctggctcggcactctgtaagtctgtagccggggcggagaacgatgctgtgctgccatgcttcagttcgtagacggtaggagcacgagacatggccgcaggggttggtgtcatcaggccttcagatacagcgttagacctcaatttcactggggaaaaaataaatattactcacctgcttcgagaggttattagttagtacaatggatatattatatactacattaatacgtcaccttctgttttatccg

SEQ ID NO: 111011 - protein, 308 aa, Zea mays subsp. mays
  misc_feature (1)..(308): Ceres Seq. ID no. 15180845
  misc_feature (199)..(236): Pfam Name: Helix-loop-helix DNA-binding domain Pfam Description: Helix-loop-helix DNA-binding domain
  misc_feature (199)..(283): Homolog of NCBI NO: 18402256 NR Description: expressed protein [Arabidopsis thaliana]
  misc_feature (160)..(280): Homolog of NCBI NO: 38345410 NR Description: OSJNBa0017B10.16 [Oryza sativa (japonica
  misc_feature (198)..(283): Homolog of NCBI NO: 18390560 NR Description: expressed protein [Arabidopsis thaliana]
  misc_feature (161)..(302): Homolog of NCBI NO: 21553730 NR Description: unknown [Arabidopsis thaliana]
  misc_feature (161)..(302): Homolog of NCBI NO: 18407276 NR Description: expressed protein [Arabidopsis thaliana]
  misc_feature (169)..(280): Homolog of NCBI NO: 25403326 NR Description: protein T22C5.11 [imported] - Arabidopsis
  misc_feature (169)..(280): Homolog of NCBI NO: 15217667 NR Description: hypothetical protein [Arabidopsis thaliana]
  misc_feature (166)..(292): Homolog of NCBI NO: 21740790 NR Description: OSJNBb0091E11.4 [Oryza sativa (japonica
  misc_feature (166)..(302): Homolog of NCBI NO: 14488370 NR Description: putative ethylene-responsive protein
  misc_feature (148)..(280): Homolog of NCBI NO: 22093671 NR Description: bHLH transcription factor-like protein
PLRSSPLASCTIVHAFPAAAPPACRTRAADRRRCTMWNCSSLLLQYGDDYAARCESSSSPAGAVGLDRILAAEYGRFDSLDLSPPPPLHGLQAQTLFAIHGSSENCLGIGANPIYSTEARPAFSQLSFTQPAADTAAHYSMKWTAAGETATGGGGSRLRGSKRLKTKTPATAQGPQHHGQRCSPKPTTSQSIKAPPCKRSQKLGDKITTLQQLVSPYGKTDTASVLHEAATCIKHLHEQIQILTPSYPELSSPASQQDTGDEEGGATGLRRRGLCVASLSPAVVQLVSAEAALGNRDTEDHWRWLGTL

SEQ ID NO: 111012 - protein, 273 aa, Zea mays subsp. mays
  misc_feature (1)..(273): Ceres Seq. ID no. 15180846
  misc_feature (164)..(201): Pfam Name: Helix-loop-helix DNA-binding domain Pfam Description: Helix-loop-helix DNA-binding domain
  misc_feature (164)..(248): Homolog of NCBI NO: 18402256 NR Description: expressed protein [Arabidopsis thaliana]
  misc_feature (125)..(245): Homolog of NCBI NO: 38345410 NR Description: OSJNBa0017B10.16 [Oryza sativa (japonica
  misc_feature (163)..(248): Homolog of NCBI NO: 18390560 NR Description: expressed protein [Arabidopsis thaliana]
  misc_feature (126)..(267): Homolog of NCBI NO: 21553730 NR Description: unknown [Arabidopsis thaliana]
  misc_feature (126)..(267): Homolog of NCBI NO: 18407276 NR Description: expressed protein [Arabidopsis thaliana]
  misc_feature (134)..(245): Homolog of NCBI NO: 25403326 NR Description: protein T22C5.11 [imported] - Arabidopsis
  misc_feature (134)..(245): Homolog of NCBI NO: 15217667 NR Description: hypothetical protein [Arabidopsis thaliana]
  misc_feature (131)..(257): Homolog of NCBI NO: 21740790 NR Description: OSJNBb0091E11.4 [Oryza sativa (japonica
  misc_feature (131)..(267): Homolog of NCBI NO: 14488370 NR Description: putative ethylene-responsive protein
  misc_feature (113)..(245): Homolog of NCBI NO: 22093671 NR Description: bHLH transcription factor-like protein
MWNCSSLLLQYGDDYAARCESSSSPAGAVGLDRILAAEYGRFDSLDLSPPPPLHGLQAQTLFAIHGSSENCLGIGANPIYSTEARPAFSQLSFTQPAADTAAHYSMKWTAAGETATGGGGSRLRGSKRLKTKTPATAQGPQHHGQRCSPKPTTSQSIKAPPCKRSQKLGDKITTLQQLVSPYGKTDTASVLHEAATCIKHLHEQIQILTPSYPELSSPASQQDTGDEEGGATGLRRRGLCVASLSPAVVQLVSAEAALGNRDTEDHWRWLGTL

SEQ ID NO: 111013 - protein, 168 aa, Zea mays subsp. mays
  misc_feature (1)..(168): Ceres Seq. ID no. 15180847
  misc_feature (59)..(96): Pfam Name: Helix-loop-helix DNA-binding domain Pfam Description: Helix-loop-helix DNA-binding domain
  misc_feature (59)..(143): Homolog of NCBI NO: 18402256 NR Description: expressed protein [Arabidopsis thaliana]
  misc_feature (20)..(140): Homolog of NCBI NO: 38345410 NR Description: OSJNBa0017B10.16 [Oryza sativa (japonica
  misc_feature (58)..(143): Homolog of NCBI NO: 18390560 NR Description: expressed protein [Arabidopsis thaliana]
  misc_feature (21)..(162): Homolog of NCBI NO: 21553730 NR Description: unknown [Arabidopsis thaliana]
  misc_feature (21)..(162): Homolog of NCBI NO: 18407276 NR Description: expressed protein [Arabidopsis thaliana]
  misc_feature (29)..(140): Homolog of NCBI NO: 25403326 NR Description: protein T22C5.11 [imported] - Arabidopsis
  misc_feature (29)..(140): Homolog of NCBI NO: 15217667 NR Description: hypothetical protein [Arabidopsis thaliana]
  misc_feature (26)..(152): Homolog of NCBI NO: 21740790 NR Description: OSJNBb0091E11.4 [Oryza sativa (japonica
  misc_feature (26)..(162): Homolog of NCBI NO: 14488370 NR Description: putative ethylene-responsive protein
  misc_feature (8)..(140): Homolog of NCBI NO: 22093671 NR Description: bHLH transcription factor-like protein
MKWTAAGETATGGGGSRLRGSKRLKTKTPATAQGPQHHGQRCSPKPTTSQSIKAPPCKRSQKLGDKITTLQQLVSPYGKTDTASVLHEAATCIKHLHEQIQILTPSYPELSSPASQQDTGDEEGGATGLRRRGLCVASLSPAVVQLVSAEAALGNRDTEDHWRWLGTL

SEQ ID NO: 111014 - DNA, 1374 bp, Zea mays subsp. mays
  misc_feature (1)..(1374): Ceres Seq. ID no. 15180643
aacccacctcgccgaatcactccaccaaccacgaacctgaaaccctagccacgcccatgagcgacgacgcgaccgccgccgcgccctcttcgccgtcgacctccccttccccatcctctgcttcctcatcaggcgcctccccgtcgccttcctccccgcgcgccaagcgccgccgcaccgaccggtacgctctcggtttcgagttcgccccgcgactcgcgccctacgaactccctgaggaaccgctcctcgacaagcacaagcgcgcctggcccaactggacggagcgctccaccttggctctcctcgacgcctggggcgacagcttcgtccgcgcggggcgcagcatcatccgcgccgacgagtggctcgaggtcgcccgcctcgtgtgcgccgccgtgggccgtcccgcggggtatttctctgatgcgcagtgccgcaaccgagtggacacgcttaggaagaagtttaagaaggagagggagagagagcgccgtgccgcgcgccgctccggtccctccccttccaaatgggtttattacgacaagatggtggcaattctgtgcccgaccccgcctccgcctccgctgccgaccctgcctccgcctgcccgtccccctccgctgcctctccagttgctgcctctggtcgcaaagcgccgccgcgacaggcagccagcgcggcgctttcagtgggggatgaaagctcctgagcgtcttcttggtggtgccggagacgtcgtaggtcccagggtttcagggtcaggtgcgaagttgggtgaacttggaccgcagaaaaatagtgctgttcaagggaagcagaatggtttcatggccctcacagagtcaattcagaagtttgaggaggcttttgcgaggatggagagtagcaagaggcagcacatggtggaggtggagcaaatgaggagggatttgcaaagggacctagatgcaaagtggagggagatattggagaaggcgcaagcggagattggtcgccttagtaatgaggatggggatgaacatgatgtggacgaagatggggatgttggcgatggtaagagattggagggtggtgatgagcaaaacaatggtgctatggatgcttctccttagcatatagcctagatgcttacaaaatgaggaacaaaattggggttatcatgtcgatagatgaatccacatgatagacatgtggttatgattaactccgtagctgctgatattagtattattgtataattctcatatgtgtttcttttttttactccgcaatgctaagcaaaagattactgctattttggttactgtacatagctatttgcttaccgacgtgtgttttcaagataataatatcatttggtagctcttagtc

SEQ ID NO: 111015 - protein, 370 aa, Zea mays subsp. mays
  misc_feature (1)..(370): Ceres Seq. ID no. 15180644
  misc_feature (93)..(189): Homolog of NCBI NO: 18399118 NR Description: expressed protein [Arabidopsis thaliana]
  misc_feature (251)..(332): Homolog of NCBI NO: 34911060 NR Description: putative 6b-interacting protein 1
  misc_feature (93)..(227): Homolog of NCBI NO: 34911060 NR Description: putative 6b-interacting protein 1
  misc_feature (243)..(338): Homolog of NCBI NO: 15231799 NR Description: expressed protein [Arabidopsis thaliana]
  misc_feature (19)..(255): Homolog of NCBI NO: 15231799 NR Description: expressed protein [Arabidopsis thaliana]
  misc_feature (21)..(335): Homolog of NCBI NO: 38344545 NR Description: OSJNBa0027P08.13 [Oryza sativa (japonica
  misc_feature (19)..(333): Homolog of NCBI NO: 18149189 NR Description: 6b-interacting protein 1 [Nicotiana tabacum]
  misc_feature (276)..(362): Homolog of NCBI NO: 15230124 NR Description: expressed protein [Arabidopsis thaliana]
  misc_feature (55)..(191): Homolog of NCBI NO: 15230124 NR Description: expressed protein [Arabidopsis thaliana]
  misc_feature (11)..(353): Homolog of NCBI NO: 34910652 NR Description: P0480C01.17 [Oryza sativa (japonica
PTSPNHSTNHEPETLATPMSDDATAAAPSSPSTSPSPSSASSSGASPSPSSPRAKRRRTDRYALGFEFAPRLAPYELPEEPLLDKHKRAWPNWTERSTLALLDAWGDSFVRAGRSIIRADEWLEVARLVCAAVGRPAGYFSDAQCRNRVDTLRKKFKKERERERRAARRSGPSPSKWVYYDKMVAILCPTPPPPPLPTLPPPARPPPLPLQLLPLVAKRRRDRQPARRFQWGMKAPERLLGGAGDVVGPRVSGSGAKLGELGPQKNSAVQGKQNGFMALTESIQKFEEAFARMESSKRQHMVEVEQMRRDLQRDLDAKWREILEKAQAEIGRLSNEDGDEHDVDEDGDVGDGKRLEGGDEQNNGAMDASP

SEQ ID NO: 111016 - protein, 352 aa, Zea mays subsp. mays
  misc_feature (1)..(352): Ceres Seq. ID no. 15180645
  misc_feature (75)..(171): Homolog of NCBI NO: 18399118 NR Description: expressed protein [Arabidopsis thaliana]
  misc_feature (233)..(314): Homolog of NCBI NO: 34911060 NR Description: putative 6b-interacting protein 1
  misc_feature (75)..(209): Homolog of NCBI NO: 34911060 NR Description: putative 6b-interacting protein 1
  misc_feature (225)..(320): Homolog of NCBI NO: 15231799 NR Description: expressed protein [Arabidopsis thaliana]
  misc_feature (1)..(237): Homolog of NCBI NO: 15231799 NR Description: expressed protein [Arabidopsis thaliana]
  misc_feature (3)..(317): Homolog of NCBI NO: 38344545 NR Description: OSJNBa0027P08.13 [Oryza sativa (japonica
  misc_feature (1)..(315): Homolog of NCBI NO: 18149189 NR Description: 6b-interacting protein 1 [Nicotiana tabacum]
  misc_feature (258)..(344): Homolog of NCBI NO: 15230124 NR Description: expressed protein [Arabidopsis thaliana]
  misc_feature (37)..(173): Homolog of NCBI NO: 15230124 NR Description: expressed protein [Arabidopsis thaliana]
  misc_feature (1)..(335): Homolog of NCBI NO: 34910652 NR Description: P0480C01.17 [Oryza sativa (japonica
MSDDATAAAPSSPSTSPSPSSASSSGASPSPSSPRAKRRRTDRYALGFEFAPRLAPYELPEEPLLDKHKRAWPNWTERSTLALLDAWGDSFVRAGRSIIRADEWLEVARLVCAAVGRPAGYFSDAQCRNRVDTLRKKFKKERERERRAARRSGPSPSKWVYYDKMVAILCPTPPPPPLPTLPPPARPPPLPLQLLPLVAKRRRDRQPARRFQWGMKAPERLLGGAGDVVGPRVSGSGAKLGELGPQKNSAVQGKQNGFMALTESIQKFEEAFARMESSKRQHMVEVEQMRRDLQRDLDAKWREILEKAQAEIGRLSNEDGDEHDVDEDGDVGDGKRLEGGDEQNNGAMDASP

SEQ ID NO: 111017 - protein, 188 aa, Zea mays subsp. mays
  misc_feature (1)..(188): Ceres Seq. ID no. 15180646
  misc_feature (92)..(172): Homolog of NCBI NO: 12321891 NR Description: hypothetical protein; 14486-13072 [Arabidopsis
  misc_feature (92)..(148): Homolog of NCBI NO: 18399118 NR Description: expressed protein [Arabidopsis thaliana]
  misc_feature (69)..(150): Homolog of NCBI NO: 34911060 NR Description: putative 6b-interacting protein 1
  misc_feature (1)..(45): Homolog of NCBI NO: 34911060 NR Description: putative 6b-interacting protein 1
  misc_feature (61)..(156): Homolog of NCBI NO: 15231799 NR Description: expressed protein [Arabidopsis thaliana]
  misc_feature (1)..(73): Homolog of NCBI NO: 15231799 NR Description: expressed protein [Arabidopsis thaliana]
  misc_feature (1)..(153): Homolog of NCBI NO: 38344545 NR Description: OSJNBa0027P08.13 [Oryza sativa (japonica
  misc_feature (1)..(151): Homolog of NCBI NO: 18149189 NR Description: 6b-interacting protein 1 [Nicotiana tabacum]
  misc_feature (94)..(180): Homolog of NCBI NO: 15230124 NR Description: expressed protein [Arabidopsis thaliana]
  misc_feature (1)..(171): Homolog of NCBI NO: 34910652 NR Description: P0480C01.17 [Oryza sativa (japonica
MVAILCPTPPPPPLPTLPPPARPPPLPLQLLPLVAKRRRDRQPARRFQWGMKAPERLLGGAGDVVGPRVSGSGAKLGELGPQKNSAVQGKQNGFMALTESIQKFEEAFARMESSKRQHMVEVEQMRRDLQRDLDAKWREILEKAQAEIGRLSNEDGDEHDVDEDGDVGDGKRLEGGDEQNNGAMDASP

SEQ ID NO: 111018 - DNA, 1274 bp, Zea mays subsp. mays
  misc_feature (1)..(1274): Ceres Seq. ID no. 13624654
aggctagcccagcgctcggccctcggctccttaaggcttcatcttctcaagttccggccgtccatcgccgccgccggcctcggccggctcagttcctgcctgccagccaaaaattccacaccacccacccagagactgaggcgcgcggtggtgaagacgtgatcgaaagtcgaaaccaaaacgatatatagatggggcgcgggcgcggcaaggtggaggtgcgtcgcatcgagaacagcgtgagccggcaggtgaccttctcgaagcggcggcgcgggctggcgaagaaggcgcgggagctggccgtgctctgcgacgccgacgtcgcgctgctcgtcttctccgacaagggcagtctccacgacttcgccgcgcacggcagcatggagcgaatccttggccgatacgagaggtacttgctatgtgaagatagggacgatgtaacccaagactaccctgaagaatcgcaggggaacatgagctatgaccacatcaagttgaggtccaaactcgaagctataaagaagagccaaaggaatctcatgggggagcagctcgagtccctgacgttcagagaggtacagcagcttgagcaccggatagacagcgctctgaggaacgtcagatccaggaaggaccacatcttgctcaactcgatccaggagctccggaacaaggaaacttttctgatggaacaaaatggcattctagagaaggagaaggctgcagtgggggcatcatcatccctgcacaccaccaccagcaccgcagcagcttcttccacggcagcggcggcggcggcccttccaaacctgaacatctgtcccgacgactccgacgagccaggaatggcggcggcggcggggatcaggttgccgtggtggatgctccagccatctgccgtcagccaacggcaggaacagcactgaactgcttgtcttctcagatgatccacgctgcttgttccagctcgattctagtttctattagaactcgattcagctaaggcgggaatttgtgatctttctattgatctgccgttcttattggttgctagatcgattttatccttgtccttcttagtatctgaacctctgctgtgtcgtttgtcgtagttcttggtcgcaaaagctccggtttgcgtctctagtttggtttggttcctgtaaaatctgctgttgtccttcaatgagctgtgcaggccagttagatgattacttccaaaaaaaaaaaaaaaaaatatcgataccgtcgacctcgagggggggcccggt

SEQ ID NO: 111019 - protein, 245 aa, Zea mays subsp. mays
  misc_feature (1)..(245): Ceres Seq. ID no. 13624655
  misc_feature (91)..(176): Pfam Name: K-box region Pfam Description: K-box region
  misc_feature (4)..(233): Homolog of NCBI NO: 29372748 NR Description: putative MADS-domain transcription factor [Zea
  misc_feature (4)..(233): Homolog of NCBI NO: 6606070 NR Description: MADS14 protein [Oryza sativa]
  misc_feature (4)..(210): Homolog of NCBI NO: 11120557 NR Description: MADS box protein AP2L [Eucalyptus globulus]
  misc_feature (4)..(233): Homolog of NCBI NO: 7592642 NR Description: AP1-like MADS box protein [Oryza sativa]
  misc_feature (4)..(233): Homolog of NCBI NO: 12019658 NR Description: FDRMADS6 [Oryza sativa]
  misc_feature (4)..(236): Homolog of NCBI NO: 6175371 NR Description: MADS box transcription factor MADS18 [Oryza
  misc_feature (4)..(233): Homolog of NCBI NO: 21070923 NR Description: AP1-like MADS-box protein [Oryza sativa (japonica
  misc_feature (4)..(236): Homolog of NCBI NO: 6006607 NR Description: MADS box protein, MADS28 [Oryza sativa (japonica
  misc_feature (4)..(234): Homolog of NCBI NO: 29372774 NR Description: putative MADS-domain transcription factor [Zea
  misc_feature (4)..(237): Homolog of NCBI NO: 29825728 NR Description: MADS20 [Oryza sativa (japonica cultivar-group)]
MGRGRGKVEVRRIENSVSRQVTFSKRRRGLAKKARELAVLCDADVALLVFSDKGSLHDFAAHGSMERILGRYERYLLCEDRDDVTQDYPEESQGNMSYDHIKLRSKLEAIKKSQRNLMGEQLESLTFREVQQLEHRIDSALRNVRSRKDHILLNSIQELRNKETFLMEQNGILEKEKAAVGASSSLHTTTSTAAASSTAAAAAALPNLNICPDDSDEPGMAAAAGIRLPWWMLQPSAVSQRQEQH

SEQ ID NO: 111020 - protein, 181 aa, Zea mays subsp. mays
  misc_feature (1)..(181): Ceres Seq. ID no. 13624656
  misc_feature (27)..(112): Pfam Name: K-box region Pfam Description: K-box region
  misc_feature (1)..(169): Homolog of NCBI NO: 29372748 NR Description: putative MADS-domain transcription factor [Zea
  misc_feature (1)..(169): Homolog of NCBI NO: 6606070 NR Description: MADS14 protein [Oryza sativa]
  misc_feature (1)..(146): Homolog of NCBI NO: 11120557 NR Description: MADS box protein AP2L [Eucalyptus globulus]
  misc_feature (1)..(169): Homolog of NCBI NO: 7592642 NR Description: AP1-like MADS box protein [Oryza sativa]
  misc_feature (1)..(169): Homolog of NCBI NO: 12019658 NR Description: FDRMADS6 [Oryza sativa]
  misc_feature (1)..(172): Homolog of NCBI NO: 6175371 NR Description: MADS box transcription factor MADS18 [Oryza
  misc_feature (1)..(169): Homolog of NCBI NO: 21070923 NR Description: AP1-like MADS-box protein [Oryza sativa (japonica
  misc_feature (1)..(172): Homolog of NCBI NO: 6006607 NR Description: MADS box protein, MADS28 [Oryza sativa (japonica
  misc_feature (1)..(170): Homolog of NCBI NO: 29372774 NR Description: putative MADS-domain transcription factor [Zea
  misc_feature (1)..(173): Homolog of NCBI NO: 29825728 NR Description: MADS20 [Oryza sativa (japonica cultivar-group)]
MERILGRYERYLLCEDRDDVTQDYPEESQGNMSYDHIKLRSKLEAIKKSQRNLMGEQLESLTFREVQQLEHRIDSALRNVRSRKDHILLNSIQELRNKETFLMEQNGILEKEKAAVGASSSLHTTTSTAAASSTAAAAAALPNLNICPDDSDEPGMAAAAGIRLPWWMLQPSAVSQRQEQH

SEQ ID NO: 111021 - protein, 150 aa, Zea mays subsp. mays
  misc_feature (1)..(150): Ceres Seq. ID no. 13624657
  misc_feature (1)..(81): Pfam Name: K-box region Pfam Description: K-box region
  misc_feature (1)..(138): Homolog of NCBI NO: 29372748 NR Description: putative MADS-domain transcription factor [Zea
  misc_feature (1)..(138): Homolog of NCBI NO: 6606070 NR Description: MADS14 protein [Oryza sativa]
  misc_feature (1)..(115): Homolog of NCBI NO: 11120557 NR Description: MADS box protein AP2L [Eucalyptus globulus]
  misc_feature (1)..(138): Homolog of NCBI NO: 7592642 NR Description: AP1-like MADS box protein [Oryza sativa]
  misc_feature (1)..(138): Homolog of NCBI NO: 12019658 NR Description: FDRMADS6 [Oryza sativa]
  misc_feature (1)..(141): Homolog of NCBI NO: 6175371 NR Description: MADS box transcription factor MADS18 [Oryza
  misc_feature (1)..(138): Homolog of NCBI NO: 21070923 NR Description: AP1-like MADS-box protein [Oryza sativa (japonica
  misc_feature (1)..(141): Homolog of NCBI NO: 6006607 NR Description: MADS box protein, MADS28 [Oryza sativa (japonica
  misc_feature (1)..(139): Homolog of NCBI NO: 29372774 NR Description: putative MADS-domain transcription factor [Zea
  misc_feature (1)..(142): Homolog of NCBI NO: 29825728 NR Description: MADS20 [Oryza sativa (japonica cultivar-group)]
MSYDHIKLRSKLEAIKKSQRNLMGEQLESLTFREVQQLEHRIDSALRNVRSRKDHILLNSIQELRNKETFLMEQNGILEKEKAAVGASSSLHTTTSTAAASSTAAAAAALPNLNICPDDSDEPGMAAAAGIRLPWWMLQPSAVSQRQEQH

SEQ ID NO: 111022 - DNA, 513 bp, Zea mays subsp. mays
  misc_feature (1)..(513): Ceres Seq. ID no. 13622704
catttttcctccgttccattcttctcttctctcctcgcctcccctcttgaaccctccgccgctccgaggaaaatccgatttgaattgaaaatcatccggagacagagatcttttcttcctcgaagctatcttctctctcgactcgatccatagctgctcgcgtccctgttcctcgccggctggcaagtggcggcgacgggacgaggtcttcatcgcctcctcgcgagcgacgatcacccactagtttggtcggtctgaggcacatgatgatggccaacgcgaagctccacaagcaggccctgctgccgccgcggagccccttcccgacggcggcgccgtacgccgaccgcggcccaatcgcgcggccgcaggttggcgccacgcaccaccgccacggccaccaccagcgcacgtcgtccgagagcttcatcgaggagcagccgccgtcgtggctcgacgacctgctcaacgagccagagacgcccgcggcgcggcagagcggccgggctgggc

SEQ ID NO: 111023 - protein, 83 aa, Zea mays subsp. mays
  misc_feature (1)..(83): Ceres Seq. ID no. 13622705
  misc_feature (10)..(80): Homolog of NCBI NO: 27311723 NR Description: Unknown protein [Arabidopsis thaliana]
  misc_feature (10)..(80): Homolog of NCBI NO: 25404190 NR Description: hypothetical protein T18I24.3 [imported] -
  misc_feature (10)..(80): Homolog of NCBI NO: 30696210 NR Description: bZIP family transcription factor [Arabidopsis
  misc_feature (10)..(80): Homolog of NCBI NO: 28393180 NR Description: putative bZIP family transcription factor
  misc_feature (10)..(80): Homolog of NCBI NO: 30680232 NR Description: bZIP transcriptional activator protein -related
MMMANAKLHKQALLPPRSPFPTAAPYADRGPIARPQVGATHHRHGHHQRTSSESFIEEQPPSWLDDLLNEPETPAARQSGRAG

SEQ ID NO: 111024 - protein, 82 aa, Zea mays subsp. mays
  misc_feature (1)..(82): Ceres Seq. ID no. 13622706
  misc_feature (9)..(79): Homolog of NCBI NO: 25404190 NR Description: hypothetical protein T18I24.3 [imported] -
  misc_feature (9)..(79): Homolog of NCBI NO: 30696210 NR Description: bZIP family transcription factor [Arabidopsis
  misc_feature (9)..(79): Homolog of NCBI NO: 28393180 NR Description: putative bZIP family transcription factor
  misc_feature (9)..(79): Homolog of NCBI NO: 30680232 NR Description: bZIP transcriptional activator protein -related
  misc_feature (9)..(79): Homolog of NCBI NO: 27311723 NR Description: Unknown protein [Arabidopsis thaliana]
MMANAKLHKQALLPPRSPFPTAAPYADRGPIARPQVGATHHRHGHHQRTSSESFIEEQPPSWLDDLLNEPETPAARQSGRAG

SEQ ID NO: 111025 - protein, 81 aa, Zea mays subsp. mays
  misc_feature (1)..(81): Ceres Seq. ID no. 13622707
  misc_feature (8)..(78): Homolog of NCBI NO: 25404190 NR Description: hypothetical protein T18I24.3 [imported] -
  misc_feature (8)..(78): Homolog of NCBI NO: 30696210 NR Description: bZIP family transcription factor [Arabidopsis
  misc_feature (8)..(78): Homolog of NCBI NO: 28393180 NR Description: putative bZIP family transcription factor
  misc_feature (8)..(78): Homolog of NCBI NO: 30680232 NR Description: bZIP transcriptional activator protein -related
  misc_feature (8)..(78): Homolog of NCBI NO: 27311723 NR Description: Unknown protein [Arabidopsis thaliana]
MANAKLHKQALLPPRSPFPTAAPYADRGPIARPQVGATHHRHGHHQRTSSESFIEEQPPSWLDDLLNEPETPAARQSGRAG

SEQ ID NO: 111026 - DNA, 2209 bp, Zea mays subsp. mays
  misc_feature (1)..(2209): Ceres Seq. ID no. 15180683
aatcttcgggtcaacggtttcgatggaaacccagtgagacactgcggccttcgcccttccatcttcatccagctggggaagataaccctccgatccggcgcaggcatgcttaatctgtccaggtataaagcacaaaaaagtgatcctctcatctaattgagactgttgagtatctcacatattcttgtgcttgcttgctgggatcggctttggctcaggagcatgagcgaaaagatatgattcttcatttctccttctggctataagttttagtttctttatgatgggaaataaaactggtaagcctgtcttcagtgagctcaaatccacagagtttagtttattggagagcactctagtacaggatcattgtgcaatcccgacttgtgtaccattggattttctgaaggccatcacgagtgatttctctaaggagcaagagctaggaagaggtgggtttggagttgtttataagggccttcttaaaaatgggaaggcgatagctgtgaagaagctttctgaaatgaacctagatgacgatcagttccataatgaagttacttatcttttcgggttgaagcacaaaaatattgtccagctaaaagcttattgtgctgaatcacggtgggaagcaatcgaattgcgcagaaaatatgtcatggctgaatctcggaaaaggctgctgtgctttgagtgtataaataataagagccttgataagcacctttctgctgaatctcatggggttgagtggcatatcagatatgagataatcaaaggaatttgccatggtttgcattaccttcacacagattgccaaattgtccatttggacctaaagcctgagaatatattgctagatgacaacatggagccaaaaattacagattttggtatgtccaggctctttggtctacaacaatccaaaatcatcaccaaaacttgtggaggaacacttggatacatggcaccagaatacttactaaaagggttgatttcagtgaaggccgacatattcagtttgggcgttataatcatagaggtgatgaccggaggccggaattatcccacttgtgaaaaatcttgcgagcaattcgctgttgatgtggttggacgttggaggaagaggttattggaggaggcaggaaggtacacacccttggaaaaatacgttgagcaagtagagacatgcatcttgataggattgatgtgtgtcgatgatgatcctaacaaaaggcccacgacattggacattatcgaaaggcttaccaaagtagatgtcacgaacacggacagagggccacccaaaactctggaggccgcgacagggcttacaggccaccccaacctcgcaactagatcatttcttgacaggttccgccgaaccatcgtgatagggatgctgaagaaggccctgaaaatccaggacgtatcgcagttggagcagctcctggccaaggaggtgctgctggagctccacaaaatcggcacgaatgcaactggaaacagatcgttcctggagaggctccacgcaagcatcaccatggctacgctggttcaggcgctgcattccttggacttggatccatcggcggcgctgcgtatggaggtgctgttcttggcgctggagaatatgcgtggaaaaaacaactcaaggcgaagaagcgaggacgtccttgagctggaggagcggccagagcagatccggtcggtgctggaggctggcaccagggccaggctcagtgatgaggaacacatgccgtcggtgtctgtgcaggctgaagaccaggcctttcccaaaccgaagttggccaaagtacgcgccaccgccccggtgtgcgtgtcagcagtgtggttggcggccggcataggattcctgtgtggattcaccctaggagagatgaggggattaaggtggacgagggtccacgaacgcacgtgatgccaatgtgcccacatgacatggccagaaaatgtcactgcggtggaccatgcatgcacgaattaaggagcaccagttagaatacgtattctagattcattttacaaattctgtatttaaaaggaacttgtgcattgtgacagaggcggcggactggatcaggttgtattgtttctgctggtgtcctggcgtatgtataagccacggagtgtatcggatgaaattgaacagagaaatgtgcaatatagaaccgtgttgagggcagtc

SEQ ID NO: 111027 - protein, 553 aa, Zea mays subsp. mays
  misc_feature (1)..(553): Ceres Seq. ID no. 15180684
  misc_feature (165)..(334): Homolog of NCBI NO: 38344522 NR Description: OSJNBa0016N04.15 [Oryza sativa (japonica
  misc_feature (41)..(392): Homolog of NCBI NO: 21728344 NR Description: stem rust resistance protein Rpg1
  misc_feature (41)..(392): Homolog of NCBI NO: 21929729 NR Description: barley stem rust resistance protein
  misc_feature (41)..(392): Homolog of NCBI NO: 21929723 NR Description: barley stem rust resistance protein
  misc_feature (4)..(341): Homolog of NCBI NO: 21929729 NR Description: barley stem rust resistance protein
  misc_feature (4)..(341): Homolog of NCBI NO: 21929723 NR Description: barley stem rust resistance protein
  misc_feature (4)..(341): Homolog of NCBI NO: 21728344 NR Description: stem rust resistance protein Rpg1
  misc_feature (39)..(113): Homolog of NCBI NO: 37532178 NR Description: putative receptor-like protein kinase
  misc_feature (142)..(329): Homolog of NCBI NO: 37532178 NR Description: putative receptor-like protein kinase
  misc_feature (23)..(333): Homolog of NCBI NO: 38344521 NR Description: OSJNBa0016N04.14 [Oryza sativa (japonica
MMGNKTGKPVFSELKSTEFSLLESTLVQDHCAIPTCVPLDFLKAITSDFSKEQELGRGGFGVVYKGLLKNGKAIAVKKLSEMNLDDDQFHNEVTYLFGLKHKNIVQLKAYCAESRWEAIELRRKYVMAESRKRLLCFECINNKSLDKHLSAESHGVEWHIRYEIIKGICHGLHYLHTDCQIVHLDLKPENILLDDNMEPKITDFGMSRLFGLQQSKIITKTCGGTLGYMAPEYLLKGLISVKADIFSLGVIIIEVMTGGRNYPTCEKSCEQFAVDVVGRWRKRLLEEAGRYTPLEKYVEQVETCILIGLMCVDDDPNKRPTTLDIIERLTKVDVTNTDRGPPKTLEAATGLTGHPNLATRSFLDRFRRTIVIGMLKKALKIQDVSQLEQLLAKEVLLELHKIGTNATGNRSFLERLHASITMATLVQALHSLDLDPSAALRMEVLFLALENMRGKNNSRRRSEDVLELEERPEQIRSVLEAGTRARLSDEEHMPSVSVQAEDQAFPKPKLAKVRATAPVCVSAVWLAAGIGFLCGFTLGEMRGLRWTRVHERT

SEQ ID NO: 111028 - protein, 552 aa, Zea mays subsp. mays
  misc_feature (1)..(552): Ceres Seq. ID no. 15180685
  misc_feature (164)..(333): Homolog of NCBI NO: 38344522 NR Description: OSJNBa0016N04.15 [Oryza sativa (japonica
  misc_feature (40)..(391): Homolog of NCBI NO: 21728344 NR Description: stem rust resistance protein Rpg1
  misc_feature (40)..(391): Homolog of NCBI NO: 21929729 NR Description: barley stem rust resistance protein
  misc_feature (40)..(391): Homolog of NCBI NO: 21929723 NR Description: barley stem rust resistance protein
  misc_feature (3)..(340): Homolog of NCBI NO: 21929729 NR Description: barley stem rust resistance protein
  misc_feature (3)..(340): Homolog of NCBI NO: 21929723 NR Description: barley stem rust resistance protein
  misc_feature (3)..(340): Homolog of NCBI NO: 21728344 NR Description: stem rust resistance protein Rpg1
  misc_feature (38)..(112): Homolog of NCBI NO: 37532178 NR Description: putative receptor-like protein kinase
  misc_feature (141)..(328): Homolog of NCBI NO: 37532178 NR Description: putative receptor-like protein kinase
  misc_feature (22)..(332): Homolog of NCBI NO: 38344521 NR Description: OSJNBa0016N04.14 [Oryza sativa (japonica
MGNKTGKPVFSELKSTEFSLLESTLVQDHCAIPTCVPLDFLKAITSDFSKEQELGRGGFGVVYKGLLKNGKAIAVKKLSEMNLDDDQFHNEVTYLFGLKHKNIVQLKAYCAESRWEAIELRRKYVMAESRKRLLCFECINNKSLDKHLSAESHGVEWHIRYEIIKGICHGLHYLHTDCQIVHLDLKPENILLDDNMEPKITDFGMSRLFGLQQSKIITKTCGGTLGYMAPEYLLKGLISVKADIFSLGVIIIEVMTGGRNYPTCEKSCEQFAVDVVGRWRKRLLEEAGRYTPLEKYVEQVETCILIGLMCVDDDPNKRPTTLDIIERLTKVDVTNTDRGPPKTLEAATGLTGHPNLATRSFLDRFRRTIVIGMLKKALKIQDVSQLEQLLAKEVLLELHKIGTNATGNRSFLERLHASITMATLVQALHSLDLDPSAALRMEVLFLALENMRGKNNSRRRSEDVLELEERPEQIRSVLEAGTRARLSDEEHMPSVSVQAEDQAFPKPKLAKVRATAPVCVSAVWLAAGIGFLCGFTLGEMRGLRWTRVHERT

SEQ ID NO: 111029 - protein, 472 aa, Zea mays subsp. mays
  misc_feature (1)..(472): Ceres Seq. ID no. 15180686
  misc_feature (84)..(253): Homolog of NCBI NO: 38344522 NR Description: OSJNBa0016N04.15 [Oryza sativa (japonica
  misc_feature (1)..(311): Homolog of NCBI NO: 21728344 NR Description: stem rust resistance protein Rpg1
  misc_feature (1)..(311): Homolog of NCBI NO: 21929729 NR Description: barley stem rust resistance protein
  misc_feature (1)..(311): Homolog of NCBI NO: 21929723 NR Description: barley stem rust resistance protein
  misc_feature (1)..(260): Homolog of NCBI NO: 21929723 NR Description: barley stem rust resistance protein
  misc_feature (1)..(260): Homolog of NCBI NO: 21929729 NR Description: barley stem rust resistance protein
  misc_feature (1)..(260): Homolog of NCBI NO: 21728344 NR Description: stem rust resistance protein Rpg1
  misc_feature (1)..(32): Homolog of NCBI NO: 37532178 NR Description: putative receptor-like protein kinase
  misc_feature (61)..(248): Homolog of NCBI NO: 37532178 NR Description: putative receptor-like protein kinase
  misc_feature (1)..(252): Homolog of NCBI NO: 38344521 NR Description: OSJNBa0016N04.14 [Oryza sativa (japonica
MNLDDDQFHNEVTYLFGLKHKNIVQLKAYCAESRWEAIELRRKYVMAESRKRLLCFECINNKSLDKHLSAESHGVEWHIRYEIIKGICHGLHYLHTDCQIVHLDLKPENILLDDNMEPKITDFGMSRLFGLQQSKIITKTCGGTLGYMAPEYLLKGLISVKADIFSLGVIIIEVMTGGRNYPTCEKSCEQFAVDVVGRWRKRLLEEAGRYTPLEKYVEQVETCILIGLMCVDDDPNKRPTTLDIIERLTKVDVTNTDRGPPKTLEAATGLTGHPNLATRSFLDRFRRTIVIGMLKKALKIQDVSQLEQLLAKEVLLELHKIGTNATGNRSFLERLHASITMATLVQALHSLDLDPSAALRMEVLFLALENMRGKNNSRRRSEDVLELEERPEQIRSVLEAGTRARLSDEEHMPSVSVQAEDQAFPKPKLAKVRATAPVCVSAVWLAAGIGFLCGFTLGEMRGLRWTRVHERT

SEQ ID NO: 111030 - DNA, 1017 bp, Zea mays subsp. mays
  misc_feature (1)..(1017): Ceres Seq. ID no. 14305069
  misc_feature: MA Experiment ID: 108523 Result: Down-regulated in Transcription
  misc_feature: MA Experiment 108523 PARAMETER Experiment Name: Zm_42deg_Heat_P Parameter: Age (day) Value: 8
  misc_feature: MA Experiment 108523 PARAMETER Experiment Name: Zm_42deg_Heat_P Parameter: Organism Value: Zea mays
  misc_feature: MA Experiment 108523 PARAMETER Experiment Name: Zm_42deg_Heat_P Parameter: Plant Line Value: 35A19
  misc_feature: MA Experiment 108523 PARAMETER Experiment Name: Zm_42deg_Heat_P Parameter: Temperature (deg C) Value: 42 vs. 22
  misc_feature: MA Experiment 108523 PARAMETER Experiment Name: Zm_42deg_Heat_P Parameter: Timepoint (hr) Value: 6
  misc_feature: MA Experiment 108523 PARAMETER Experiment Name: Zm_42deg_Heat_P Parameter: Tissue Value: Aerial
  misc_feature: MA Experiment ID: 108527 Result: Down-regulated in Transcription
  misc_feature: MA Experiment 108527 PARAMETER Experiment Name: Zm_5mM_NO_P Parameter: Age (day) Value: 8
  misc_feature: MA Experiment 108527 PARAMETER Experiment Name: Zm_5mM_NO_P Parameter: Organism Value: Zea mays
  misc_feature: MA Experiment 108527 PARAMETER Experiment Name: Zm_5mM_NO_P Parameter: Plant Line Value: 35A19
  misc_feature: MA Experiment 108527 PARAMETER Experiment Name: Zm_5mM_NO_P Parameter: Timepoint (hr) Value: 6
  misc_feature: MA Experiment 108527 PARAMETER Experiment Name: Zm_5mM_NO_P Parameter: Tissue Value: Aerial
  misc_feature: MA Experiment 108527 PARAMETER Experiment Name: Zm_5mM_NO_P Parameter: Treatment Value: 5mM NO vs. No Treatment
  misc_feature: MA Experiment ID: 108528 Result: Up-regulated in Transcription
  misc_feature: MA Experiment 108528 PARAMETER Experiment Name: Zm_Imbibed_Seeds_P Parameter: Age (day) Value: 5 vs. 2
  misc_feature: MA Experiment 108528 PARAMETER Experiment Name: Zm_Imbibed_Seeds_P Parameter: Organism Value: Zea mays
  misc_feature: MA Experiment 108528 PARAMETER Experiment Name: Zm_Imbibed_Seeds_P Parameter: Plant Line Value: 35A19
  misc_feature: MA Experiment 108528 PARAMETER Experiment Name: Zm_Imbibed_Seeds_P Parameter: Tissue Value: Aerial vs. Embryo
  misc_feature: MA Experiment ID: 108530 Result: Up-regulated in Transcription
  misc_feature: MA Experiment 108530 PARAMETER Experiment Name: Zm_Imbibed_Seeds_P Parameter: Age (day) Value: 6 vs. 2
  misc_feature: MA Experiment 108530 PARAMETER Experiment Name: Zm_Imbibed_Seeds_P Parameter: Organism Value: Zea mays
  misc_feature: MA Experiment 108530 PARAMETER Experiment Name: Zm_Imbibed_Seeds_P Parameter: Plant Line Value: 35A19
  misc_feature: MA Experiment 108530 PARAMETER Experiment Name: Zm_Imbibed_Seeds_P Parameter: Tissue Value: Aerial vs. Embryo
  misc_feature: MA Experiment ID: 108535 Result: Up-regulated in Transcription
  misc_feature: MA Experiment 108535 PARAMETER Experiment Name: Zm_Meristem_P Parameter: Age (day) Value: 8
  misc_feature: MA Experiment 108535 PARAMETER Experiment Name: Zm_Meristem_P Parameter: Organism Value: Zea mays
  misc_feature: MA Experiment 108535 PARAMETER Experiment Name: Zm_Meristem_P Parameter: Plant Line Value: 35A19
  misc_feature: MA Experiment 108535 PARAMETER Experiment Name: Zm_Meristem_P Parameter: Tissue Value: Root Meristem vs. Above Root Meristem
  misc_feature: MA Experiment ID: 108546 Result: Down-regulated in Transcription
  misc_feature: MA Experiment 108546 PARAMETER Experiment Name: Zm_Imbibed_Seeds_P Parameter: Age (day) Value: 3 vs. 2
  misc_feature: MA Experiment 108546 PARAMETER Experiment Name: Zm_Imbibed_Seeds_P Parameter: Organism Value: Zea mays
  misc_feature: MA Experiment 108546 PARAMETER Experiment Name: Zm_Imbibed_Seeds_P Parameter: Plant Line Value: 35A19
  misc_feature: MA Experiment 108546 PARAMETER Experiment Name: Zm_Imbibed_Seeds_P Parameter: Tissue Value: Roots vs. Embryo
  misc_feature: MA Experiment ID: 108547 Result: Up-regulated in Transcription
  misc_feature: MA Experiment 108547 PARAMETER Experiment Name: Zm_Imbibed_Seeds_P Parameter: Age (day) Value: 4 vs. 2
  misc_feature: MA Experiment 108547 PARAMETER Experiment Name: Zm_Imbibed_Seeds_P Parameter: Organism Value: Zea mays
  misc_feature: MA Experiment 108547 PARAMETER Experiment Name: Zm_Imbibed_Seeds_P Parameter: Plant Line Value: 35A19
  misc_feature: MA Experiment 108547 PARAMETER Experiment Name: Zm_Imbibed_Seeds_P Parameter: Tissue Value: Aerial vs. Embryo
  misc_feature: MA Experiment ID: 108559 Result: Down-regulated in Transcription
  misc_feature: MA Experiment 108559 PARAMETER Experiment Name: Zm_5mM_NO_P Parameter: Age (day) Value: 8
  misc_feature: MA Experiment 108559 PARAMETER Experiment Name: Zm_5mM_NO_P Parameter: Organism Value: Zea mays
  misc_feature: MA Experiment 108559 PARAMETER Experiment Name: Zm_5mM_NO_P Parameter: Plant Line Value: 35A19
  misc_feature: MA Experiment 108559 PARAMETER Experiment Name: Zm_5mM_NO_P Parameter: Timepoint (hr) Value: 12
  misc_feature: MA Experiment 108559 PARAMETER Experiment Name: Zm_5mM_NO_P Parameter: Tissue Value: Aerial
  misc_feature: MA Experiment 108559 PARAMETER Experiment Name: Zm_5mM_NO_P Parameter: Treatment Value: 5mM NO vs. No Treatment
  misc_feature: MA Experiment ID: 20000535 Result: Up-regulated in Transcription
  misc_feature: MA Experiment 20000535 PARAMETER Experiment Name: Zm_Hybrid_Seed_Dev_P Parameter: DAP Value: 30 vs. 12
  misc_feature: MA Experiment 20000535 PARAMETER Experiment Name: Zm_Hybrid_Seed_Dev_P Parameter: Organism Value: Zea mays
  misc_feature: MA Experiment 20000535 PARAMETER Experiment Name: Zm_Hybrid_Seed_Dev_P Parameter: Plant Line Value: 35A19
  misc_feature: MA Experiment 20000535 PARAMETER Experiment Name: Zm_Hybrid_Seed_Dev_P Parameter: Tissue Value: Embryo vs. Unfert Floret
accccttcacttgcttggtcttccactcacccctctctcgttattcacccggtctcctctcctgcaaagaggaagatgagctcgctacacgccacacgagcggagcttggcctggttgtcctgtacctgaacaaagccgaggcccgggacaagatctgcagggcgatccagtacggctccaagttcgtaagcaacgggcagcctggcactgcgcaggaggtcgacagatcgaccaccttggctcgcaaagtcttccggctcctcaagtgggtcaatgatctgcatgctcttatcagcccgccggccaaagggactccgctcaccctcgttctgcttggcaaatccaaaaacgcgctgctttcgacgttcttgttcttggatcagtttgtgtggctcggacgaacggggatcgtcaagaacaaggaggcgacggaccgcgttgccaggttatccctgtactgctggatggcttcttctgcctgtgcaggtctagttgagcttggagagcttaaaaggctatcgagatcgatgaggaagcttgcaagagagctgagggacacagataaatatgagaacgagcagtaccaggacaaaatgaggcagtcagatgaacggctcctggccctggtcaaggcggccatggacgtggtcgtggccgtcgggcttcttcagctggcgcccaagaaggtcactccgagagtgacaggagcctttgggttcgtcacctcgcttatctcctgctatcagcaacttccttcccgcgctcctgttgccaaagtcaaagtttgagaggtgtcgccgtcctagtaaaaaaaaaagaggcgacgctggaaatcgatctctgcttcaacaatggatcgtaatataattttattatgcgaatataaggcaggctagctatgtattttttttattaaaaaaatagtacaacaaaatagaacaccagtgattgcacgtatgggcttatcactatcttctctttttgcctagcaatggacaagtaatgttcacgtgatc

SEQ ID NO: 111031 - protein, 262 aa, Zea mays subsp. mays
  misc_feature (1)..(262): Ceres Seq. ID no. 14305070
  misc_feature (36)..(251): Pfam Name: Peroxisomal biogenesis factor 11 (PEX11) Pfam Description: Peroxisomal biogenesis factor 11 (PEX11)
  misc_feature (156)..(257): Homolog of NCBI NO: 14335058 NR Description: At2g45740/F4I18.28 [Arabidopsis thaliana]
  misc_feature (26)..(254): Homolog of NCBI NO: 11358250 NR Description: hypothetical protein T27I15_160 - Arabidopsis
  misc_feature (26)..(254): Homolog of NCBI NO: 30695340 NR Description: expressed protein [Arabidopsis thaliana]
  misc_feature (27)..(249): Homolog of NCBI NO: 7486466 NR Description: hypothetical protein At2g45740 [imported] -
  misc_feature (26)..(256): Homolog of NCBI NO: 34898026 NR Description: ESTs AU064537(E31904),AU082147(E31904) correspond a region of the predicted gene.~Similar to Arabidopsis thaliana
  misc_feature (26)..(255): Homolog of NCBI NO: 25553559 NR Description: OSJNBa0038F22.7 [Oryza sativa (japonica
  misc_feature (27)..(257): Homolog of NCBI NO: 18406877 NR Description: expressed protein [Arabidopsis thaliana]
  misc_feature (26)..(253): Homolog of NCBI NO: 8489788 NR Description: unknown [Lycopersicon esculentum]
  misc_feature (26)..(260): Homolog of NCBI NO: 18378887 NR Description: expressed protein [Arabidopsis thaliana]
TPSLAWSSTHPSLVIHPVSSPAKRKMSSLHATRAELGLVVLYLNKAEARDKICRAIQYGSKFVSNGQPGTAQEVDRSTTLARKVFRLLKWVNDLHALISPPAKGTPLTLVLLGKSKNALLSTFLFLDQFVWLGRTGIVKNKEATDRVARLSLYCWMASSACAGLVELGELKRLSRSMRKLARELRDTDKYENEQYQDKMRQSDERLLALVKAAMDVVVAVGLLQLAPKKVTPRVTGAFGFVTSLISCYQQLPSRAPVAKVKV

SEQ ID NO: 111032 - protein, 237 aa, Zea mays subsp. mays
  misc_feature (1)..(237): Ceres Seq. ID no. 14305071
  misc_feature (11)..(226): Pfam Name: Peroxisomal biogenesis factor 11 (PEX11) Pfam Description: Peroxisomal biogenesis factor 11 (PEX11)
  misc_feature (131)..(232): Homolog of NCBI NO: 14335058 NR Description: At2g45740/F4I18.28 [Arabidopsis thaliana]
  misc_feature (1)..(229): Homolog of NCBI NO: 11358250 NR Description: hypothetical protein T27I15_160 - Arabidopsis
  misc_feature (1)..(229): Homolog of NCBI NO: 30695340 NR Description: expressed protein [Arabidopsis thaliana]
  misc_feature (2)..(224): Homolog of NCBI NO: 7486466 NR Description: hypothetical protein At2g45740 [imported] -
  misc_feature (1)..(231): Homolog of NCBI NO: 34898026 NR Description: ESTs AU064537(E31904),AU082147(E31904) correspond a region of the predicted gene.~Similar to Arabidopsis thaliana
  misc_feature (1)..(230): Homolog of NCBI NO: 25553559 NR Description: OSJNBa0038F22.7 [Oryza sativa (japonica
  misc_feature (2)..(232): Homolog of NCBI NO: 18406877 NR Description: expressed protein [Arabidopsis thaliana]
  misc_feature (1)..(228): Homolog of NCBI NO: 8489788 NR Description: unknown [Lycopersicon esculentum]
  misc_feature (1)..(235): Homolog of NCBI NO: 18378887 NR Description: expressed protein [Arabidopsis thaliana]
MSSLHATRAELGLVVLYLNKAEARDKICRAIQYGSKFVSNGQPGTAQEVDRSTTLARKVFRLLKWVNDLHALISPPAKGTPLTLVLLGKSKNALLSTFLFLDQFVWLGRTGIVKNKEATDRVARLSLYCWMASSACAGLVELGELKRLSRSMRKLARELRDTDKYENEQYQDKMRQSDERLLALVKAAMDVVVAVGLLQLAPKKVTPRVTGAFGFVTSLISCYQQLPSRAPVAKVKV

SEQ ID NO: 111033 - DNA, 1690 bp, Zea mays subsp. mays
  misc_feature (1)..(1690): Ceres Seq. ID no. 15180288
acagaatcacatcttcctggccgccatccgccggacggagcaccggacccgccgtacgcctccgtgctctcgctcgccgaggcctctccgcgggccgcagcgcggttccgcctcggtggccgccggagctgctgcctggccacaagaagccgtcgctctcccagctttgaaccggttccgatccgcaccacggagaagcccccgcctcgggagtctcgcgtcgccccgatgaaggtggagctcgccgcgcacctcccagacgagcacgcccctgccgccgtcccctgaagccgcttctgcgtcgcccctggcggaggatgcgctgctccttcccgacgcgggcgtgcggcgccgggcggcgtgcgggcggttcgcgcagcgcagcggctccttccgccgcgaagtcggccgggccgccgccgagaccttcctcctcacgaggctcaccctgatcctcctccgctacctcgggctacagatggattcggcagttcctagccctctgctgttataccctcttgctgatgccaggttttattcaagttgtatattattatttcttctctagccaagttcatagaagtgttgtatatggagatcagccaagaaacagattggacctgtatatgcccactagtacaacagggttaaagccggtcgttgcgtttgtgactggtggagcgtggatcataggttacaaagggtggggagcccttttaggcagacgcttagcagaaaggggcatcatagttgcatgcattgattacagaaactttcctcaagggactattggtgacatggtagaagatgcttctcaaggaatagcttttgtctgcaagaatataacaagttatggaggtgatcctagcaggatatatcttgttggacaatcagctggtgcacatattgctgcttgtgctctcttaaatcaggccattagagaatccggtgaaggagatacttcctcttggagtgtatcacagctaaaagcttactttggtatttctggcgggtacaacctccttaacttggttgatcattttcatagacgtggcctttaccggtctatctttctcaggttcactgttagtatttgttcatgtcttgtaataaaatcgtgatcatgtgagtgtattgtgacttcattttgatcatatacttgcagtatcatggaaggtgaagtatcactccagaaattctctccacaaatgatgattatggagtcatctgctaggtctgcagtttctttattgcctcgcatcatccttttccacggaacaagtgattattcaatacctccagctgaaagccaagcatttgctgatgctttacaacagcaaggcgcaagggcagatctatttctgtacgaagggaagacgcatactgatttgttccttcaggatcctcttcggggcggcagagataaaatgctggaagagatcgcccgtgtgatacacagtgaggatccagacgctgctgcccagcacctcgtcgttgtgcctgttgcaaggcaccttgtacccgagttcatgctgaagcttgctgggagagtaagccctttctgaaggtgcttctaagtttgattgcgaccacgactgactagtatttgtgaattttctttttttatcttaagacaaacatggatgtacatgtacttgtgatcggagaaagtactcataattttctagac

SEQ ID NO: 111034 - protein, 198 aa, Zea mays subsp. mays
  misc_feature (1)..(198): Ceres Seq. ID no. 15180289
  misc_feature (18)..(171): Homolog of NCBI NO: 21231723 NR Description: carboxylesterase
  misc_feature (18)..(156): Homolog of NCBI NO: 22981708 NR Description: hypothetical protein [Ralstonia metallidurans]
  misc_feature (23)..(169): Homolog of NCBI NO: 16126537 NR Description: carboxylesterase family protein [Caulobacter
  misc_feature (20)..(167): Homolog of NCBI NO: 23470769 NR Description: hypothetical protein [Pseudomonas syringae pv.
  misc_feature (21)..(167): Homolog of NCBI NO: 28871958 NR Description: esterase/lipase/thioesterase family protein
  misc_feature (55)..(184): Homolog of NCBI NO: 11357218 NR Description: Carboxylesterase-like protein - Arabidopsis
  misc_feature (31)..(184): Homolog of NCBI NO: 15232904 NR Description: hypothetical protein [Arabidopsis thaliana]
  misc_feature (1)..(184): Homolog of NCBI NO: 25518434 NR Description: hypothetical protein F28B23.20 [imported] -
  misc_feature (1)..(184): Homolog of NCBI NO: 22329792 NR Description: expressed protein [Arabidopsis thaliana]
  misc_feature (1)..(184): Homolog of NCBI NO: 22326830 NR Description: Carboxylesterase-related protein [Arabidopsis
MPGFIQVVYYYFFSSQVHRSVVYGDQPRNRLDLYMPTSTTGLKPVVAFVTGGAWIIGYKGWGALLGRRLAERGIIVACIDYRNFPQGTIGDMVEDASQGIAFVCKNITSYGGDPSRIYLVGQSAGAHIAACALLNQAIRESGEGDTSSWSVSQLKAYFGISGGYNLLNLVDHFHRRGLYRSIFLRFTVSICSCLVIKS

SEQ ID NO: 111035 - protein, 164 aa, Zea mays subsp. mays
  misc_feature (1)..(164): Ceres Seq. ID no. 15180290
  misc_feature (1)..(150): Homolog of NCBI NO: 22329792 NR Description: expressed protein [Arabidopsis thaliana]
  misc_feature (1)..(150): Homolog of NCBI NO: 22326830 NR Description: Carboxylesterase-related protein [Arabidopsis
  misc_feature (1)..(137): Homolog of NCBI NO: 21231723 NR Description: carboxylesterase
  misc_feature (1)..(122): Homolog of NCBI NO: 22981708 NR Description: hypothetical protein [Ralstonia metallidurans]
  misc_feature (1)..(135): Homolog of NCBI NO: 16126537 NR Description: carboxylesterase family protein [Caulobacter
  misc_feature (1)..(133): Homolog of NCBI NO: 23470769 NR Description: hypothetical protein [Pseudomonas syringae pv.
  misc_feature (1)..(133): Homolog of NCBI NO: 28871958 NR Description: esterase/lipase/thioesterase family protein
  misc_feature (21)..(150): Homolog of NCBI NO: 11357218 NR Description: Carboxylesterase-like protein - Arabidopsis
  misc_feature (1)..(150): Homolog of NCBI NO: 15232904 NR Description: hypothetical protein [Arabidopsis thaliana]
  misc_feature (1)..(150): Homolog of NCBI NO: 25518434 NR Description: hypothetical protein F28B23.20 [imported] -
MPTSTTGLKPVVAFVTGGAWIIGYKGWGALLGRRLAERGIIVACIDYRNFPQGTIGDMVEDASQGIAFVCKNITSYGGDPSRIYLVGQSAGAHIAACALLNQAIRESGEGDTSSWSVSQLKAYFGISGGYNLLNLVDHFHRRGLYRSIFLRFTVSICSCLVIKS

SEQ ID NO: 111036 - protein, 131 aa, Zea mays subsp. mays
  misc_feature (1)..(131): Ceres Seq. ID no. 15180291
  misc_feature (29)..(83): Homolog of NCBI NO: 32477901 NR Description: probable lipase/esterase [Pirellula sp.]
  misc_feature (29)..(79): Homolog of NCBI NO: 27356634 NR Description: unknown [Zymomonas mobilis]
  misc_feature (29)..(92): Homolog of NCBI NO: 32471842 NR Description: probable lipase/esterase [Pirellula sp.]
  misc_feature (29)..(79): Homolog of NCBI NO: 32472501 NR Description: probable lipase/esterase [Pirellula sp.]
  misc_feature (1)..(131): Homolog of NCBI NO: 11357218 NR Description: Carboxylesterase-like protein - Arabidopsis
  misc_feature (1)..(131): Homolog of NCBI NO: 15232904 NR Description: hypothetical protein [Arabidopsis thaliana]
  misc_feature (1)..(131): Homolog of NCBI NO: 25518434 NR Description: hypothetical protein F28B23.20 [imported] -
  misc_feature (1)..(131): Homolog of NCBI NO: 22329792 NR Description: expressed protein [Arabidopsis thaliana]
  misc_feature (1)..(131): Homolog of NCBI NO: 22326830 NR Description: Carboxylesterase-related protein [Arabidopsis
MEGEVSLQKFSPQMMIMESSARSAVSLLPRIILFHGTSDYSIPPAESQAFADALQQQGARADLFLYEGKTHTDLFLQDPLRGGRDKMLEEIARVIHSEDPDAAAQHLVVVPVARHLVPEFMLKLAGRVSPF

SEQ ID NO: 111037 - DNA, 1643 bp, Zea mays subsp. mays
  misc_feature (1)..(1643): Ceres Seq. ID no. 14302621
aagtttgaggaggggtgttaaggcccattaggcccaggcctacagcctatatatattatatagtccttagggactcatcattattgattaatctcaaggttagtaacagctagaagggcaagcctggtgcagtggcgagagctattttactgagtcagcaagtcaggggtttgaagcagcttctccagatttgcgggggaaaggcttgccttggtttatcactttctcagattccactcatgtgggagccttcgatcgggttagctcttgatgtagttgaccgcatgtgtaaatccagttctgatgtgccaattgaatcatttcacccaatcatacatgcttgtgaacaaagatgtgaacttcacatggcccgccccatatatgatttgatccgccaccacaatttgaaatttaaaagcaaaacattcagaagcataataagtttatttgtaaaattgaaggattttgaaggtgcttacaatatactcacagacgctgaagaatctggggagatatcaaccgtaagcctgtataatgctataatgctagggtattatagggagaaaaactacaatggagcacaaatggtcatgtctcaaatgcagattgctggagtaaaaccagattctgagacattcagttatttgatagcgaattgtgagtctgaagagaacatttctaagtactgtgaccaattacggcaagatttaattccaatgaccagaaatatatatgttgcactcattgttgcatacgcaagacttggtaattttgatatggccaagcaggttctactcgataaagaaataccatgtaagttcctcagtgacatcaagagcgcacttgtaggagcgctggcattaaatgggcaagtgtcggatgcacttcgcttgcatgatgagataatgcaatccggcggctccctggaaccaaaagctgccattgccttgattgagcatattcgaacagaaggtgaactggatagaatgcatcaacttctcgatgggctgaatgactcaaacagctggtttgatggctgtggcagagtacttttatactgtgtccagcacaactatcctgatgctgcaattgatctacttaagcagatcagggagaaagatgaaatgagtacatatatggttgttgatcaggttttttgccaaatatgggacatggagaccacaaatttggattttggaatggtgtttcttgatgctgtcaaagagcttggacttaatgtttctcggacaagccttgactttcttctcagcgcatgtgtaaaagcaaaggatttgcgacgtgcccaacagatctggacagaatacgaatctgctggtcttccacacaacgtgctgagttccttgaggatgtatcaagcttttctttcatctgggggacgtaaggcggctaagaagttgttgaaaaagatacaaaaggaagatgctcacgtgcgctacataacatatgcttgtcgtgcgacatactgcagtaaagacttcaagccttctgctacagttaggttaagttccaaaggaagagctagatcaaaacctactaatgaggggtaagaggtctatttacttttaccacttccgttgcagtgaaatactgaaacgggatgaaatcaattcttttgttctggg

SEQ ID NO: 111038 - protein, 442 aa, Zea mays subsp. mays
  misc_feature (1)..(442): Ceres Seq. ID no. 14302622
  misc_feature (96)..(130): Pfam Name: PPR repeat Pfam Description: PPR repeat
  misc_feature (17)..(408): Homolog of NCBI NO: 15221081 NR Description: pentatricopeptide (PPR) repeat-containing protein
  misc_feature (5)..(421): Homolog of NCBI NO: 15242446 NR Description: pentatricopeptide (PPR) repeat-containing protein
  misc_feature (65)..(409): Homolog of NCBI NO: 15233142 NR Description: pentatricopeptide (PPR) repeat-containing protein
  misc_feature (1)..(400): Homolog of NCBI NO: 15240891 NR Description: pentatricopeptide (PPR) repeat-containing protein
  misc_feature (9)..(407): Homolog of NCBI NO: 4115946 NR Description: contains similarity to Ipomoea nil leaf protein
  misc_feature (76)..(382): Homolog of NCBI NO: 7487835 NR Description: hypothetical protein T8O5.90 - Arabidopsis
  misc_feature (76)..(382): Homolog of NCBI NO: 30685606 NR Description: pentatricopeptide (PPR) repeat-containing protein
  misc_feature (27)..(407): Homolog of NCBI NO: 30679877 NR Description: pentatricopeptide (PPR) repeat-containing protein
  misc_feature (27)..(407): Homolog of NCBI NO: 25407292 NR Description: hypothetical protein AT4g04790 [imported] -
  misc_feature (9)..(407): Homolog of NCBI NO: 34849885 NR Description: At4g04790 [Arabidopsis thaliana]
MWEPSIGLALDVVDRMCKSSSDVPIESFHPIIHACEQRCELHMARPIYDLIRHHNLKFKSKTFRSIISLFVKLKDFEGAYNILTDAEESGEISTVSLYNAIMLGYYREKNYNGAQMVMSQMQIAGVKPDSETFSYLIANCESEENISKYCDQLRQDLIPMTRNIYVALIVAYARLGNFDMAKQVLLDKEIPCKFLSDIKSALVGALALNGQVSDALRLHDEIMQSGGSLEPKAAIALIEHIRTEGELDRMHQLLDGLNDSNSWFDGCGRVLLYCVQHNYPDAAIDLLKQIREKDEMSTYMVVDQVFCQIWDMETTNLDFGMVFLDAVKELGLNVSRTSLDFLLSACVKAKDLRRAQQIWTEYESAGLPHNVLSSLRMYQAFLSSGGRKAAKKLLKKIQKEDAHVRYITYACRATYCSKDFKPSATVRLSSKGRARSKPTNEG

SEQ ID NO: 111039 - protein, 427 aa, Zea mays subsp. mays
  misc_feature (1)..(427): Ceres Seq. ID no. 14302623
  misc_feature (81)..(115): Pfam Name: PPR repeat Pfam Description: PPR repeat
  misc_feature (2)..(393): Homolog of NCBI NO: 15221081 NR Description: pentatricopeptide (PPR) repeat-containing protein
  misc_feature (1)..(406): Homolog of NCBI NO: 15242446 NR Description: pentatricopeptide (PPR) repeat-containing protein
  misc_feature (50)..(394): Homolog of NCBI NO: 15233142 NR Description: pentatricopeptide (PPR) repeat-containing protein
  misc_feature (1)..(385): Homolog of NCBI NO: 15240891 NR Description: pentatricopeptide (PPR) repeat-containing protein
  misc_feature (1)..(392): Homolog of NCBI NO: 4115946 NR Description: contains similarity to Ipomoea nil leaf protein
  misc_feature (61)..(367): Homolog of NCBI NO: 7487835 NR Description: hypothetical protein T8O5.90 - Arabidopsis
  misc_feature (61)..(367): Homolog of NCBI NO: 30685606 NR Description: pentatricopeptide (PPR) repeat-containing protein
  misc_feature (12)..(392): Homolog of NCBI NO: 30679877 NR Description: pentatricopeptide (PPR) repeat-containing protein
  misc_feature (12)..(392): Homolog of NCBI NO: 25407292 NR Description: hypothetical protein AT4g04790 [imported] -
  misc_feature (1)..(392): Homolog of NCBI NO: 34849885 NR Description: At4g04790 [Arabidopsis thaliana]
MCKSSSDVPIESFHPIIHACEQRCELHMARPIYDLIRHHNLKFKSKTFRSIISLFVKLKDFEGAYNILTDAEESGEISTVSLYNAIMLGYYREKNYNGAQMVMSQMQIAGVKPDSETFSYLIANCESEENISKYCDQLRQDLIPMTRNIYVALIVAYARLGNFDMAKQVLLDKEIPCKFLSDIKSALVGALALNGQVSDALRLHDEIMQSGGSLEPKAAIALIEHIRTEGELDRMHQLLDGLNDSNSWFDGCGRVLLYCVQHNYPDAAIDLLKQIREKDEMSTYMVVDQVFCQIWDMETTNLDFGMVFLDAVKELGLNVSRTSLDFLLSACVKAKDLRRAQQIWTEYESAGLPHNVLSSLRMYQAFLSSGGRKAAKKLLKKIQKEDAHVRYITYACRATYCSKDFKPSATVRLSSKGRARSKPTNEG

SEQ ID NO: 111040 - protein, 400 aa, Zea mays subsp. mays
  misc_feature (1)..(400): Ceres Seq. ID no. 14302624
  misc_feature (54)..(88): Pfam Name: PPR repeat Pfam Description: PPR repeat
  misc_feature (1)..(366): Homolog of NCBI NO: 15221081 NR Description: pentatricopeptide (PPR) repeat-containing protein
  misc_feature (1)..(379): Homolog of NCBI NO: 15242446 NR Description: pentatricopeptide (PPR) repeat-containing protein
  misc_feature (23)..(367): Homolog of NCBI NO: 15233142 NR Description: pentatricopeptide (PPR) repeat-containing protein
  misc_feature (1)..(358): Homolog of NCBI NO: 15240891 NR Description: pentatricopeptide (PPR) repeat-containing protein
  misc_feature (1)..(365): Homolog of NCBI NO: 4115946 NR Description: contains similarity to Ipomoea nil leaf protein
  misc_feature (34)..(340): Homolog of NCBI NO: 7487835 NR Description: hypothetical protein T8O5.90 - Arabidopsis
  misc_feature (34)..(340): Homolog of NCBI NO: 30685606 NR Description: pentatricopeptide (PPR) repeat-containing protein
  misc_feature (1)..(365): Homolog of NCBI NO: 30679877 NR Description: pentatricopeptide (PPR) repeat-containing protein
  misc_feature (1)..(365): Homolog of NCBI NO: 25407292 NR Description: hypothetical protein AT4g04790 [imported] -
  misc_feature (1)..(365): Homolog of NCBI NO: 34849885 NR Description: At4g04790 [Arabidopsis thaliana]
MARPIYDLIRHHNLKFKSKTFRSIISLFVKLKDFEGAYNILTDAEESGEISTVSLYNAIMLGYYREKNYNGAQMVMSQMQIAGVKPDSETFSYLIANCESEENISKYCDQLRQDLIPMTRNIYVALIVAYARLGNFDMAKQVLLDKEIPCKFLSDIKSALVGALALNGQVSDALRLHDEIMQSGGSLEPKAAIALIEHIRTEGELDRMHQLLDGLNDSNSWFDGCGRVLLYCVQHNYPDAAIDLLKQIREKDEMSTYMVVDQVFCQIWDMETTNLDFGMVFLDAVKELGLNVSRTSLDFLLSACVKAKDLRRAQQIWTEYESAGLPHNVLSSLRMYQAFLSSGGRKAAKKLLKKIQKEDAHVRYITYACRATYCSKDFKPSATVRLSSKGRARSKPTNEG

SEQ ID NO: 111041 - DNA, 911 bp, Zea mays subsp. mays
  misc_feature (1)..(911): Ceres Seq. ID no. 12589186
  misc_feature: MA Experiment ID: 108515 Result: Up-regulated in Transcription
  misc_feature: MA Experiment 108515 PARAMETER Experiment Name: Zm_2mM_SA_P Parameter: Age (day) Value: 8
  misc_feature: MA Experiment 108515 PARAMETER Experiment Name: Zm_2mM_SA_P Parameter: Organism Value: Zea mays
  misc_feature: MA Experiment 108515 PARAMETER Experiment Name: Zm_2mM_SA_P Parameter: Plant Line Value: 35A19
  misc_feature: MA Experiment 108515 PARAMETER Experiment Name: Zm_2mM_SA_P Parameter: Timepoint (hr) Value: 12
  misc_feature: MA Experiment 108515 PARAMETER Experiment Name: Zm_2mM_SA_P Parameter: Tissue Value: Aerial
  misc_feature: MA Experiment 108515 PARAMETER Experiment Name: Zm_2mM_SA_P Parameter: Treatment Value: 2mM SA vs. No Treatment
  misc_feature: MA Experiment ID: 108522 Result: Down-regulated in Transcription
  misc_feature: MA Experiment 108522 PARAMETER Experiment Name: Zm_42deg_Heat_P Parameter: Age (day) Value: 8
  misc_feature: MA Experiment 108522 PARAMETER Experiment Name: Zm_42deg_Heat_P Parameter: Organism Value: Zea mays
  misc_feature: MA Experiment 108522 PARAMETER Experiment Name: Zm_42deg_Heat_P Parameter: Plant Line Value: 35A19
  misc_feature: MA Experiment 108522 PARAMETER Experiment Name: Zm_42deg_Heat_P Parameter: Temperature (deg C) Value: 42 vs. 22
  misc_feature: MA Experiment 108522 PARAMETER Experiment Name: Zm_42deg_Heat_P Parameter: Timepoint (hr) Value: 1
  misc_feature: MA Experiment 108522 PARAMETER Experiment Name: Zm_42deg_Heat_P Parameter: Tissue Value: Aerial
  misc_feature: MA Experiment ID: 108523 Result: Down-regulated in Transcription
  misc_feature: MA Experiment 108523 PARAMETER Experiment Name: Zm_42deg_Heat_P Parameter: Age (day) Value: 8
  misc_feature: MA Experiment 108523 PARAMETER Experiment Name: Zm_42deg_Heat_P Parameter: Organism Value: Zea mays
  misc_feature: MA Experiment 108523 PARAMETER Experiment Name: Zm_42deg_Heat_P Parameter: Plant Line Value: 35A19
  misc_feature: MA Experiment 108523 PARAMETER Experiment Name: Zm_42deg_Heat_P Parameter: Temperature (deg C) Value: 42 vs. 22
  misc_feature: MA Experiment 108523 PARAMETER Experiment Name: Zm_42deg_Heat_P Parameter: Timepoint (hr) Value: 6
  misc_feature: MA Experiment 108523 PARAMETER Experiment Name: Zm_42deg_Heat_P Parameter: Tissue Value: Aerial
  misc_feature: MA Experiment ID: 108526 Result: Up-regulated in Transcription
  misc_feature: MA Experiment 108526 PARAMETER Experiment Name: Zm_5mM_NO_P Parameter: Age (day) Value: 8
  misc_feature: MA Experiment 108526 PARAMETER Experiment Name: Zm_5mM_NO_P Parameter: Organism Value: Zea mays
  misc_feature: MA Experiment 108526 PARAMETER Experiment Name: Zm_5mM_NO_P Parameter: Plant Line Value: 35A19
  misc_feature: MA Experiment 108526 PARAMETER Experiment Name: Zm_5mM_NO_P Parameter: Timepoint (hr) Value: 1
  misc_feature: MA Experiment 108526 PARAMETER Experiment Name: Zm_5mM_NO_P Parameter: Tissue Value: Aerial
  misc_feature: MA Experiment 108526 PARAMETER Experiment Name: Zm_5mM_NO_P Parameter: Treatment Value: 5mM NO vs. No Treatment
  misc_feature: MA Experiment ID: 108527 Result: Up-regulated in Transcription
  misc_feature: MA Experiment 108527 PARAMETER Experiment Name: Zm_5mM_NO_P Parameter: Age (day) Value: 8
  misc_feature: MA Experiment 108527 PARAMETER Experiment Name: Zm_5mM_NO_P Parameter: Organism Value: Zea mays
  misc_feature: MA Experiment 108527 PARAMETER Experiment Name: Zm_5mM_NO_P Parameter: Plant Line Value: 35A19
  misc_feature: MA Experiment 108527 PARAMETER Experiment Name: Zm_5mM_NO_P Parameter: Timepoint (hr) Value: 6
  misc_feature: MA Experiment 108527 PARAMETER Experiment Name: Zm_5mM_NO_P Parameter: Tissue Value: Aerial
  misc_feature: MA Experiment 108527 PARAMETER Experiment Name: Zm_5mM_NO_P Parameter: Treatment Value: 5mM NO vs. No Treatment
  misc_feature: MA Experiment ID: 108529 Result: Down-regulated in Transcription
  misc_feature: MA Experiment 108529 PARAMETER Experiment Name: Zm_Imbibed_Seeds_P Parameter: Age (day) Value: 5 vs. 2
  misc_feature: MA Experiment 108529 PARAMETER Experiment Name: Zm_Imbibed_Seeds_P Parameter: Organism Value: Zea mays
  misc_feature: MA Experiment 108529 PARAMETER Experiment Name: Zm_Imbibed_Seeds_P Parameter: Plant Line Value: 35A19
  misc_feature: MA Experiment 108529 PARAMETER Experiment Name: Zm_Imbibed_Seeds_P Parameter: Tissue Value: Roots vs. Embryo
  misc_feature: MA Experiment ID: 108534 Result: Up-regulated in Transcription
  misc_feature: MA Experiment 108534 PARAMETER Experiment Name: Zm_4deg_Cold_P Parameter: Age (hr) Value: 8
  misc_feature: MA Experiment 108534 PARAMETER Experiment Name: Zm_4deg_Cold_P Parameter: Organism Value: Zea mays
  misc_feature: MA Experiment 108534 PARAMETER Experiment Name: Zm_4deg_Cold_P Parameter: Plant Line Value: 35A19
  misc_feature: MA Experiment 108534 PARAMETER Experiment Name: Zm_4deg_Cold_P Parameter: Temperature (deg C) Value: 4 vs. 22
  misc_feature: MA Experiment 108534 PARAMETER Experiment Name: Zm_4deg_Cold_P Parameter: Timepoint (hr) Value: 6
  misc_feature: MA Experiment 108534 PARAMETER Experiment Name: Zm_4deg_Cold_P Parameter: Tissue Value: Aerial
  misc_feature: MA Experiment ID: 108542 Result: Down-regulated in Transcription
  misc_feature: MA Experiment 108542 PARAMETER Experiment Name: Zm_150mM_NaCl_P Parameter: Age (day) Value: 8
  misc_feature: MA Experiment 108542 PARAMETER Experiment Name: Zm_150mM_NaCl_P Parameter: Organism Value: Zea mays
  misc_feature: MA Experiment 108542 PARAMETER Experiment Name: Zm_150mM_NaCl_P Parameter: Plant Line Value: 35A19
  misc_feature: MA Experiment 108542 PARAMETER Experiment Name: Zm_150mM_NaCl_P Parameter: Timepoint (hr) Value: 6
  misc_feature: MA Experiment 108542 PARAMETER Experiment Name: Zm_150mM_NaCl_P Parameter: Tissue Value: Aerial
  misc_feature: MA Experiment 108542 PARAMETER Experiment Name: Zm_150mM_NaCl_P Parameter: Treatment Value: 150mM NaCl vs. No Treatment
  misc_feature: MA Experiment ID: 108543 Result: Down-regulated in Transcription
  misc_feature: MA Experiment ID: 108545 Result: Down-regulated in Transcription
  misc_feature: MA Experiment 108545 PARAMETER Experiment Name: Zm_Imbibed_Seeds_P Parameter: Age (day) Value: 3 vs. 2
  misc_feature: MA Experiment 108545 PARAMETER Experiment Name: Zm_Imbibed_Seeds_P Parameter: Organism Value: Zea mays
  misc_feature: MA Experiment 108545 PARAMETER Experiment Name: Zm_Imbibed_Seeds_P Parameter: Plant Line Value: 35A19
  misc_feature: MA Experiment 108545 PARAMETER Experiment Name: Zm_Imbibed_Seeds_P Parameter: Tissue Value: Aerial vs. Embryo
  misc_feature: MA Experiment ID: 108547 Result: Down-regulated in Transcription
  misc_feature: MA Experiment 108547 PARAMETER Experiment Name: Zm_Imbibed_Seeds_P Parameter: Age (day) Value: 4 vs. 2
  misc_feature: MA Experiment 108547 PARAMETER Experiment Name: Zm_Imbibed_Seeds_P Parameter: Organism Value: Zea mays
  misc_feature: MA Experiment 108547 PARAMETER Experiment Name: Zm_Imbibed_Seeds_P Parameter: Plant Line Value: 35A19
  misc_feature: MA Experiment 108547 PARAMETER Experiment Name: Zm_Imbibed_Seeds_P Parameter: Tissue Value: Aerial vs. Embryo
  misc_feature: MA Experiment ID: 108548 Result: Up-regulated in Transcription
  misc_feature: MA Experiment 108548 PARAMETER Experiment Name: Zm_20uM_KNO3_H-to-L_P Parameter: Age (day) Value: 11
  misc_feature: MA Experiment 108548 PARAMETER Experiment Name: Zm_20uM_KNO3_H-to-L_P Parameter: Organism Value: Zea mays
  misc_feature: MA Experiment 108548 PARAMETER Experiment Name: Zm_20uM_KNO3_H-to-L_P Parameter: Plant Line Value: 35A19
  misc_feature: MA Experiment 108548 PARAMETER Experiment Name: Zm_20uM_KNO3_H-to-L_P Parameter: Timepoint (hr) Value: 4
  misc_feature: MA Experiment 108548 PARAMETER Experiment Name: Zm_20uM_KNO3_H-to-L_P Parameter: Tissue Value: Roots
  misc_feature: MA Experiment 108548 PARAMETER Experiment Name: Zm_20uM_KNO3_H-to-L_P Parameter: Treatment Value: 20uM KNO3 vs. 60mM KNO3
  misc_feature: MA Experiment ID: 108559 Result: Up-regulated in Transcription
  misc_feature: MA Experiment 108559 PARAMETER Experiment Name: Zm_5mM_NO_P Parameter: Age (day) Value: 8
  misc_feature: MA Experiment 108559 PARAMETER Experiment Name: Zm_5mM_NO_P Parameter: Organism Value: Zea mays
  misc_feature: MA Experiment 108559 PARAMETER Experiment Name: Zm_5mM_NO_P Parameter: Plant Line Value: 35A19
  misc_feature: MA Experiment 108559 PARAMETER Experiment Name: Zm_5mM_NO_P Parameter: Timepoint (hr) Value: 12
  misc_feature: MA Experiment 108559 PARAMETER Experiment Name: Zm_5mM_NO_P Parameter: Tissue Value: Aerial
  misc_feature: MA Experiment 108559 PARAMETER Experiment Name: Zm_5mM_NO_P Parameter: Treatment Value: 5mM NO vs. No Treatment
  misc_feature: MA Experiment ID: 108689 Result: Down-regulated in Transcription
  misc_feature: MA Experiment 108689 PARAMETER Experiment Name: Zm_Drought_Roots_P Parameter: Age (day) Value: 9
  misc_feature: MA Experiment 108689 PARAMETER Experiment Name: Zm_Drought_Roots_P Parameter: Organism Value: Zea mays
  misc_feature: MA Experiment 108689 PARAMETER Experiment Name: Zm_Drought_Roots_P Parameter: Plant Line Value: 35A19
  misc_feature: MA Experiment 108689 PARAMETER Experiment Name: Zm_Drought_Roots_P Parameter: Timepoint (hr) Value: 24
  misc_feature: MA Experiment 108689 PARAMETER Experiment Name: Zm_Drought_Roots_P Parameter: Tissue Value: Roots
  misc_feature: MA Experiment 108689 PARAMETER Experiment Name: Zm_Drought_Roots_P Parameter: Treatment Value: Drought vs. No Drought
  misc_feature: MA Experiment ID: 20000477 Result: Up-regulated in Transcription
  misc_feature: MA Experiment 20000477 PARAMETER Experiment Name: Zm_5mM_SA_P Parameter: Age (day) Value: 10
  misc_feature: MA Experiment 20000477 PARAMETER Experiment Name: Zm_5mM_SA_P Parameter: Organism Value: Zea mays
  misc_feature: MA Experiment 20000477 PARAMETER Experiment Name: Zm_5mM_SA_P Parameter: Plant Line Value: 35A19
  misc_feature: MA Experiment 20000477 PARAMETER Experiment Name: Zm_5mM_SA_P Parameter: Timepoint (hr) Value: 48
  misc_feature: MA Experiment 20000477 PARAMETER Experiment Name: Zm_5mM_SA_P Parameter: Tissue Value: Aerial
  misc_feature: MA Experiment 20000477 PARAMETER Experiment Name: Zm_5mM_SA_P Parameter: Treatment Value: 5mM SA vs. No Treatment
  misc_feature: MA Experiment ID: 20000478 Result: Up-regulated in Transcription
  misc_feature: MA Experiment 20000478 PARAMETER Experiment Name: Zm_5mM_SA_P Parameter: Age (day) Value: 11
  misc_feature: MA Experiment 20000478 PARAMETER Experiment Name: Zm_5mM_SA_P Parameter: Organism Value: Zea mays
  misc_feature: MA Experiment 20000478 PARAMETER Experiment Name: Zm_5mM_SA_P Parameter: Plant Line Value: 35A19
  misc_feature: MA Experiment 20000478 PARAMETER Experiment Name: Zm_5mM_SA_P Parameter: Timepoint (hr) Value: 72
  misc_feature: MA Experiment 20000478 PARAMETER Experiment Name: Zm_5mM_SA_P Parameter: Tissue Value: Aerial
  misc_feature: MA Experiment 20000478 PARAMETER Experiment Name: Zm_5mM_SA_P Parameter: Treatment Value: 5mM SA vs. No Treatment
  misc_feature: MA Experiment ID: 20000479 Result: Down-regulated in Transcription
  misc_feature: MA Experiment 20000479 PARAMETER Experiment Name: Zm_Drought_P Parameter: Age (day) Value: 10
  misc_feature: MA Experiment 20000479 PARAMETER Experiment Name: Zm_Drought_P Parameter: Organism Value: Zea mays
  misc_feature: MA Experiment 20000479 PARAMETER Experiment Name: Zm_Drought_P Parameter: Plant Line Value: 35A19
  misc_feature: MA Experiment 20000479 PARAMETER Experiment Name: Zm_Drought_P Parameter: Timepoint (hr) Value: 48
  misc_feature: MA Experiment 20000479 PARAMETER Experiment Name: Zm_Drought_P Parameter: Tissue Value: Aerial
  misc_feature: MA Experiment 20000479 PARAMETER Experiment Name: Zm_Drought_P Parameter: Treatment Value: Drought vs. No Drought
  misc_feature: MA Experiment ID: 20000480 Result: Down-regulated in Transcription
  misc_feature: MA Experiment 20000480 PARAMETER Experiment Name: Zm_Drought_P Parameter: Age (day) Value: 11
  misc_feature: MA Experiment 20000480 PARAMETER Experiment Name: Zm_Drought_P Parameter: Organism Value: Zea mays
  misc_feature: MA Experiment 20000480 PARAMETER Experiment Name: Zm_Drought_P Parameter: Plant Line Value: 35A19
  misc_feature: MA Experiment 20000480 PARAMETER Experiment Name: Zm_Drought_P Parameter: Timepoint (hr) Value: 72
  misc_feature: MA Experiment 20000480 PARAMETER Experiment Name: Zm_Drought_P Parameter: Tissue Value: Aerial
  misc_feature: MA Experiment 20000480 PARAMETER Experiment Name: Zm_Drought_P Parameter: Treatment Value: Drought vs. No Drought
  misc_feature: MA Experiment ID: 20000626 Result: Up-regulated in Transcription
  misc_feature: MA Experiment 20000626 PARAMETER Experiment Name: Zm_Herbicide-Treatments_P Parameter: Timepoint (hr) Value: 12
  misc_feature: MA Experiment 20000626 PARAMETER Experiment Name: Zm_Herbicide-Treatments_P Parameter: Tissue Value: Aerial
  misc_feature: MA Experiment 20000626 PARAMETER Experiment Name: Zm_Herbicide-Treatments_P Parameter: Treatment Value: Roundup vs. No Treatment
  misc_feature: MA Experiment ID: 20000633 Result: Up-regulated in Transcription
  misc_feature: MA Experiment 20000633 PARAMETER Experiment Name: Zm_Herbicide-Treatments_P Parameter: Timepoint (hr) Value: 4
  misc_feature: MA Experiment 20000633 PARAMETER Experiment Name: Zm_Herbicide-Treatments_P Parameter: Tissue Value: Aerial
  misc_feature: MA Experiment 20000633 PARAMETER Experiment Name: Zm_Herbicide-Treatments_P Parameter: Treatment Value: Trimec vs. No Treatment
  misc_feature: MA Experiment ID: 20001613 Result: Down-regulated in Transcription
  misc_feature: MA Experiment 20001613 PARAMETER Experiment Name: Zm_50ppm_KNO3_L-to-H_P Parameter: Age (day) Value: 20
  misc_feature: MA Experiment 20001613 PARAMETER Experiment Name: Zm_50ppm_KNO3_L-to-H_P Parameter: Organism Value: Zea mays
  misc_feature: MA Experiment 20001613 PARAMETER Experiment Name: Zm_50ppm_KNO3_L-to-H_P Parameter: Plant Line Value: 35A19
  misc_feature: MA Experiment 20001613 PARAMETER Experiment Name: Zm_50ppm_KNO3_L-to-H_P Parameter: Timepoint (hr) Value: 24
  misc_feature: MA Experiment 20001613 PARAMETER Experiment Name: Zm_50ppm_KNO3_L-to-H_P Parameter: Tissue Value: Roots
  misc_feature: MA Experiment 20001613 PARAMETER Experiment Name: Zm_50ppm_KNO3_L-to-H_P Parameter: Treatment Value: 50ppm KNO3 vs. 50ppm KCl
acattctctctgaccgatcttgggctctcctataaatatataggaacgtacgtaaagtttctccaagcagatagcagcaagctaagcaagtgccaaccaacgagtagcaggaaacatgtctccgcccgtcaagatcctcggccactacgcgagcccgtactcgcaccgcgtcgaggccgctctgcggctcaagggcgtgccgtacgagctggtccaggaagacctgggcaacaagagcgagctgctgctcgccaagaaccctgtccacaagaaggtgcccgtgctcctccatggcgacatggccgtctgcgagtccctcctcatcgtcgagtacgtcgacgaggccttcgacgggccgtccatcctgccggccgacccccacgaccgtgccgtcgcccgtttctgggcgaacttcttggacaccaagttctcccagccgttctggctggcgtactgggcggagggcgaggcgcagaaggccgtggtgaaggaggccaaggagaacctggcgctcctggaggcgcagctcggcgggaagagcttcttcggcggcgacacgcccgggtacctcgacatagccgcgtgcgcgttgggtccttggatcggcgtgctcgaggaggtgactggagtggccttgctggacgccgacgagttccccgctctatgccagtgggccagggactacagctccagtgaagcgctcaggccatgcctgccggacagggaccgactcgttgcctacttcaccgagaacaaggagaagtacaagacatttgccaaggcaacgttgcatcagtatctgctagttgggtgcaaaccgcttgtttatctctgtgtggaataatgtatacgtacgtgctccctcgatatcaaataaatcagctaccggagttgactgtagtcaaattgct

SEQ ID NO: 111042 - protein, 242 aa, Zea mays subsp. mays
  misc_feature (1)..(242): Ceres Seq. ID no. 12589187
  misc_feature (84)..(194): Pfam Name: Glutathione S-transferase, C-terminal domain Pfam Description: Glutathione S-transferase, C-terminal domain
  misc_feature (1)..(231): Homolog of NCBI NO: 19386816 NR Description: putative glutathione S-transferase GST 24
  misc_feature (4)..(223): Homolog of NCBI NO: 19386822 NR Description: putative glutathione S-transferase GST 24
  misc_feature (1)..(218): Homolog of NCBI NO: 19386817 NR Description: putative glutathione S-transferase GST 24
  misc_feature (5)..(223): Homolog of NCBI NO: 11385509 NR Description: glutathione S-transferase GST 29 [Zea mays]
  misc_feature (1)..(227): Homolog of NCBI NO: 19386819 NR Description: putative glutathione S-transferase GST 24
  misc_feature (5)..(224): Homolog of NCBI NO: 11385507 NR Description: glutathione S-transferase GST 28 [Zea mays]
  misc_feature (2)..(228): Homolog of NCBI NO: 13699857 NR Description: glutathione S-transferase GST 24 [Zea mays]
  misc_feature (1)..(227): Homolog of NCBI NO: 34896730 NR Description: putative glutathione transferase
  misc_feature (3)..(227): Homolog of NCBI NO: 11385493 NR Description: glutathione S-transferase GST 21 [Zea mays]
  misc_feature (1)..(227): Homolog of NCBI NO: 4468798 NR Description: GST7 protein [Zea mays]
MSPPVKILGHYASPYSHRVEAALRLKGVPYELVQEDLGNKSELLLAKNPVHKKVPVLLHGDMAVCESLLIVEYVDEAFDGPSILPADPHDRAVARFWANFLDTKFSQPFWLAYWAEGEAQKAVVKEAKENLALLEAQLGGKSFFGGDTPGYLDIAACALGPWIGVLEEVTGVALLDADEFPALCQWARDYSSSEALRPCLPDRDRLVAYFTENKEKYKTFAKATLHQYLLVGCKPLVYLCVE

SEQ ID NO: 111043 - protein, 231 aa, Zea mays subsp. mays
  misc_feature (1)..(231): Ceres Seq. ID no. 12589188
TFSLTDLGLSYKYIGTYVKFLQADSSKLSKCQPTSSRKHVSARQDPRPLREPVLAPRRGRSAAQGRAVRAGPGRPGQQERAAARQEPCPQEGARAPPWRHGRLRVPPHRRVRRRGLRRAVHPAGRPPRPCRRPFLGELLGHQVLPAVLAGVLGGGRGAEGRGEGGQGEPGAPGGAARREELLRRRHARVPRHSRVRVGSLDRRARGGDWSGLAGRRRVPRSMPVGQGLQLQ

SEQ ID NO: 111044 - protein, 181 aa, Zea mays subsp. mays
  misc_feature (1)..(181): Ceres Seq. ID no. 12589189
  misc_feature (23)..(133): Pfam Name: Glutathione S-transferase, C-terminal domain Pfam Description: Glutathione S-transferase, C-terminal domain
  misc_feature (1)..(170): Homolog of NCBI NO: 19386816 NR Description: putative glutathione S-transferase GST 24
  misc_feature (1)..(162): Homolog of NCBI NO: 19386822 NR Description: putative glutathione S-transferase GST 24
  misc_feature (1)..(157): Homolog of NCBI NO: 19386817 NR Description: putative glutathione S-transferase GST 24
  misc_feature (1)..(162): Homolog of NCBI NO: 11385509 NR Description: glutathione S-transferase GST 29 [Zea mays]
  misc_feature (1)..(166): Homolog of NCBI NO: 19386819 NR Description: putative glutathione S-transferase GST 24
  misc_feature (1)..(163): Homolog of NCBI NO: 11385507 NR Description: glutathione S-transferase GST 28 [Zea mays]
  misc_feature (1)..(167): Homolog of NCBI NO: 13699857 NR Description: glutathione S-transferase GST 24 [Zea mays]
  misc_feature (1)..(166): Homolog of NCBI NO: 34896730 NR Description: putative glutathione transferase
  misc_feature (1)..(166): Homolog of NCBI NO: 11385493 NR Description: glutathione S-transferase GST 21 [Zea mays]
  misc_feature (1)..(166): Homolog of NCBI NO: 4468798 NR Description: GST7 protein [Zea mays]
MAVCESLLIVEYVDEAFDGPSILPADPHDRAVARFWANFLDTKFSQPFWLAYWAEGEAQKAVVKEAKENLALLEAQLGGKSFFGGDTPGYLDIAACALGPWIGVLEEVTGVALLDADEFPALCQWARDYSSSEALRPCLPDRDRLVAYFTENKEKYKTFAKATLHQYLLVGCKPLVYLCVE

SEQ ID NO: 111045 - DNA, 1182 bp, Zea mays subsp. mays
  misc_feature (1)..(1182): Ceres Seq. ID no. 13599003
cccccctccagwwcmtccthtrckgcggcggtatactcggttccctgccccccccacgaccacgccgccgcctcctccccacgcccgcccggcgctcccggaaccgccgcattcacatgatgtatcatgcgaagaatttttctgtgccctttgctccgcagagggcacaggataatgagcatgcaggtaatattggaggtattggtggacccaacataagcaaccctgctaatcctgtaggaagtgggaaacaacgtctacggtggacatcggatcttcataatcgctttgtggatgccatcgcccagcttggtggaccagacagagctacacctaaaggggttctcactgtgatgggtgtaccagggatcacaatttatcatgtgaagagccatctgcagaagtatcgccttgcaaagtatatacccgactctcctgctgaaggttccaaggacgaaaagaaagattcgagtgattccctctcgaacacggattctgcaccaggattgcaaatcaatgaggcactaaagatgcaaatggaggttcagaagcgactacatgagcaactcgaggttcaaagacaactgcaactaagaattgaagcacaaggaagatacttgcagatgatcattgaggagcaacaaaagcttggtggatcaattaaagcttctgaggatcagaagctttctgattcacctccaagcttagatgactacccagagagcatgcaaccttctcccaagaaaccaaggatagatgcattatcaccagattcagagcgcgatacaacacaacctgaattcgaatcccatttgatcggtccgtgggatcacggcattgcattcccagtggaggagttcaaagcagaccctgctatgagcaagtcataaggcaaacttcaccttgacagaaaattttcagagttgacctctccacgagatgatcattctcatgtgaatatatattatcttaacaacagaatgttgtacgggtttttgaccctgcacctgatcccttcagccacgtccagttattcttatcactgtagtatccatcaacaagtcctgtaattatgaggatggtgttacagagtttctagcaagcatttccatcgagggaatggccctgagttgatccatgtagcaagaaagagaacatgcttacaagcaatatatttgctgc

SEQ ID NO: 111046 - protein, 295 aa, Zea mays subsp. mays
  misc_feature (1)..(295): Ceres Seq. ID no. 15222483
  misc_feature (85)..(136): Pfam Name: Myb-like DNA-binding domain Pfam Description: Myb-like DNA-binding domain
  misc_feature (73)..(248): Homolog of NCBI NO: 6942190 NR Description: CDPK substrate protein 1; CSP1 [Mesembryanthemum
  misc_feature (73)..(264): Homolog of NCBI NO: 15229298 NR Description: transfactor -related [Arabidopsis thaliana]
  misc_feature (74)..(225): Homolog of NCBI NO: 30692105 NR Description: expressed protein [Arabidopsis thaliana]
  misc_feature (74)..(225): Homolog of NCBI NO: 30692110 NR Description: expressed protein [Arabidopsis thaliana]
  misc_feature (74)..(225): Homolog of NCBI NO: 21954075 NR Description: unknown protein [Arabidopsis thaliana]
  misc_feature (74)..(225): Homolog of NCBI NO: 21537366 NR Description: transfactor, putative [Arabidopsis thaliana]
  misc_feature (75)..(261): Homolog of NCBI NO: 4519671 NR Description: transfactor [Nicotiana tabacum]
  misc_feature (73)..(252): Homolog of NCBI NO: 22329004 NR Description: expressed protein [Arabidopsis thaliana]
  misc_feature (70)..(271): Homolog of NCBI NO: 29647445 NR Description: putative transfactor [Oryza sativa (japonica
  misc_feature (68)..(257): Homolog of NCBI NO: 15226170 NR Description: transfactor-related protein [Arabidopsis
PLQXXXXXGGILGSLPPPRPRRRLLPTPARRSRNRRIHMMYHAKNFSVPFAPQRAQDNEHAGNIGGIGGPNISNPANPVGSGKQRLRWTSDLHNRFVDAIAQLGGPDRATPKGVLTVMGVPGITIYHVKSHLQKYRLAKYIPDSPAEGSKDEKKDSSDSLSNTDSAPGLQINEALKMQMEVQKRLHEQLEVQRQLQLRIEAQGRYLQMIIEEQQKLGGSIKASEDQKLSDSPPSLDDYPESMQPSPKKPRIDALSPDSERDTTQPEFESHLIGPWDHGIAFPVEEFKADPAMSKS

SEQ ID NO: 111047 - protein, 257 aa, Zea mays subsp. mays
  misc_feature (1)..(257): Ceres Seq. ID no. 15222484
  misc_feature (47)..(98): Pfam Name: Myb-like DNA-binding domain Pfam Description: Myb-like DNA-binding domain
  misc_feature (35)..(210): Homolog of NCBI NO: 6942190 NR Description: CDPK substrate protein 1; CSP1 [Mesembryanthemum
  misc_feature (35)..(226): Homolog of NCBI NO: 15229298 NR Description: transfactor -related [Arabidopsis thaliana]
  misc_feature (36)..(187): Homolog of NCBI NO: 30692110 NR Description: expressed protein [Arabidopsis thaliana]
  misc_feature (36)..(187): Homolog of NCBI NO: 30692105 NR Description: expressed protein [Arabidopsis thaliana]
  misc_feature (36)..(187): Homolog of NCBI NO: 21954075 NR Description: unknown protein [Arabidopsis thaliana]
  misc_feature (36)..(187): Homolog of NCBI NO: 21537366 NR Description: transfactor, putative [Arabidopsis thaliana]
  misc_feature (37)..(223): Homolog of NCBI NO: 4519671 NR Description: transfactor [Nicotiana tabacum]
  misc_feature (35)..(214): Homolog of NCBI NO: 22329004 NR Description: expressed protein [Arabidopsis thaliana]
  misc_feature (32)..(233): Homolog of NCBI NO: 29647445 NR Description: putative transfactor [Oryza sativa (japonica
  misc_feature (30)..(219): Homolog of NCBI NO: 15226170 NR Description: transfactor-related protein [Arabidopsis
MMYHAKNFSVPFAPQRAQDNEHAGNIGGIGGPNISNPANPVGSGKQRLRWTSDLHNRFVDAIAQLGGPDRATPKGVLTVMGVPGITIYHVKSHLQKYRLAKYIPDSPAEGSKDEKKDSSDSLSNTDSAPGLQINEALKMQMEVQKRLHEQLEVQRQLQLRIEAQGRYLQMIIEEQQKLGGSIKASEDQKLSDSPPSLDDYPESMQPSPKKPRIDALSPDSERDTTQPEFESHLIGPWDHGIAFPVEEFKADPAMSKS

SEQ ID NO: 111048 - protein, 256 aa, Zea mays subsp. mays
  misc_feature (1)..(256): Ceres Seq. ID no. 15222485
  misc_feature (46)..(97): Pfam Name: Myb-like DNA-binding domain Pfam Description: Myb-like DNA-binding domain
  misc_feature (35)..(186): Homolog of NCBI NO: 30692105 NR Description: expressed protein [Arabidopsis thaliana]
  misc_feature (35)..(186): Homolog of NCBI NO: 21954075 NR Description: unknown protein [Arabidopsis thaliana]
  misc_feature (35)..(186): Homolog of NCBI NO: 21537366 NR Description: transfactor, putative [Arabidopsis thaliana]
  misc_feature (36)..(222): Homolog of NCBI NO: 4519671 NR Description: transfactor [Nicotiana tabacum]
  misc_feature (34)..(225): Homolog of NCBI NO: 15229298 NR Description: transfactor -related [Arabidopsis thaliana]
  misc_feature (35)..(186): Homolog of NCBI NO: 30692110 NR Description: expressed protein [Arabidopsis thaliana]
  misc_feature (34)..(209): Homolog of NCBI NO: 6942190 NR Description: CDPK substrate protein 1; CSP1 [Mesembryanthemum
  misc_feature (34)..(213): Homolog of NCBI NO: 22329004 NR Description: expressed protein [Arabidopsis thaliana]
  misc_feature (31)..(232): Homolog of NCBI NO: 29647445 NR Description: putative transfactor [Oryza sativa (japonica
  misc_feature (29)..(218): Homolog of NCBI NO: 15226170 NR Description: transfactor-related protein [Arabidopsis
MYHAKNFSVPFAPQRAQDNEHAGNIGGIGGPNISNPANPVGSGKQRLRWTSDLHNRFVDAIAQLGGPDRATPKGVLTVMGVPGITIYHVKSHLQKYRLAKYIPDSPAEGSKDEKKDSSDSLSNTDSAPGLQINEALKMQMEVQKRLHEQLEVQRQLQLRIEAQGRYLQMIIEEQQKLGGSIKASEDQKLSDSPPSLDDYPESMQPSPKKPRIDALSPDSERDTTQPEFESHLIGPWDHGIAFPVEEFKADPAMSKS

SEQ ID NO: 111049 - DNA, 777 bp, Zea mays subsp. mays
  misc_feature (1)..(777): Ceres Seq. ID no. 12637935
gagagcagggtgtactcgagacagacaggactgacggccacatccgccatattcaggcatggaagcaccggctgcgaagcgcgtcctccgcgtggcctccatcagcggctccattcgcaaggcctcctggcacagcggactcatccgcgccgccgcggaggtgtgcgaggactgcatcccggggctgcgcgtcgaccacctcgacgtcgccgacctgccgatgctcaacaccgacctcgagacgaacggcggcacgggcttcccgcccgccgtcgaggcgttccgcgccaaggtccgccacgccgactgcttcctcttcgcctcgcccgaatacaactactccatcaccagcccactgaagaacgcgcttgactgggcttctagaggagtgaactgctgggcagacaagccggccgccatcgtcagcgcgggaggcaacttcggcggcggcaggtccagctaccatctgcgccaggtcggggtgttcttggacatccatttcatcaacaagccggaactgttcgtcttcgccttcttcgagccggccaagtttttcgacagcgacgggaacctcatcgacgccgacaccagggagcgcctcaagcaggtgctcctgtcccttgaggccttcacgcgcaggctccagaacaacaaggactgaagcagcagctcccgggatcgtcgtgctaataataatagggacatttacatttcacccactagtttggatgcgctgctcaaatctatccccgtctaaattctctacttagtttttcc

SEQ ID NO: 111050 - protein, 200 aa, Zea mays subsp. mays
  misc_feature (1)..(200): Ceres Seq. ID no. 12637936
  misc_feature (10)..(183): Pfam Name: NADPH-dependent FMN reductase Pfam Description: NADPH-dependent FMN reductase
  misc_feature (10)..(196): Homolog of NCBI NO: 16767134 NR Description: putative oxidoreductase [Salmonella typhimurium
  misc_feature (10)..(197): Homolog of NCBI NO: 40549313 NR Description: YieF [Salmonella enterica]
  misc_feature (12)..(194): Homolog of NCBI NO: 22977744 NR Description: hypothetical protein [Ralstonia metallidurans]
  misc_feature (10)..(196): Homolog of NCBI NO: 22406524 NR Description: hypothetical protein [Ferroplasma acidarmanus]
  misc_feature (10)..(196): Homolog of NCBI NO: 15596401 NR Description: conserved hypothetical protein [Pseudomonas
  misc_feature (5)..(196): Homolog of NCBI NO: 24745889 NR Description: NAD(P)H:quinone oxidoreductase [Solanum tuberosum]
  misc_feature (1)..(196): Homolog of NCBI NO: 5002232 NR Description: NADPH:quinone oxidoreductase [Arabidopsis
  misc_feature (1)..(196): Homolog of NCBI NO: 15232856 NR Description: NADPH:quinone oxidoreductase (NQR)
  misc_feature (1)..(196): Homolog of NCBI NO: 34906652 NR Description: putative NADPH:quinone oxidoreductase
  misc_feature (1)..(200): Homolog of NCBI NO: 34906648 NR Description: putative NADPH:quinone oxidoreductase
MEAPAAKRVLRVASISGSIRKASWHSGLIRAAAEVCEDCIPGLRVDHLDVADLPMLNTDLETNGGTGFPPAVEAFRAKVRHADCFLFASPEYNYSITSPLKNALDWASRGVNCWADKPAAIVSAGGNFGGGRSSYHLRQVGVFLDIHFINKPELFVFAFFEPAKFFDSDGNLIDADTRERLKQVLLSLEAFTRRLQNNKD

SEQ ID NO: 111051 - protein, 146 aa, Zea mays subsp. mays
  misc_feature (1)..(146): Ceres Seq. ID no. 12637937
  misc_feature (1)..(129): Pfam Name: NADPH-dependent FMN reductase Pfam Description: NADPH-dependent FMN reductase
  misc_feature (1)..(142): Homolog of NCBI NO: 16767134 NR Description: putative oxidoreductase [Salmonella typhimurium
  misc_feature (1)..(143): Homolog of NCBI NO: 40549313 NR Description: YieF [Salmonella enterica]
  misc_feature (1)..(140): Homolog of NCBI NO: 22977744 NR Description: hypothetical protein [Ralstonia metallidurans]
  misc_feature (1)..(142): Homolog of NCBI NO: 22406524 NR Description: hypothetical protein [Ferroplasma acidarmanus]
  misc_feature (1)..(142): Homolog of NCBI NO: 15596401 NR Description: conserved hypothetical protein [Pseudomonas
  misc_feature (1)..(142): Homolog of NCBI NO: 24745889 NR Description: NAD(P)H:quinone oxidoreductase [Solanum tuberosum]
  misc_feature (1)..(142): Homolog of NCBI NO: 5002232 NR Description: NADPH:quinone oxidoreductase [Arabidopsis
  misc_feature (1)..(142): Homolog of NCBI NO: 15232856 NR Description: NADPH:quinone oxidoreductase (NQR)
  misc_feature (1)..(142): Homolog of NCBI NO: 34906652 NR Description: putative NADPH:quinone oxidoreductase
  misc_feature (1)..(146): Homolog of NCBI NO: 34906648 NR Description: putative NADPH:quinone oxidoreductase
MLNTDLETNGGTGFPPAVEAFRAKVRHADCFLFASPEYNYSITSPLKNALDWASRGVNCWADKPAAIVSAGGNFGGGRSSYHLRQVGVFLDIHFINKPELFVFAFFEPAKFFDSDGNLIDADTRERLKQVLLSLEAFTRRLQNNKD

SEQ ID NO: 111052 - protein, 123 aa, Zea mays subsp. mays
  misc_feature (1)..(123): Ceres Seq. ID no. 12637938
ESRVYSRQTGLTATSAIFRHGSTGCEARPPRGLHQRLHSQGLLAQRTHPRRRGGVRGLHPGAARRPPRRRRPADAQHRPRDERRHGLPARRRGVPRQGPPRRLLPLRLARIQLLHHQPTEERA

SEQ ID NO: 111053 - DNA, 1042 bp, Zea mays subsp. mays
  misc_feature (1)..(1042): Ceres Seq. ID no. 14312507
caactcagttattctacagctttaattttgcagagcgaccaccagtccaggtccagcgcgggacgcatcacatacacgcggtaccttcgttcgttctcaagcttatagcgcccgatcgaccctgcgcggagctagttcgttcgttccggcaggcggcggcagcgaagcagtgcgacgacgacgacgaggtacgtagagagcgagaggatagatgtcgagccgaaggtcgtcgtcgcacggcaacatctccgaggacgagatgaacgagctcgtctccaagctccaggccctgctccccagctcccgccgccgccgcggctccggccaggcgtcgacggcgaagctgctgaaggagacctgcagctacatcaagagcctccagcgggaggtggacgacctcagcgaccggctgtcggacctcttgtccaccatggaccacaacagccccgcggcggagatcatccgaagcatcctccgctcctgatcgcgcgcaagggcgaggtcaacgaacgccggcctccgatcgatcgccgacagcgcgcgctctccggccggctggtcacgtgcgggagctgagctcaattaggtagctagggtatatatacatataatatatatatctacatgtacgtgtatctaccttttcctttaccagtctccctagatctgagatcatgtggctagctccgtataaaaatgtactagccacacgctgacacgcacacgtatgcatgatggtctctgcgctaagcttcactgggtagtagggtatagcactagagcctaagcaagcttatcctcctcactttagtatagctcgcagcagcagcagtctctcgattcctcggcgatcttcggtggcttaattggatcgagctggctagtgcgctctctctctctctctcatctctagcaggcaggaaaagagacaaccgaccgaccactactagcctagcctagagcaaattgactgtcgttatgatgatgatgatgtactgctaaagcttttattaacgacttcaataacatgtacgtcctgcgg

SEQ ID NO: 111054 - protein, 90 aa, Zea mays subsp. mays
  misc_feature (1)..(90): Ceres Seq. ID no. 14312508
  misc_feature (8)..(56): Pfam Name: Helix-loop-helix DNA-binding domain Pfam Description: Helix-loop-helix DNA-binding domain
  misc_feature (12)..(88): Homolog of NCBI NO: 7487374 NR Description: hypothetical protein T23J7.40 - Arabidopsis
  misc_feature (1)..(88): Homolog of NCBI NO: 22331645 NR Description: bHLH protein family [Arabidopsis thaliana]
  misc_feature (3)..(88): Homolog of NCBI NO: 15221264 NR Description: bHLH protein family [Arabidopsis thaliana]
  misc_feature (3)..(88): Homolog of NCBI NO: 21617952 NR Description: DNA-binding protein-like [Arabidopsis thaliana]
  misc_feature (3)..(88): Homolog of NCBI NO: 15242227 NR Description: bHLH protein family [Arabidopsis thaliana]
  misc_feature (3)..(88): Homolog of NCBI NO: 9294226 NR Description: DNA-binding protein-like [Arabidopsis thaliana]
  misc_feature (1)..(88): Homolog of NCBI NO: 10241623 NR Description: putative DNA binding protein
  misc_feature (3)..(88): Homolog of NCBI NO: 15242499 NR Description: bHLH protein [Arabidopsis thaliana]
  misc_feature (1)..(88): Homolog of NCBI NO: 30689711 NR Description: expressed protein [Arabidopsis thaliana]
  misc_feature (1)..(89): Homolog of NCBI NO: 37534170 NR Description: hypothetical protein similar to putative DNA
MSSRRSSSHGNISEDEMNELVSKLQALLPSSRRRRGSGQASTAKLLKETCSYIKSLQREVDDLSDRLSDLLSTMDHNSPAAEIIRSILRS

SEQ ID NO: 111055 - protein, 86 aa, Zea mays subsp. mays
  misc_feature (1)..(86): Ceres Seq. ID no. 14312509
TQLFYSFNFAERPPVQVQRGTHHIHAVPSFVLKLIAPDRPCAELVRSFRQAAAAKQCDDDDEVRREREDRCRAEGRRRTATSPRTR

SEQ ID NO: 111056 - protein, 74 aa, Zea mays subsp. mays
  misc_feature (1)..(74): Ceres Seq. ID no. 14312510
  misc_feature (1)..(40): Pfam Name: Helix-loop-helix DNA-binding domain Pfam Description: Helix-loop-helix DNA-binding domain
  misc_feature (1)..(72): Homolog of NCBI NO: 7487374 NR Description: hypothetical protein T23J7.40 - Arabidopsis
  misc_feature (1)..(72): Homolog of NCBI NO: 22331645 NR Description: bHLH protein family [Arabidopsis thaliana]
  misc_feature (1)..(72): Homolog of NCBI NO: 15221264 NR Description: bHLH protein family [Arabidopsis thaliana]
  misc_feature (1)..(72): Homolog of NCBI NO: 21617952 NR Description: DNA-binding protein-like [Arabidopsis thaliana]
  misc_feature (1)..(72): Homolog of NCBI NO: 15242227 NR Description: bHLH protein family [Arabidopsis thaliana]
  misc_feature (1)..(72): Homolog of NCBI NO: 9294226 NR Description: DNA-binding protein-like [Arabidopsis thaliana]
  misc_feature (1)..(72): Homolog of NCBI NO: 10241623 NR Description: putative DNA binding protein
  misc_feature (1)..(72): Homolog of NCBI NO: 15242499 NR Description: bHLH protein [Arabidopsis thaliana]
  misc_feature (1)..(72): Homolog of NCBI NO: 30689711 NR Description: expressed protein [Arabidopsis thaliana]
  misc_feature (1)..(73): Homolog of NCBI NO: 37534170 NR Description: hypothetical protein similar to putative DNA
MNELVSKLQALLPSSRRRRGSGQASTAKLLKETCSYIKSLQREVDDLSDRLSDLLSTMDHNSPAAEIIRSILRS

SEQ ID NO: 111057 - DNA, 1172 bp, Zea mays subsp. mays
  misc_feature (1)..(1172): Ceres Seq. ID no. 14309653
  misc_feature: MA Experiment ID: 108522 Result: Up-regulated in Transcription
  misc_feature: MA Experiment 108522 PARAMETER Experiment Name: Zm_42deg_Heat_P Parameter: Age (day) Value: 8
  misc_feature: MA Experiment 108522 PARAMETER Experiment Name: Zm_42deg_Heat_P Parameter: Organism Value: Zea mays
  misc_feature: MA Experiment 108522 PARAMETER Experiment Name: Zm_42deg_Heat_P Parameter: Plant Line Value: 35A19
  misc_feature: MA Experiment 108522 PARAMETER Experiment Name: Zm_42deg_Heat_P Parameter: Temperature (deg C) Value: 42 vs. 22
  misc_feature: MA Experiment 108522 PARAMETER Experiment Name: Zm_42deg_Heat_P Parameter: Timepoint (hr) Value: 1
  misc_feature: MA Experiment 108522 PARAMETER Experiment Name: Zm_42deg_Heat_P Parameter: Tissue Value: Aerial
  misc_feature: MA Experiment ID: 108523 Result: Up-regulated in Transcription
  misc_feature: MA Experiment 108523 PARAMETER Experiment Name: Zm_42deg_Heat_P Parameter: Age (day) Value: 8
  misc_feature: MA Experiment 108523 PARAMETER Experiment Name: Zm_42deg_Heat_P Parameter: Organism Value: Zea mays
  misc_feature: MA Experiment 108523 PARAMETER Experiment Name: Zm_42deg_Heat_P Parameter: Plant Line Value: 35A19
  misc_feature: MA Experiment 108523 PARAMETER Experiment Name: Zm_42deg_Heat_P Parameter: Temperature (deg C) Value: 42 vs. 22
  misc_feature: MA Experiment 108523 PARAMETER Experiment Name: Zm_42deg_Heat_P Parameter: Timepoint (hr) Value: 6
  misc_feature: MA Experiment 108523 PARAMETER Experiment Name: Zm_42deg_Heat_P Parameter: Tissue Value: Aerial
  misc_feature: MA Experiment ID: 108527 Result: Down-regulated in Transcription
  misc_feature: MA Experiment 108527 PARAMETER Experiment Name: Zm_5mM_NO_P Parameter: Age (day) Value: 8
  misc_feature: MA Experiment 108527 PARAMETER Experiment Name: Zm_5mM_NO_P Parameter: Organism Value: Zea mays
  misc_feature: MA Experiment 108527 PARAMETER Experiment Name: Zm_5mM_NO_P Parameter: Plant Line Value: 35A19
  misc_feature: MA Experiment 108527 PARAMETER Experiment Name: Zm_5mM_NO_P Parameter: Timepoint (hr) Value: 6
  misc_feature: MA Experiment 108527 PARAMETER Experiment Name: Zm_5mM_NO_P Parameter: Tissue Value: Aerial
  misc_feature: MA Experiment 108527 PARAMETER Experiment Name: Zm_5mM_NO_P Parameter: Treatment Value: 5mM NO vs. No Treatment
  misc_feature: MA Experiment ID: 108535 Result: Up-regulated in Transcription
  misc_feature: MA Experiment 108535 PARAMETER Experiment Name: Zm_Meristem_P Parameter: Age (day) Value: 8
  misc_feature: MA Experiment 108535 PARAMETER Experiment Name: Zm_Meristem_P Parameter: Organism Value: Zea mays
  misc_feature: MA Experiment 108535 PARAMETER Experiment Name: Zm_Meristem_P Parameter: Plant Line Value: 35A19
  misc_feature: MA Experiment 108535 PARAMETER Experiment Name: Zm_Meristem_P Parameter: Tissue Value: Root Meristem vs. Above Root Meristem
  misc_feature: MA Experiment ID: 108544 Result: Down-regulated in Transcription
actgccaaatcccccagaaaatcaactcctccccaattccacgctgccaccaactcgccgtcctccgcgccaagcaccaaagctccgatggcccgcacgaagcagacggcgcgcaagtcgacgggctgagccaggaggagatcgaccgcatggtgcgggaggcggaggagttcgcggaggaggacaagaaggtgaaggagcggatcgacgcccgcaaccagctggagacgtacgtgtacaacatgaagaatacggtgggcgacaaggacaagctcgcggacaagctggaggcggaggagaaggagaaggtggaggaggccctcaaggaggcgctggagtggctggacgacaaccagtcggccgagaaggaggactacgaggagaagctcaaggaggtggaggccgtgtgcaaccccatcgtgtcggccgtgtaccagcggtcgggcggcgcccctggcgctagccctcactcaaccagacaaccagtacaccaccgccaccaagcccgggccgaataactctgccgggcaaccgccgcccttcgccggcaaagaacgcccaccagatccaccccggcctgctatggagtccgcggtgaacccgaaggcgtacccgctggctgatgcgcagctgacgatgggtatcctcgatatcatccagcaggccgccaactacaagcagctcaagaagggagcgaacgaagcgacgaaaaccctgaatagggggatatcggagttcgttgtgatggcggcggacacggagcctctcgagatcctgctccacctccccttgttagccgaggataagaacgtcccatatgtatttgttccatcgaaacaagctcttggccgtgcttgtggtgtgacaagacccgtcattgcttgctcagtgaccagcaatgagggtagccagctgaaacaacagatacagggtctcaaggactcgattgagaagcttctcatctgatttacctaagatctttcagtgtgatgggcctcggcgacacatttttcagaggcttggactggtgatggtgtcttgtttacattacgctttccaaactatatttgaacactgctaagtcaatcatatttgaattgtgcttcactttatatttgtgattgtcatgtatcctcaagatgcctctgtatcgtggtggctggtttctgtcc

SEQ ID NO: 111058 - protein, 171 aa, Zea mays subsp. mays
  misc_feature (1)..(171): Ceres Seq. ID no. 14309654
  misc_feature (42)..(145): Pfam Name: Hsp70 protein Pfam Description: Hsp70 protein
  misc_feature (42)..(163): Homolog of NCBI NO: 1346172 NR Description: Luminal binding protein precursor (BiP) (78 kDa
  misc_feature (42)..(164): Homolog of NCBI NO: 729623 NR Description: Luminal binding protein 5 precursor (BiP 5) (78
  misc_feature (42)..(152): Homolog of NCBI NO: 6911549 NR Description: heat shock protein 70 [Cucumis sativus]
  misc_feature (42)..(152): Homolog of NCBI NO: 729618 NR Description: Luminal binding protein 2 (BiP 2) (78 kDa
  misc_feature (42)..(163): Homolog of NCBI NO: 729617 NR Description: Luminal binding protein 1 (BiP 1) (78 kDa
  misc_feature (42)..(152): Homolog of NCBI NO: 7441868 NR Description: dnaK-type molecular chaperone BiP - rice
  misc_feature (42)..(152): Homolog of NCBI NO: 6016150 NR Description: Luminal binding protein 2 precursor (BiP2) (Heat
  misc_feature (42)..(152): Homolog of NCBI NO: 6016151 NR Description: Luminal binding protein 3 precursor (BiP3)
  misc_feature (42)..(152): Homolog of NCBI NO: 484510 NR Description: dnaK-type molecular chaperone - maize (fragment)
  misc_feature (42)..(152): Homolog of NCBI NO: 168424 NR Description: polypeptide chain-binding protein
CQIPQKINSSPIPRCHQLAVLRAKHQSSDGPHEADGAQVDGLSQEEIDRMVREAEEFAEEDKKVKERIDARNQLETYVYNMKNTVGDKDKLADKLEAEEKEKVEEALKEALEWLDDNQSAEKEDYEEKLKEVEAVCNPIVSAVYQRSGGAPGASPHSTRQPVHHRHQARAE

SEQ ID NO: 111059 - protein, 153 aa, Zea mays subsp. mays
  misc_feature (1)..(153): Ceres Seq. ID no. 14309655
  misc_feature (2)..(108): Homolog of NCBI NO: 38503350 NR Description: Twist related protein 1
LPNPPENQLLPNSTLPPTRRPPRQAPKLRWPARSRRRASRRAEPGGDRPHGAGGGGVRGGGQEGEGADRRPQPAGDVRVQHEEYGGRQGQARGQAGGGGEGEGGGGPQGGAGVAGRQPVGREGGLRGEAQGGGGRVQPHRVGRVPAVGRRPWR

SEQ ID NO: 111060 - protein, 127 aa, Zea mays subsp. mays
  misc_feature (1)..(127): Ceres Seq. ID no. 14309656
  misc_feature (21)..(112): Pfam Name: Ribosomal protein L7Ae/L30e/S12e/Gadd45 family Pfam Description: Ribosomal protein L7Ae/L30e/S12e/Gadd45 family
  misc_feature (8)..(94): Homolog of NCBI NO: 34857297 NR Description: similar to NHP2-like protein 1 (High mobility
  misc_feature (1)..(127): Homolog of NCBI NO: 34869608 NR Description: similar to NHP2-like protein 1 (High mobility
  misc_feature (1)..(105): Homolog of NCBI NO: 34861669 NR Description: similar to NHP2-like protein 1 (High mobility
  misc_feature (2)..(122): Homolog of NCBI NO: 34881726 NR Description: similar to NHP2-like protein 1 (High mobility
  misc_feature (5)..(45): Homolog of NCBI NO: 30687670 NR Description: ribosomal protein L7Ae family [Arabidopsis
  misc_feature (41)..(127): Homolog of NCBI NO: 30687670 NR Description: ribosomal protein L7Ae family [Arabidopsis
  misc_feature (5)..(127): Homolog of NCBI NO: 15235416 NR Description: ribosomal protein L7Ae family [Arabidopsis
  misc_feature (5)..(127): Homolog of NCBI NO: 15236127 NR Description: Ribosomal protein L7Ae family [Arabidopsis
  misc_feature (5)..(127): Homolog of NCBI NO: 15241276 NR Description: ribosomal protein L7Ae family [Arabidopsis
  misc_feature (5)..(127): Homolog of NCBI NO: 21592866 NR Description: Ribosomal protein L7Ae-like [Arabidopsis thaliana]
MESAVNPKAYPLADAQLTMGILDIIQQAANYKQLKKGANEATKTLNRGISEFVVMAADTEPLEILLHLPLLAEDKNVPYVFVPSKQALGRACGVTRPVIACSVTSNEGSQLKQQIQGLKDSIEKLLI

SEQ ID NO: 111061 - protein, 122 aa, Zea mays subsp. mays
  misc_feature (1)..(122): Ceres Seq. ID no. 14309657
  misc_feature (1)..(96): Pfam Name: Hsp70 protein Pfam Description: Hsp70 protein
  misc_feature (1)..(114): Homolog of NCBI NO: 1346172 NR Description: Luminal binding protein precursor (BiP) (78 kDa
  misc_feature (1)..(115): Homolog of NCBI NO: 729623 NR Description: Luminal binding protein 5 precursor (BiP 5) (78
  misc_feature (1)..(103): Homolog of NCBI NO: 6911549 NR Description: heat shock protein 70 [Cucumis sativus]
  misc_feature (1)..(103): Homolog of NCBI NO: 729618 NR Description: Luminal binding protein 2 (BiP 2) (78 kDa
  misc_feature (1)..(114): Homolog of NCBI NO: 729617 NR Description: Luminal binding protein 1 (BiP 1) (78 kDa
  misc_feature (1)..(103): Homolog of NCBI NO: 7441868 NR Description: dnaK-type molecular chaperone BiP - rice
  misc_feature (1)..(103): Homolog of NCBI NO: 484510 NR Description: dnaK-type molecular chaperone - maize (fragment)
  misc_feature (1)..(103): Homolog of NCBI NO: 6016150 NR Description: Luminal binding protein 2 precursor (BiP2) (Heat
  misc_feature (1)..(103): Homolog of NCBI NO: 6016151 NR Description: Luminal binding protein 3 precursor (BiP3)
  misc_feature (1)..(103): Homolog of NCBI NO: 168424 NR Description: polypeptide chain-binding protein
MVREAEEFAEEDKKVKERIDARNQLETYVYNMKNTVGDKDKLADKLEAEEKEKVEEALKEALEWLDDNQSAEKEDYEEKLKEVEAVCNPIVSAVYQRSGGAPGASPHSTRQPVHHRHQARAE

SEQ ID NO: 111062 - DNA, 936 bp, Zea mays subsp. mays
  misc_feature (1)..(936): Ceres Seq. ID no. 12634366
  misc_feature: MA Experiment ID: 108529 Result: Up-regulated in Transcription
  misc_feature: MA Experiment 108529 PARAMETER Experiment Name: Zm_Imbibed_Seeds_P Parameter: Age (day) Value: 5 vs. 2
  misc_feature: MA Experiment 108529 PARAMETER Experiment Name: Zm_Imbibed_Seeds_P Parameter: Organism Value: Zea mays
  misc_feature: MA Experiment 108529 PARAMETER Experiment Name: Zm_Imbibed_Seeds_P Parameter: Plant Line Value: 35A19
  misc_feature: MA Experiment 108529 PARAMETER Experiment Name: Zm_Imbibed_Seeds_P Parameter: Tissue Value: Roots vs. Embryo
  misc_feature: MA Experiment ID: 108546 Result: Up-regulated in Transcription
  misc_feature: MA Experiment 108546 PARAMETER Experiment Name: Zm_Imbibed_Seeds_P Parameter: Age (day) Value: 3 vs. 2
  misc_feature: MA Experiment 108546 PARAMETER Experiment Name: Zm_Imbibed_Seeds_P Parameter: Organism Value: Zea mays
  misc_feature: MA Experiment 108546 PARAMETER Experiment Name: Zm_Imbibed_Seeds_P Parameter: Plant Line Value: 35A19
  misc_feature: MA Experiment 108546 PARAMETER Experiment Name: Zm_Imbibed_Seeds_P Parameter: Tissue Value: Roots vs. Embryo
  misc_feature: MA Experiment ID: 108689 Result: Up-regulated in Transcription
  misc_feature: MA Experiment 108689 PARAMETER Experiment Name: Zm_Drought_Roots_P Parameter: Age (day) Value: 9
  misc_feature: MA Experiment 108689 PARAMETER Experiment Name: Zm_Drought_Roots_P Parameter: Organism Value: Zea mays
  misc_feature: MA Experiment 108689 PARAMETER Experiment Name: Zm_Drought_Roots_P Parameter: Plant Line Value: 35A19
  misc_feature: MA Experiment 108689 PARAMETER Experiment Name: Zm_Drought_Roots_P Parameter: Timepoint (hr) Value: 24
  misc_feature: MA Experiment 108689 PARAMETER Experiment Name: Zm_Drought_Roots_P Parameter: Tissue Value: Roots
  misc_feature: MA Experiment 108689 PARAMETER Experiment Name: Zm_Drought_Roots_P Parameter: Treatment Value: Drought vs. No Drought
  misc_feature: MA Experiment ID: 20000534 Result: Up-regulated in Transcription
  misc_feature: MA Experiment 20000534 PARAMETER Experiment Name: Zm_Hybrid_Pollen_P Parameter: Age (day) Value: 8
  misc_feature: MA Experiment 20000534 PARAMETER Experiment Name: Zm_Hybrid_Pollen_P Parameter: Organism Value: Zea mays
  misc_feature: MA Experiment 20000534 PARAMETER Experiment Name: Zm_Hybrid_Pollen_P Parameter: Plant Line Value: 35A19
  misc_feature: MA Experiment 20000534 PARAMETER Experiment Name: Zm_Hybrid_Pollen_P Parameter: Tissue Value: Pollen vs. Aerial
ctataactgaataaccgatcgaggagcgcaacgcacaccaccgaccagcgcgcgagaggacgtacggacgaacagctataggcggaggcgatggacggccaacgacgacggcaatggccgaggtcgcgctcgggagcggccgccgcgcgtctcctcctcctgctgctgctcctggcggtgtccttgggggccgggcatggtgatcacggcgcggcggctgcgggcgtcgccccggcagccggcaacggcatgacggagctgcagaagcacgtggcgttcttcgaccgcaaccacgacggcgtcatcaccttcgacgagacctaccaaggtctgcaggacgtcggagttggcgctgtcacggccaaagccagcgccgcgtacattaacggcgccctcgggcccaagaccagacctgataattcaaactcctcaacattggatatctacgtagagaacattcagaagggcaaacatggaagcgacacgggcgcctacgacgctcaaggaaggttcgttcccgcgaagctggacgagatgttcaccaagcacgccaagaccgtaccgaacgctctgacgaaagacgagctcgacgagatgctcaaggataaccgggagaagatggacgtcgcaggatggctgggagccaagtcggagtgggagatgctgtacaagctggccaaggacaaggacgggcgcctgcccaaggacaccgtcagggccgtgtacgacggatccctcttttaccagctggcggcgcaggggaagaagggctgattcggttacgttaatttcagtaatcaataacaagcgacgttttttttttgtcgtttctgaatgcttgcctgtgtggctgtgtaagaaagcgagtgggtcggactcaatggcaggcaacggttttgttttttttattattattttaacggatcggttctacct

SEQ ID NO: 111063 - protein, 227 aa, Zea mays subsp. mays
  misc_feature (1)..(227): Ceres Seq. ID no. 12634367
  misc_feature (53)..(220): Pfam Name: Caleosin related protein Pfam Description: Caleosin related protein
  misc_feature (10)..(220): Homolog of NCBI NO: 6900308 NR Description: putative calcium binding EF-hand protein
  misc_feature (54)..(220): Homolog of NCBI NO: 15220687 NR Description: pollen coat EF-hand protein
  misc_feature (41)..(223): Homolog of NCBI NO: 21617961 NR Description: unknown [Arabidopsis thaliana]
  misc_feature (41)..(223): Homolog of NCBI NO: 18409651 NR Description: Ca2+-binding EF-hand common family protein,
  misc_feature (57)..(199): Homolog of NCBI NO: 37652831 NR Description: calcium binding protein [Fagus sylvatica]
  misc_feature (52)..(227): Homolog of NCBI NO: 6478218 NR Description: caleosin [Sesamum indicum]
  misc_feature (57)..(223): Homolog of NCBI NO: 21593851 NR Description: unknown [Arabidopsis thaliana]
  misc_feature (57)..(223): Homolog of NCBI NO: 18409649 NR Description: Ca2+-binding EF-hand common family protein,
  misc_feature (28)..(220): Homolog of NCBI NO: 34902470 NR Description: Putative abscisic acid-induced protein - rice
MDGQRRRQWPRSRSGAAAARLLLLLLLLAVSLGAGHGDHGAAAAGVAPAAGNGMTELQKHVAFFDRNHDGVITFDETYQGLQDVGVGAVTAKASAAYINGALGPKTRPDNSNSSTLDIYVENIQKGKHGSDTGAYDAQGRFVPAKLDEMFTKHAKTVPNALTKDELDEMLKDNREKMDVAGWLGAKSEWEMLYKLAKDKDGRLPKDTVRAVYDGSLFYQLAAQGKKG

SEQ ID NO: 111064 - protein, 174 aa, Zea mays subsp. mays
  misc_feature (1)..(174): Ceres Seq. ID no. 12634368
  misc_feature (1)..(167): Pfam Name: Caleosin related protein Pfam Description: Caleosin related protein
  misc_feature (1)..(174): Homolog of NCBI NO: 6478218 NR Description: caleosin [Sesamum indicum]
  misc_feature (4)..(146): Homolog of NCBI NO: 37652831 NR Description: calcium binding protein [Fagus sylvatica]
  misc_feature (1)..(167): Homolog of NCBI NO: 6900308 NR Description: putative calcium binding EF-hand protein
  misc_feature (1)..(167): Homolog of NCBI NO: 15220687 NR Description: pollen coat EF-hand protein
  misc_feature (1)..(170): Homolog of NCBI NO: 21617961 NR Description: unknown [Arabidopsis thaliana]
  misc_feature (1)..(170): Homolog of NCBI NO: 18409651 NR Description: Ca2+-binding EF-hand common family protein,
  misc_feature (4)..(170): Homolog of NCBI NO: 21593851 NR Description: unknown [Arabidopsis thaliana]
  misc_feature (4)..(170): Homolog of NCBI NO: 18409649 NR Description: Ca2+-binding EF-hand common family protein,
  misc_feature (1)..(167): Homolog of NCBI NO: 34902470 NR Description: Putative abscisic acid-induced protein - rice
MTELQKHVAFFDRNHDGVITFDETYQGLQDVGVGAVTAKASAAYINGALGPKTRPDNSNSSTLDIYVENIQKGKHGSDTGAYDAQGRFVPAKLDEMFTKHAKTVPNALTKDELDEMLKDNREKMDVAGWLGAKSEWEMLYKLAKDKDGRLPKDTVRAVYDGSLFYQLAAQGKKG

SEQ ID NO: 111065 - DNA, 1085 bp, Zea mays subsp. mays
  misc_feature (1)..(1085): Ceres Seq. ID no. 14305128
  misc_feature: MA Experiment ID: 108522 Result: Up-regulated in Transcription
  misc_feature: MA Experiment 108522 PARAMETER Experiment Name: Zm_42deg_Heat_P Parameter: Age (day) Value: 8
  misc_feature: MA Experiment 108522 PARAMETER Experiment Name: Zm_42deg_Heat_P Parameter: Organism Value: Zea mays
  misc_feature: MA Experiment 108522 PARAMETER Experiment Name: Zm_42deg_Heat_P Parameter: Plant Line Value: 35A19
  misc_feature: MA Experiment 108522 PARAMETER Experiment Name: Zm_42deg_Heat_P Parameter: Temperature (deg C) Value: 42 vs. 22
  misc_feature: MA Experiment 108522 PARAMETER Experiment Name: Zm_42deg_Heat_P Parameter: Timepoint (hr) Value: 1
  misc_feature: MA Experiment 108522 PARAMETER Experiment Name: Zm_42deg_Heat_P Parameter: Tissue Value: Aerial
  misc_feature: MA Experiment ID: 108534 Result: Down-regulated in Transcription
  misc_feature: MA Experiment 108534 PARAMETER Experiment Name: Zm_4deg_Cold_P Parameter: Age (hr) Value: 8
  misc_feature: MA Experiment 108534 PARAMETER Experiment Name: Zm_4deg_Cold_P Parameter: Organism Value: Zea mays
  misc_feature: MA Experiment 108534 PARAMETER Experiment Name: Zm_4deg_Cold_P Parameter: Plant Line Value: 35A19
  misc_feature: MA Experiment 108534 PARAMETER Experiment Name: Zm_4deg_Cold_P Parameter: Temperature (deg C) Value: 4 vs. 22
  misc_feature: MA Experiment 108534 PARAMETER Experiment Name: Zm_4deg_Cold_P Parameter: Timepoint (hr) Value: 6
  misc_feature: MA Experiment 108534 PARAMETER Experiment Name: Zm_4deg_Cold_P Parameter: Tissue Value: Aerial
  misc_feature: MA Experiment ID: 20000488 Result: Up-regulated in Transcription
  misc_feature: MA Experiment 20000488 PARAMETER Experiment Name: Zm_50mM_NH4NO3_L_to_H_P Parameter: Organism Value: Zea mays
  misc_feature: MA Experiment 20000488 PARAMETER Experiment Name: Zm_50mM_NH4NO3_L_to_H_P Parameter: Timepoint (hr) Value: 8
  misc_feature: MA Experiment 20000488 PARAMETER Experiment Name: Zm_50mM_NH4NO3_L_to_H_P Parameter: Tissue Value: Leaves
  misc_feature: MA Experiment 20000488 PARAMETER Experiment Name: Zm_50mM_NH4NO3_L_to_H_P Parameter: Treatment Value: 50mM NH4NO3 vs. 100mM Mannitol
acaccctcgttttctcccgctctagctctctgctcacagccgcaagctccatcttcctccctgctgcagctcccgagcgccctgccctttgctccagcttgccgcgtgctctagcgtctgtgccgtggagcccctggcgcgggttcttctgcgcccggccatcctctctctccatcaccatggagcttcttttctccagccgcgccctgctcggttccatggccaacgttccccaagctcctccctccagtccagccgcggtgctccctgcgcgcctgctcccgcgcgcgttcctctgctcgtcgcgcccagcgagtctccatggtcaagcacgcgcggatctcctctgagctcgcccccggcctctactccttccagccggtcgagtctcgactgcgctcggcctccagctctgttgtcgcgcagctcgtcggcgttgcccctgtttccatggctgaccgggcggctcctctgcgtcgtcgttctctgggcccgggcatggggcttcctcgccgtcgcgcgcgctccttcctttgctctgctcggccatggacgccatgcagcagctccctgctcgtgcccaactccctgcgtacgcctgcgcccgagctgaacttcctcgccgcgccctgcgctctgctcacctcggctcctagttcggcgcgtgattttggagctctgcgcgaatggcgtgcgatttggtgctctgcggcaagcgcttcgtgtgggtggtgtggttcccaaaccgcgtgatgcactggctcgatgcccagaccccggcctccatcgtgctcgtctgcctcggcagcaagtacttcatgtcggagcagcggcagcaacaccctcctttgcgtcgtgctcactagatcgggcctcgcgcgtccatctgtgcaattcctgttcaattcatgttcggctatcggtttcgctggttgtcgatttcctattcgccatggtcagcctagctcgccaaccgtcgcgtcctctttacctgttgagttgtgtgttgccgcgttcacctcattgtgtcatcatggacttgtcggcgtactgcgctcgtctcaactcgaacgagttgaattgcc

SEQ ID NO: 111066 - protein, 143 aa, Zea mays subsp. mays
  misc_feature (1)..(143): Ceres Seq. ID no. 14305129
  misc_feature (1)..(143): Homolog of NCBI NO: 13592175 NR Description: ppg3 [Leishmania major]
MVKHARISSELAPGLYSFQPVESRLRSASSSVVAQLVGVAPVSMADRAAPLRRRSLGPGMGLPRRRARSFLCSARPWTPCSSSLLVPNSLRTPAPELNFLAAPCALLTSAPSSARDFGALREWRAIWCSAASASCGWCGSQTA

SEQ ID NO: 111067 - protein, 115 aa, Zea mays subsp. mays
  misc_feature (1)..(115): Ceres Seq. ID no. 14305130
TLVFSRSSSLLTAASSIFLPAAAPERPALCSSLPRALASVPWSPWRGFFCARPSSLSITMELLFSSRALLGSMANVPQAPPSSPAAVLPARLLPRAFLCSSRPASLHGQARADLL

SEQ ID NO: 111068 - protein, 106 aa, Zea mays subsp. mays
  misc_feature (1)..(106): Ceres Seq. ID no. 14305131
  misc_feature (1)..(26): Homolog of NCBI NO: 13592175 NR Description: ppg3 [Leishmania major]
MPRPRPPSCSSASAASTSCRSSGSNTLLCVVLTRSGLARPSVQFLFNSCSAIGFAGCRFPIRHGQPSSPTVASSLPVELCVAAFTSLCHHGLVGVLRSSQLERVEL

SEQ ID NO: 111069 - DNA, 2013 bp, Zea mays subsp. mays
  misc_feature (1)..(2013): Ceres Seq. ID no. 14302588
gcccactgctcagtccactgcccagcacggatctcatctcaccagctgcccgcgcatccaattcctctcgctggacggctgcagcacatcatcaggtgagaccgtgagagggaatgggatcaacaacaatgtcccctccatcttttcccgtcgtcctcctgctcctcctcctcgccaccatagccgcagccgccggaagcaacatggatgaggaggtggtggacgacctccagtatcttattgacaactccgacgacatccccaccaacgatcccgacgggtggcctgagggagactacgacgacgacgaccttctcttccaagatcaggaccaggacctcacaggccaccagccggagatcgacgagacccacgtcgtggtcctcgccgccgcaaacttttcctccttcctcgcctccagccaccatgttatggttgagttctacgcaccttggtgtggccactgccaggagctcgccccggattacgccgccgccgccgcgcatctcgccgctcaccaccaccaggcccacctcgcccttgccaaggtcgacgccaccgaggaaaccgacctcgcccagaagtacgacgtccagggcttccccaccatcctcttcttcatcgatggcgtccccagaggctataacggagccaggaccaaggaagccatcgtcgactggatcaacaagaagctcggcccagccgtgcaaaatgtcaccagcgtcgacgaggcccagagcatactcaccggagatgacaaagccgtccttgccttcctcgacacactatccggtgctcacagtgatgagcttgctgctgcttcgaggctggaagatagcatcaacttttatcagacttcgactcctgatgttgctaagcttttccatatcgatgcagcagcgaagcgtccatccgtagtgctgctgaagaaagaggaggagaagttgaccttctatgatggggagtttaaagcatcagccattgctggttttgtgtctgctaacaagcttcctttggtgaccacactaactcaagaaacttccccttctatttttggcaatccaatcaagaagcagattttactatttgctgttgcaagcgagtccaccaaatttctgcccatctttaaggaagcagcaaaaccatttaagggaaagttattatttgtctttgtggaacgagacagtgaggaagttggtgaaccagttgccgactactttggtattactggacaagagaccacagttcttgcttacactggtaatgaagatgctaggaaattttttcttgatggtgaggtgtcacttgaagctataaaggacttcgctgaaggtttcttggaagacaagcttacaccattctacaaatcggaaccagtgcctgaatctaatgatggggatgtgaaaattgttgttgggaagaatctggatctaatagtttttgatgaaacaaaagatgtacttcttgagatatatgcaccatggtgtggtcattgtcaatcgctggaacctacttacaacaatctagccaagcatctacgtagtgttgactcccttgtggtagccaaaatggatggtactaccaatgagcatccacgtgcaaagtctgacggatacccgacgattctcttctatccagctgggaagaaaagctttgagccaatcacttttgagggggagcggacagtggtagatctgtacaagttcatcaagaaacatgctagcatccctttcaagttgaagcgccaggagtcgagaaccgagagcactcgggcggagggtgtgaagagctctggtacgaactcaaaggacgaactgtaaagagctcagggttggatgtgtgttggagtggatcagggtgaaagtttccatctcaatacaagtagatcgatcttggtggatgcgagtgcagtgttggcctgagggaggagcagcagagatgagtgcttactgcttagagagaggaatgaaatcagcaactaatcaaataaaatcaaattccattattcctttt

SEQ ID NO: 111070 - protein, 568 aa, Zea mays subsp. mays
  misc_feature (1)..(568): Ceres Seq. ID no. 14302589
  misc_feature (429)..(537): Pfam Name: Thioredoxin Pfam Description: Thioredoxin
  misc_feature (69)..(568): Homolog of NCBI NO: 7437394 NR Description: protein disulfide-isomerase (EC 5.3.4.1) RB60 -
  misc_feature (57)..(568): Homolog of NCBI NO: 5902592 NR Description: protein disulfide isomerase precursor
  misc_feature (76)..(568): Homolog of NCBI NO: 20805287 NR Description: protein disulfide isomerase-like PDI-M
  misc_feature (82)..(567): Homolog of NCBI NO: 20805285 NR Description: protein disulfide isomerase-like PDI-H
  misc_feature (3)..(568): Homolog of NCBI NO: 7437396 NR Description: protein disulfide-isomerase homolog F28P10.60 -
  misc_feature (11)..(518): Homolog of NCBI NO: 30697408 NR Description: protein disulfide isomerase family [Arabidopsis
  misc_feature (3)..(568): Homolog of NCBI NO: 22331799 NR Description: protein disulfide isomerase family [Arabidopsis
  misc_feature (124)..(568): Homolog of NCBI NO: 28140231 NR Description: protein disulphide isomerase [Elaeis guineensis]
  misc_feature (11)..(566): Homolog of NCBI NO: 21593313 NR Description: protein disulfide isomerase precursor-like
  misc_feature (11)..(566): Homolog of NCBI NO: 30697404 NR Description: protein disulfide isomerase family [Arabidopsis
MGSTTMSPPSFPVVLLLLLLATIAAAAGSNMDEEVVDDLQYLIDNSDDIPTNDPDGWPEGDYDDDDLLFQDQDQDLTGHQPEIDETHVVVLAAANFSSFLASSHHVMVEFYAPWCGHCQELAPDYAAAAAHLAAHHHQAHLALAKVDATEETDLAQKYDVQGFPTILFFIDGVPRGYNGARTKEAIVDWINKKLGPAVQNVTSVDEAQSILTGDDKAVLAFLDTLSGAHSDELAAASRLEDSINFYQTSTPDVAKLFHIDAAAKRPSVVLLKKEEEKLTFYDGEFKASAIAGFVSANKLPLVTTLTQETSPSIFGNPIKKQILLFAVASESTKFLPIFKEAAKPFKGKLLFVFVERDSEEVGEPVADYFGITGQETTVLAYTGNEDARKFFLDGEVSLEAIKDFAEGFLEDKLTPFYKSEPVPESNDGDVKIVVGKNLDLIVFDETKDVLLEIYAPWCGHCQSLEPTYNNLAKHLRSVDSLVVAKMDGTTNEHPRAKSDGYPTILFYPAGKKSFEPITFEGERTVVDLYKFIKKHASIPFKLKRQESRTESTRAEGVKSSGTNSKDEL

SEQ ID NO: 111071 - protein, 563 aa, Zea mays subsp. mays
  misc_feature (1)..(563): Ceres Seq. ID no. 14302590
  misc_feature (424)..(532): Pfam Name: Thioredoxin Pfam Description: Thioredoxin
  misc_feature (64)..(563): Homolog of NCBI NO: 7437394 NR Description: protein disulfide-isomerase (EC 5.3.4.1) RB60 -
  misc_feature (52)..(563): Homolog of NCBI NO: 5902592 NR Description: protein disulfide isomerase precursor
  misc_feature (71)..(563): Homolog of NCBI NO: 20805287 NR Description: protein disulfide isomerase-like PDI-M
  misc_feature (77)..(562): Homolog of NCBI NO: 20805285 NR Description: protein disulfide isomerase-like PDI-H
  misc_feature (1)..(563): Homolog of NCBI NO: 7437396 NR Description: protein disulfide-isomerase homolog F28P10.60 -
  misc_feature (6)..(513): Homolog of NCBI NO: 30697408 NR Description: protein disulfide isomerase family [Arabidopsis
  misc_feature (1)..(563): Homolog of NCBI NO: 22331799 NR Description: protein disulfide isomerase family [Arabidopsis
  misc_feature (119)..(563): Homolog of NCBI NO: 28140231 NR Description: protein disulphide isomerase [Elaeis guineensis]
  misc_feature (6)..(561): Homolog of NCBI NO: 21593313 NR Description: protein disulfide isomerase precursor-like
  misc_feature (6)..(561): Homolog of NCBI NO: 30697404 NR Description: protein disulfide isomerase family [Arabidopsis
MSPPSFPVVLLLLLLATIAAAAGSNMDEEVVDDLQYLIDNSDDIPTNDPDGWPEGDYDDDDLLFQDQDQDLTGHQPEIDETHVVVLAAANFSSFLASSHHVMVEFYAPWCGHCQELAPDYAAAAAHLAAHHHQAHLALAKVDATEETDLAQKYDVQGFPTILFFIDGVPRGYNGARTKEAIVDWINKKLGPAVQNVTSVDEAQSILTGDDKAVLAFLDTLSGAHSDELAAASRLEDSINFYQTSTPDVAKLFHIDAAAKRPSVVLLKKEEEKLTFYDGEFKASAIAGFVSANKLPLVTTLTQETSPSIFGNPIKKQILLFAVASESTKFLPIFKEAAKPFKGKLLFVFVERDSEEVGEPVADYFGITGQETTVLAYTGNEDARKFFLDGEVSLEAIKDFAEGFLEDKLTPFYKSEPVPESNDGDVKIVVGKNLDLIVFDETKDVLLEIYAPWCGHCQSLEPTYNNLAKHLRSVDSLVVAKMDGTTNEHPRAKSDGYPTILFYPAGKKSFEPITFEGERTVVDLYKFIKKHASIPFKLKRQESRTESTRAEGVKSSGTNSKDEL

SEQ ID NO: 111072 - protein, 538 aa, Zea mays subsp. mays
  misc_feature (1)..(538): Ceres Seq. ID no. 14302591
  misc_feature (399)..(507): Pfam Name: Thioredoxin Pfam Description: Thioredoxin
  misc_feature (39)..(538): Homolog of NCBI NO: 7437394 NR Description: protein disulfide-isomerase (EC 5.3.4.1) RB60 -
  misc_feature (27)..(538): Homolog of NCBI NO: 5902592 NR Description: protein disulfide isomerase precursor
  misc_feature (46)..(538): Homolog of NCBI NO: 20805287 NR Description: protein disulfide isomerase-like PDI-M
  misc_feature (52)..(537): Homolog of NCBI NO: 20805285 NR Description: protein disulfide isomerase-like PDI-H
  misc_feature (1)..(538): Homolog of NCBI NO: 7437396 NR Description: protein disulfide-isomerase homolog F28P10.60 -
  misc_feature (1)..(488): Homolog of NCBI NO: 30697408 NR Description: protein disulfide isomerase family [Arabidopsis
  misc_feature (1)..(538): Homolog of NCBI NO: 22331799 NR Description: protein disulfide isomerase family [Arabidopsis
  misc_feature (94)..(538): Homolog of NCBI NO: 28140231 NR Description: protein disulphide isomerase [Elaeis guineensis]
  misc_feature (1)..(536): Homolog of NCBI NO: 21593313 NR Description: protein disulfide isomerase precursor-like
  misc_feature (1)..(536): Homolog of NCBI NO: 30697404 NR Description: protein disulfide isomerase family [Arabidopsis
MDEEVVDDLQYLIDNSDDIPTNDPDGWPEGDYDDDDLLFQDQDQDLTGHQPEIDETHVVVLAAANFSSFLASSHHVMVEFYAPWCGHCQELAPDYAAAAAHLAAHHHQAHLALAKVDATEETDLAQKYDVQGFPTILFFIDGVPRGYNGARTKEAIVDWINKKLGPAVQNVTSVDEAQSILTGDDKAVLAFLDTLSGAHSDELAAASRLEDSINFYQTSTPDVAKLFHIDAAAKRPSVVLLKKEEEKLTFYDGEFKASAIAGFVSANKLPLVTTLTQETSPSIFGNPIKKQILLFAVASESTKFLPIFKEAAKPFKGKLLFVFVERDSEEVGEPVADYFGITGQETTVLAYTGNEDARKFFLDGEVSLEAIKDFAEGFLEDKLTPFYKSEPVPESNDGDVKIVVGKNLDLIVFDETKDVLLEIYAPWCGHCQSLEPTYNNLAKHLRSVDSLVVAKMDGTTNEHPRAKSDGYPTILFYPAGKKSFEPITFEGERTVVDLYKFIKKHASIPFKLKRQESRTESTRAEGVKSSGTNSKDEL

SEQ ID NO: 111073 - DNA, 1094 bp, Zea mays subsp. mays
  misc_feature (1)..(1094): Ceres Seq. ID no. 13587495
ctttctctcctctcttctcttctctcctctccccgtggccacaccacagccgccggaagctcctcctcctcctccatgagagagatctagcaaagcatagcctccttcctgctggcgggatctccttttgattcgtaacttataacagaagaggaggaggcacagcaccttgtcaaatgatgaactctcagaagctgcagctgcccgttcaggatctgatgagtctgagagggagatcattcatcatcagcaaggtgatgatgcaccagtgcactgcagctgcttcgtcgtcgtcttcacctgctcctgctgctagaggcctgcaggttgctgcccatcccagtcccagcaggaggcggcgtcctcgtggcctcgttgccgcggccggcagtgacgacgacgaatgcgcttcagatggtggtgagtccgagtcgtcgtcgtcgggcgggaaagacgacggcggcggattgtcccgagaggatctggaacgcctggtcgggagtgacgacgatgccaagttcaatgggttggatcttgcaaacctcatcaggaagaagtacggtagatcgtacgatgtgacgctgataaagaaagagttcatggggaggaatctgctggccatgaatgtgatgtggaagtacagggagcaaagatcgttcccgctgagcgaggaggagtacctgctgcggctggacgatgtcgccaacacgctcaagtgctggggagccgtggcgcacgtgcgcaacacgctggagaagctcaaggagaggccgcgcatcggcaaggccgtcagcatcttcatcgacatggaccagaccggaggccgctccaacgaatggatttacaagtagcttcccactccatcgatcatgtatatgcatccatcgcccatgaacaaacacattcatcaggtgtatggagaatgaatgtgggtaccaatttcatctccaacaatcaagcacatcgcaaagatcataccatcacatgatcttattgattcttagatcgcacctaagcatgtctcttgatattctcacatatgacaccatgcatgtatacaacgagctccttcatcaatactagttaagtattgc

SEQ ID NO: 111074 - protein, 224 aa, Zea mays subsp. mays
  misc_feature (1)..(224): Ceres Seq. ID no. 13587496
  misc_feature (119)..(213): Homolog of NCBI NO: 33861020 NR Description: conserved hypothetical protein
  misc_feature (119)..(207): Homolog of NCBI NO: 33866372 NR Description: conserved hypothetical protein [Synechococcus sp.
  misc_feature (117)..(213): Homolog of NCBI NO: 37521175 NR Description: hypothetical protein gsr1606 [Gloeobacter
  misc_feature (117)..(222): Homolog of NCBI NO: 22298501 NR Description: ORF_ID:tll0958~hypothetical protein
  misc_feature (117)..(221): Homolog of NCBI NO: 16332324 NR Description: unknown protein [Synechocystis sp. PCC 6803]
  misc_feature (117)..(222): Homolog of NCBI NO: 23130142 NR Description: hypothetical protein [Nostoc punctiforme]
  misc_feature (117)..(222): Homolog of NCBI NO: 17229946 NR Description: hypothetical protein [Nostoc sp. PCC 7120]
  misc_feature (117)..(222): Homolog of NCBI NO: 23041855 NR Description: hypothetical protein [Trichodesmium erythraeum
  misc_feature (79)..(224): Homolog of NCBI NO: 18402409 NR Description: expressed protein [Arabidopsis thaliana]
  misc_feature (79)..(224): Homolog of NCBI NO: 11994202 NR Description: dbj|BAA18864.1~gene_id:MPN9.15~similar to unknown
MMNSQKLQLPVQDLMSLRGRSFIISKVMMHQCTAAASSSSSPAPAARGLQVAAHPSPSRRRRPRGLVAAAGSDDDECASDGGESESSSSGGKDDGGGLSREDLERLVGSDDDAKFNGLDLANLIRKKYGRSYDVTLIKKEFMGRNLLAMNVMWKYREQRSFPLSEEEYLLRLDDVANTLKCWGAVAHVRNTLEKLKERPRIGKAVSIFIDMDQTGGRSNEWIYK

SEQ ID NO: 111075 - protein, 223 aa, Zea mays subsp. mays
  misc_feature (1)..(223): Ceres Seq. ID no. 13587497
  misc_feature (118)..(212): Homolog of NCBI NO: 33861020 NR Description: conserved hypothetical protein
  misc_feature (118)..(206): Homolog of NCBI NO: 33866372 NR Description: conserved hypothetical protein [Synechococcus sp.
  misc_feature (116)..(212): Homolog of NCBI NO: 37521175 NR Description: hypothetical protein gsr1606 [Gloeobacter
  misc_feature (116)..(221): Homolog of NCBI NO: 22298501 NR Description: ORF_ID:tll0958~hypothetical protein
  misc_feature (116)..(220): Homolog of NCBI NO: 16332324 NR Description: unknown protein [Synechocystis sp. PCC 6803]
  misc_feature (116)..(221): Homolog of NCBI NO: 23130142 NR Description: hypothetical protein [Nostoc punctiforme]
  misc_feature (116)..(221): Homolog of NCBI NO: 17229946 NR Description: hypothetical protein [Nostoc sp. PCC 7120]
  misc_feature (116)..(221): Homolog of NCBI NO: 23041855 NR Description: hypothetical protein [Trichodesmium erythraeum
  misc_feature (78)..(223): Homolog of NCBI NO: 18402409 NR Description: expressed protein [Arabidopsis thaliana]
  misc_feature (78)..(223): Homolog of NCBI NO: 11994202 NR Description: dbj|BAA18864.1~gene_id:MPN9.15~similar to unknown
MNSQKLQLPVQDLMSLRGRSFIISKVMMHQCTAAASSSSSPAPAARGLQVAAHPSPSRRRRPRGLVAAAGSDDDECASDGGESESSSSGGKDDGGGLSREDLERLVGSDDDAKFNGLDLANLIRKKYGRSYDVTLIKKEFMGRNLLAMNVMWKYREQRSFPLSEEEYLLRLDDVANTLKCWGAVAHVRNTLEKLKERPRIGKAVSIFIDMDQTGGRSNEWIYK

SEQ ID NO: 111076 - protein, 210 aa, Zea mays subsp. mays
  misc_feature (1)..(210): Ceres Seq. ID no. 13587498
  misc_feature (105)..(199): Homolog of NCBI NO: 33861020 NR Description: conserved hypothetical protein
  misc_feature (105)..(193): Homolog of NCBI NO: 33866372 NR Description: conserved hypothetical protein [Synechococcus sp.
  misc_feature (103)..(199): Homolog of NCBI NO: 37521175 NR Description: hypothetical protein gsr1606 [Gloeobacter
  misc_feature (103)..(208): Homolog of NCBI NO: 22298501 NR Description: ORF_ID:tll0958~hypothetical protein
  misc_feature (103)..(207): Homolog of NCBI NO: 16332324 NR Description: unknown protein [Synechocystis sp. PCC 6803]
  misc_feature (103)..(208): Homolog of NCBI NO: 23130142 NR Description: hypothetical protein [Nostoc punctiforme]
  misc_feature (103)..(208): Homolog of NCBI NO: 17229946 NR Description: hypothetical protein [Nostoc sp. PCC 7120]
  misc_feature (103)..(208): Homolog of NCBI NO: 23041855 NR Description: hypothetical protein [Trichodesmium erythraeum
  misc_feature (65)..(210): Homolog of NCBI NO: 18402409 NR Description: expressed protein [Arabidopsis thaliana]
  misc_feature (65)..(210): Homolog of NCBI NO: 11994202 NR Description: dbj|BAA18864.1~gene_id:MPN9.15~similar to unknown
MSLRGRSFIISKVMMHQCTAAASSSSSPAPAARGLQVAAHPSPSRRRRPRGLVAAAGSDDDECASDGGESESSSSGGKDDGGGLSREDLERLVGSDDDAKFNGLDLANLIRKKYGRSYDVTLIKKEFMGRNLLAMNVMWKYREQRSFPLSEEEYLLRLDDVANTLKCWGAVAHVRNTLEKLKERPRIGKAVSIFIDMDQTGGRSNEWIYK

SEQ ID NO: 111077 - DNA, 1091 bp, Zea mays subsp. mays
  misc_feature (1)..(1091): Ceres Seq. ID no. 14305178
  misc_feature: MA Experiment ID: 108527 Result: Down-regulated in Transcription
  misc_feature: MA Experiment 108527 PARAMETER Experiment Name: Zm_5mM_NO_P Parameter: Age (day) Value: 8
  misc_feature: MA Experiment 108527 PARAMETER Experiment Name: Zm_5mM_NO_P Parameter: Organism Value: Zea mays
  misc_feature: MA Experiment 108527 PARAMETER Experiment Name: Zm_5mM_NO_P Parameter: Plant Line Value: 35A19
  misc_feature: MA Experiment 108527 PARAMETER Experiment Name: Zm_5mM_NO_P Parameter: Timepoint (hr) Value: 6
  misc_feature: MA Experiment 108527 PARAMETER Experiment Name: Zm_5mM_NO_P Parameter: Tissue Value: Aerial
  misc_feature: MA Experiment 108527 PARAMETER Experiment Name: Zm_5mM_NO_P Parameter: Treatment Value: 5mM NO vs. No Treatment
  misc_feature: MA Experiment ID: 108528 Result: Up-regulated in Transcription
  misc_feature: MA Experiment 108528 PARAMETER Experiment Name: Zm_Imbibed_Seeds_P Parameter: Age (day) Value: 5 vs. 2
  misc_feature: MA Experiment 108528 PARAMETER Experiment Name: Zm_Imbibed_Seeds_P Parameter: Organism Value: Zea mays
  misc_feature: MA Experiment 108528 PARAMETER Experiment Name: Zm_Imbibed_Seeds_P Parameter: Plant Line Value: 35A19
  misc_feature: MA Experiment 108528 PARAMETER Experiment Name: Zm_Imbibed_Seeds_P Parameter: Tissue Value: Aerial vs. Embryo
  misc_feature: MA Experiment ID: 108530 Result: Up-regulated in Transcription
  misc_feature: MA Experiment 108530 PARAMETER Experiment Name: Zm_Imbibed_Seeds_P Parameter: Age (day) Value: 6 vs. 2
  misc_feature: MA Experiment 108530 PARAMETER Experiment Name: Zm_Imbibed_Seeds_P Parameter: Organism Value: Zea mays
  misc_feature: MA Experiment 108530 PARAMETER Experiment Name: Zm_Imbibed_Seeds_P Parameter: Plant Line Value: 35A19
  misc_feature: MA Experiment 108530 PARAMETER Experiment Name: Zm_Imbibed_Seeds_P Parameter: Tissue Value: Aerial vs. Embryo
  misc_feature: MA Experiment ID: 108534 Result: Down-regulated in Transcription
  misc_feature: MA Experiment 108534 PARAMETER Experiment Name: Zm_4deg_Cold_P Parameter: Age (hr) Value: 8
  misc_feature: MA Experiment 108534 PARAMETER Experiment Name: Zm_4deg_Cold_P Parameter: Organism Value: Zea mays
  misc_feature: MA Experiment 108534 PARAMETER Experiment Name: Zm_4deg_Cold_P Parameter: Plant Line Value: 35A19
  misc_feature: MA Experiment 108534 PARAMETER Experiment Name: Zm_4deg_Cold_P Parameter: Temperature (deg C) Value: 4 vs. 22
  misc_feature: MA Experiment 108534 PARAMETER Experiment Name: Zm_4deg_Cold_P Parameter: Timepoint (hr) Value: 6
  misc_feature: MA Experiment 108534 PARAMETER Experiment Name: Zm_4deg_Cold_P Parameter: Tissue Value: Aerial
  misc_feature: MA Experiment ID: 108536 Result: Down-regulated in Transcription
  misc_feature: MA Experiment 108536 PARAMETER Experiment Name: Zm_Meristem_P Parameter: Age (day) Value: 8
  misc_feature: MA Experiment 108536 PARAMETER Experiment Name: Zm_Meristem_P Parameter: Organism Value: Zea mays
  misc_feature: MA Experiment 108536 PARAMETER Experiment Name: Zm_Meristem_P Parameter: Plant Line Value: 35A19
  misc_feature: MA Experiment 108536 PARAMETER Experiment Name: Zm_Meristem_P Parameter: Tissue Value: Shoot Meristem vs. Above Shoot Meristem
  misc_feature: MA Experiment ID: 108545 Result: Up-regulated in Transcription
  misc_feature: MA Experiment 108545 PARAMETER Experiment Name: Zm_Imbibed_Seeds_P Parameter: Age (day) Value: 3 vs. 2
  misc_feature: MA Experiment 108545 PARAMETER Experiment Name: Zm_Imbibed_Seeds_P Parameter: Organism Value: Zea mays
  misc_feature: MA Experiment 108545 PARAMETER Experiment Name: Zm_Imbibed_Seeds_P Parameter: Plant Line Value: 35A19
  misc_feature: MA Experiment 108545 PARAMETER Experiment Name: Zm_Imbibed_Seeds_P Parameter: Tissue Value: Aerial vs. Embryo
  misc_feature: MA Experiment ID: 108547 Result: Up-regulated in Transcription
  misc_feature: MA Experiment 108547 PARAMETER Experiment Name: Zm_Imbibed_Seeds_P Parameter: Age (day) Value: 4 vs. 2
  misc_feature: MA Experiment 108547 PARAMETER Experiment Name: Zm_Imbibed_Seeds_P Parameter: Organism Value: Zea mays
  misc_feature: MA Experiment 108547 PARAMETER Experiment Name: Zm_Imbibed_Seeds_P Parameter: Plant Line Value: 35A19
  misc_feature: MA Experiment 108547 PARAMETER Experiment Name: Zm_Imbibed_Seeds_P Parameter: Tissue Value: Aerial vs. Embryo
  misc_feature: MA Experiment ID: 108687 Result: Down-regulated in Transcription
  misc_feature: MA Experiment 108687 PARAMETER Experiment Name: Zm_Embryos-Flowers__P Parameter: Tissue Value: Embryo vs. Aerial+
  misc_feature: MA Experiment ID: 108688 Result: Down-regulated in Transcription
  misc_feature: MA Experiment 108688 PARAMETER Experiment Name: Zm_Embryos-Flowers__P Parameter: Tissue Value: Immature Flowers vs. Aerial+
  misc_feature: MA Experiment ID: 20000626 Result: Down-regulated in Transcription
  misc_feature: MA Experiment 20000626 PARAMETER Experiment Name: Zm_Herbicide-Treatments_P Parameter: Timepoint (hr) Value: 12
  misc_feature: MA Experiment 20000626 PARAMETER Experiment Name: Zm_Herbicide-Treatments_P Parameter: Tissue Value: Aerial
  misc_feature: MA Experiment 20000626 PARAMETER Experiment Name: Zm_Herbicide-Treatments_P Parameter: Treatment Value: Roundup vs. No Treatment
  misc_feature: MA Experiment ID: 20001608 Result: Up-regulated in Transcription
  misc_feature: MA Experiment 20001608 PARAMETER Experiment Name: Zm_50ppm_KNO3_L-to-H_P Parameter: Age (day) Value: 21
  misc_feature: MA Experiment 20001608 PARAMETER Experiment Name: Zm_50ppm_KNO3_L-to-H_P Parameter: Organism Value: Zea mays
  misc_feature: MA Experiment 20001608 PARAMETER Experiment Name: Zm_50ppm_KNO3_L-to-H_P Parameter: Plant Line Value: 35A19
  misc_feature: MA Experiment 20001608 PARAMETER Experiment Name: Zm_50ppm_KNO3_L-to-H_P Parameter: Timepoint (hr) Value: 48
  misc_feature: MA Experiment 20001608 PARAMETER Experiment Name: Zm_50ppm_KNO3_L-to-H_P Parameter: Tissue Value: Shoots
  misc_feature: MA Experiment 20001608 PARAMETER Experiment Name: Zm_50ppm_KNO3_L-to-H_P Parameter: Treatment Value: 50ppm KNO3 vs. 50ppm KCl
agttgctcggctcggctgtgcctgtgtccccccgaaaatggcctcgtccccgctcttcacctcgctccggctgcccgtgcccaccatcataccgcgctgtgcttctccgccgcacggcgtgccctcggcggacgacgccgtccctcggccggcgcctctcgtggcggccgctagccacaggagggagctggtggtaggggcggcgctgaccgcggtgctgttgccgagggcgccgctgccggcccaggcgcgcgaggtcgcggtcggcacgtacctgccaccggcgccgtccaacccgggcttcgtcttcttccgcgccacctccaaggacacccccgcgctccgcgccggcaatgtggaaccgtacgagttcatcctgccgccgacctggaagcagacgcgcgtcgccaacatcctgtccgggaactactgccagcccaagtgcgccgagccgtgggtggaggtgaagttcgaggacgagaagcagggcaaggtgcaggtggtggcctcgccgctcatccgcctcaccaacaagcccaacgccacgatcgaggacatcggcagccccgagaggctgatcgcctcgctggggcctttcgtcaccggcaacaccttcgactccgacgagctcgtcgacaccaacgtcgagaacgtcgatggacagacttactacagctacgtgctggagactccattggcgctaacaggttcgcacaacctggccaaggccaccgccaaggggagcacggtggtgctgttcgtcgcaagcgccaacgacaagcagtggccggcgtcgcagaaggttctgaaagccatagtggactcgtttcaaatatgactggtttgggtgatgcgttacgttgttggcaacatctatcggcctttttgacttgagttcagttgagttgcttgtacccgaagctctaaaatacgaggtatatataagcttataaagccaaaagggaaaagaaggcactgcttgttttaggcttgagtcacggttgctgttcgtagcttgtcgaagacgacatgtcagatgtacatgtacacggaaatgaactttttcagtaacgaaatgctggttaatatcc

SEQ ID NO: 111078 - protein, 278 aa, Zea mays subsp. mays
  misc_feature (1)..(278): Ceres Seq. ID no. 14305179
  misc_feature (152)..(278): Pfam Name: PsbP Pfam Description: PsbP
  misc_feature (121)..(278): Homolog of NCBI NO: 8928455 NR Description: Thylakoid lumenal 29.8 kDa protein, chloroplast
  misc_feature (58)..(278): Homolog of NCBI NO: 30699237 NR Description: thylakoid lumenal 29.8 kDa protein [Arabidopsis
  misc_feature (60)..(278): Homolog of NCBI NO: 15228983 NR Description: thylakoid lumenal 20 kDa protein [Arabidopsis
  misc_feature (243)..(278): Homolog of NCBI NO: 34909044 NR Description: P0034E02.35 [Oryza sativa (japonica
  misc_feature (16)..(222): Homolog of NCBI NO: 34909044 NR Description: P0034E02.35 [Oryza sativa (japonica
VARLGCACVPPKMASSPLFTSLRLPVPTIIPRCASPPHGVPSADDAVPRPAPLVAAASHRRELVVGAALTAVLLPRAPLPAQAREVAVGTYLPPAPSNPGFVFFRATSKDTPALRAGNVEPYEFILPPTWKQTRVANILSGNYCQPKCAEPWVEVKFEDEKQGKVQVVASPLIRLTNKPNATIEDIGSPERLIASLGPFVTGNTFDSDELVDTNVENVDGQTYYSYVLETPLALTGSHNLAKATAKGSTVVLFVASANDKQWPASQKVLKAIVDSFQI

SEQ ID NO: 111079 - protein, 266 aa, Zea mays subsp. mays
  misc_feature (1)..(266): Ceres Seq. ID no. 14305180
  misc_feature (140)..(266): Pfam Name: PsbP Pfam Description: PsbP
  misc_feature (109)..(266): Homolog of NCBI NO: 8928455 NR Description: Thylakoid lumenal 29.8 kDa protein, chloroplast
  misc_feature (46)..(266): Homolog of NCBI NO: 30699237 NR Description: thylakoid lumenal 29.8 kDa protein [Arabidopsis
  misc_feature (48)..(266): Homolog of NCBI NO: 15228983 NR Description: thylakoid lumenal 20 kDa protein [Arabidopsis
  misc_feature (231)..(266): Homolog of NCBI NO: 34909044 NR Description: P0034E02.35 [Oryza sativa (japonica
  misc_feature (4)..(210): Homolog of NCBI NO: 34909044 NR Description: P0034E02.35 [Oryza sativa (japonica
MASSPLFTSLRLPVPTIIPRCASPPHGVPSADDAVPRPAPLVAAASHRRELVVGAALTAVLLPRAPLPAQAREVAVGTYLPPAPSNPGFVFFRATSKDTPALRAGNVEPYEFILPPTWKQTRVANILSGNYCQPKCAEPWVEVKFEDEKQGKVQVVASPLIRLTNKPNATIEDIGSPERLIASLGPFVTGNTFDSDELVDTNVENVDGQTYYSYVLETPLALTGSHNLAKATAKGSTVVLFVASANDKQWPASQKVLKAIVDSFQI

SEQ ID NO: 111080 - DNA, 643 bp, Zea mays subsp. mays
  misc_feature (1)..(643): Ceres Seq. ID no. 13589405
  misc_feature: MA Experiment ID: 108504 Result: Down-regulated in Transcription
  misc_feature: MA Experiment 108504 PARAMETER Experiment Name: Zm_Drought_P Parameter: Age (day) Value: 8
  misc_feature: MA Experiment 108504 PARAMETER Experiment Name: Zm_Drought_P Parameter: Organism Value: Zea mays
  misc_feature: MA Experiment 108504 PARAMETER Experiment Name: Zm_Drought_P Parameter: Plant Line Value: 35A19
  misc_feature: MA Experiment 108504 PARAMETER Experiment Name: Zm_Drought_P Parameter: Timepoint (hr) Value: 12
  misc_feature: MA Experiment 108504 PARAMETER Experiment Name: Zm_Drought_P Parameter: Tissue Value: Aerial
  misc_feature: MA Experiment 108504 PARAMETER Experiment Name: Zm_Drought_P Parameter: Treatment Value: Drought vs. No Drought
  misc_feature: MA Experiment ID: 108515 Result: Down-regulated in Transcription
  misc_feature: MA Experiment 108515 PARAMETER Experiment Name: Zm_2mM_SA_P Parameter: Age (day) Value: 8
  misc_feature: MA Experiment 108515 PARAMETER Experiment Name: Zm_2mM_SA_P Parameter: Organism Value: Zea mays
  misc_feature: MA Experiment 108515 PARAMETER Experiment Name: Zm_2mM_SA_P Parameter: Plant Line Value: 35A19
  misc_feature: MA Experiment 108515 PARAMETER Experiment Name: Zm_2mM_SA_P Parameter: Timepoint (hr) Value: 12
  misc_feature: MA Experiment 108515 PARAMETER Experiment Name: Zm_2mM_SA_P Parameter: Tissue Value: Aerial
  misc_feature: MA Experiment 108515 PARAMETER Experiment Name: Zm_2mM_SA_P Parameter: Treatment Value: 2mM SA vs. No Treatment
  misc_feature: MA Experiment ID: 108527 Result: Down-regulated in Transcription
  misc_feature: MA Experiment 108527 PARAMETER Experiment Name: Zm_5mM_NO_P Parameter: Age (day) Value: 8
  misc_feature: MA Experiment 108527 PARAMETER Experiment Name: Zm_5mM_NO_P Parameter: Organism Value: Zea mays
  misc_feature: MA Experiment 108527 PARAMETER Experiment Name: Zm_5mM_NO_P Parameter: Plant Line Value: 35A19
  misc_feature: MA Experiment 108527 PARAMETER Experiment Name: Zm_5mM_NO_P Parameter: Timepoint (hr) Value: 6
  misc_feature: MA Experiment 108527 PARAMETER Experiment Name: Zm_5mM_NO_P Parameter: Tissue Value: Aerial
  misc_feature: MA Experiment 108527 PARAMETER Experiment Name: Zm_5mM_NO_P Parameter: Treatment Value: 5mM NO vs. No Treatment
  misc_feature: MA Experiment ID: 108535 Result: Up-regulated in Transcription
  misc_feature: MA Experiment 108535 PARAMETER Experiment Name: Zm_Meristem_P Parameter: Age (day) Value: 8
  misc_feature: MA Experiment 108535 PARAMETER Experiment Name: Zm_Meristem_P Parameter: Organism Value: Zea mays
  misc_feature: MA Experiment 108535 PARAMETER Experiment Name: Zm_Meristem_P Parameter: Plant Line Value: 35A19
  misc_feature: MA Experiment 108535 PARAMETER Experiment Name: Zm_Meristem_P Parameter: Tissue Value: Root Meristem vs. Above Root Meristem
  misc_feature: MA Experiment ID: 108543 Result: Up-regulated in Transcription
  misc_feature: MA Experiment ID: 108547 Result: Up-regulated in Transcription
  misc_feature: MA Experiment 108547 PARAMETER Experiment Name: Zm_Imbibed_Seeds_P Parameter: Age (day) Value: 4 vs. 2
  misc_feature: MA Experiment 108547 PARAMETER Experiment Name: Zm_Imbibed_Seeds_P Parameter: Organism Value: Zea mays
  misc_feature: MA Experiment 108547 PARAMETER Experiment Name: Zm_Imbibed_Seeds_P Parameter: Plant Line Value: 35A19
  misc_feature: MA Experiment 108547 PARAMETER Experiment Name: Zm_Imbibed_Seeds_P Parameter: Tissue Value: Aerial vs. Embryo
  misc_feature: MA Experiment ID: 108556 Result: Down-regulated in Transcription
  misc_feature: MA Experiment 108556 PARAMETER Experiment Name: Zm_Drought_P Parameter: Age (day) Value: 9
  misc_feature: MA Experiment 108556 PARAMETER Experiment Name: Zm_Drought_P Parameter: Organism Value: Zea mays
  misc_feature: MA Experiment 108556 PARAMETER Experiment Name: Zm_Drought_P Parameter: Plant Line Value: 35A19
  misc_feature: MA Experiment 108556 PARAMETER Experiment Name: Zm_Drought_P Parameter: Timepoint (hr) Value: 24
  misc_feature: MA Experiment 108556 PARAMETER Experiment Name: Zm_Drought_P Parameter: Tissue Value: Aerial
  misc_feature: MA Experiment 108556 PARAMETER Experiment Name: Zm_Drought_P Parameter: Treatment Value: Drought vs. No Drought
  misc_feature: MA Experiment ID: 108559 Result: Down-regulated in Transcription
  misc_feature: MA Experiment 108559 PARAMETER Experiment Name: Zm_5mM_NO_P Parameter: Age (day) Value: 8
  misc_feature: MA Experiment 108559 PARAMETER Experiment Name: Zm_5mM_NO_P Parameter: Organism Value: Zea mays
  misc_feature: MA Experiment 108559 PARAMETER Experiment Name: Zm_5mM_NO_P Parameter: Plant Line Value: 35A19
  misc_feature: MA Experiment 108559 PARAMETER Experiment Name: Zm_5mM_NO_P Parameter: Timepoint (hr) Value: 12
  misc_feature: MA Experiment 108559 PARAMETER Experiment Name: Zm_5mM_NO_P Parameter: Tissue Value: Aerial
  misc_feature: MA Experiment 108559 PARAMETER Experiment Name: Zm_5mM_NO_P Parameter: Treatment Value: 5mM NO vs. No Treatment
  misc_feature: MA Experiment ID: 108597 Result: Down-regulated in Transcription
  misc_feature: MA Experiment 108597 PARAMETER Experiment Name: Zm_100uM_ABA_P Parameter: Age (day) Value: 9
  misc_feature: MA Experiment 108597 PARAMETER Experiment Name: Zm_100uM_ABA_P Parameter: Organism Value: Zea mays
  misc_feature: MA Experiment 108597 PARAMETER Experiment Name: Zm_100uM_ABA_P Parameter: Plant Line Value: 35A19
  misc_feature: MA Experiment 108597 PARAMETER Experiment Name: Zm_100uM_ABA_P Parameter: Timepoint (hr) Value: 24
  misc_feature: MA Experiment 108597 PARAMETER Experiment Name: Zm_100uM_ABA_P Parameter: Tissue Value: Aerial
  misc_feature: MA Experiment 108597 PARAMETER Experiment Name: Zm_100uM_ABA_P Parameter: Treatment Value: 100uM ABA vs. No Treatment
  misc_feature: MA Experiment ID: 108689 Result: Down-regulated in Transcription
  misc_feature: MA Experiment 108689 PARAMETER Experiment Name: Zm_Drought_Roots_P Parameter: Age (day) Value: 9
  misc_feature: MA Experiment 108689 PARAMETER Experiment Name: Zm_Drought_Roots_P Parameter: Organism Value: Zea mays
  misc_feature: MA Experiment 108689 PARAMETER Experiment Name: Zm_Drought_Roots_P Parameter: Plant Line Value: 35A19
  misc_feature: MA Experiment 108689 PARAMETER Experiment Name: Zm_Drought_Roots_P Parameter: Timepoint (hr) Value: 24
  misc_feature: MA Experiment 108689 PARAMETER Experiment Name: Zm_Drought_Roots_P Parameter: Tissue Value: Roots
  misc_feature: MA Experiment 108689 PARAMETER Experiment Name: Zm_Drought_Roots_P Parameter: Treatment Value: Drought vs. No Drought
  misc_feature: MA Experiment ID: 20000108 Result: Up-regulated in Transcription
  misc_feature: MA Experiment 20000108 PARAMETER Experiment Name: Zm_Root-Tips_P Parameter: Age (day) Value: 12
  misc_feature: MA Experiment 20000108 PARAMETER Experiment Name: Zm_Root-Tips_P Parameter: Organism Value: Zea mays
  misc_feature: MA Experiment 20000108 PARAMETER Experiment Name: Zm_Root-Tips_P Parameter: Tissue Value: Root tips vs. Root mid region    35
  misc_feature: MA Experiment 20000108 PARAMETER Experiment Name: Zm_Root-Tips_P Parameter: Tissue Value: Root tips vs. Root mid region   Sequence Listing-Misc Features (4)
  misc_feature: MA Experiment ID: 20000480 Result: Down-regulated in Transcription
  misc_feature: MA Experiment 20000480 PARAMETER Experiment Name: Zm_Drought_P Parameter: Age (day) Value: 11
  misc_feature: MA Experiment 20000480 PARAMETER Experiment Name: Zm_Drought_P Parameter: Organism Value: Zea mays
  misc_feature: MA Experiment 20000480 PARAMETER Experiment Name: Zm_Drought_P Parameter: Plant Line Value: 35A19
  misc_feature: MA Experiment 20000480 PARAMETER Experiment Name: Zm_Drought_P Parameter: Timepoint (hr) Value: 72
  misc_feature: MA Experiment 20000480 PARAMETER Experiment Name: Zm_Drought_P Parameter: Tissue Value: Aerial
  misc_feature: MA Experiment 20000480 PARAMETER Experiment Name: Zm_Drought_P Parameter: Treatment Value: Drought vs. No Drought
aatttgaatttagaaaatccagaggacaccgcggacgtgggtcgtctggtagggtcacagaaggagagatgtgaagtgaaggtggcgttgtccaactcattcggattcggtgggcacaactcatcgattctctttgccccctttaagtgaacatgaccgaggcgaagaaccgacatcttcatcatcgcgcaaatggcttcatatatctggaactccacatagaaatctggtggattctgcaacttcctccgtgccacacatactgcatatggaggtccaaagtgagggtacaatactatgccacacacatttgagcgaacaaaacatcagcccccctacatgtttcatctactatcacaaagttgcaaaatatatatggtaactatcaaagaacttaccgtacctgggccagtgttttcgccttcaccatacctgcccattgtcagtactatttcctacatttggtgtagtcccgtagcttaatcctcttccctgcggaggtgatgggatcttatgttgtattgatgttgccaacagtatcgttattagccatgaattgctggttcccactgtaagcatcactggacgttttcgctttggttgtttctgtttcctgctgttcataaccgagttaaagatatgt

SEQ ID NO: 111081 - protein, 61 aa, Zea mays subsp. mays
  misc_feature (1)..(61): Ceres Seq. ID no. 13589406
MPHTFERTKHQPPYMFHLLSQSCKIYMVTIKELTVPGPVFSPSPYLPIVSTISYIWCSPVA

SEQ ID NO: 111082 - protein, 53 aa, Zea mays subsp. mays
  misc_feature (1)..(53): Ceres Seq. ID no. 13589407
MTEAKNRHLHHRANGFIYLELHIEIWWILQLPPCHTYCIWRSKVRVQYYATHI

SEQ ID NO: 111083 - protein, 49 aa, Zea mays subsp. mays
  misc_feature (1)..(49): Ceres Seq. ID no. 13589408
  misc_feature (1)..(49): Homolog of NCBI NO: 34906678 NR Description: putative 3-oxoacyl-
  misc_feature (1)..(49): Homolog of NCBI NO: 33146941 NR Description: putative 3-oxoacyl-
  misc_feature (1)..(49): Homolog of NCBI NO: 629772 NR Description: 3-oxoacyl-
  misc_feature (1)..(49): Homolog of NCBI NO: 2921211 NR Description: beta-ketoacyl-ACP synthase II [Perilla frutescens]
  misc_feature (1)..(49): Homolog of NCBI NO: 7433754 NR Description: probable 3-oxoacyl-
  misc_feature (1)..(47): Homolog of NCBI NO: 30795125 NR Description: beta-ketoacyl-ACP synthase II [Elaeis guineensis]
  misc_feature (1)..(48): Homolog of NCBI NO: 629774 NR Description: 3-oxoacyl-
NLNLENPEDTADVGRLVGSQKERCEVKVALSNSFGFGGHNSSILFAPFK

SEQ ID NO: 111084 - DNA, 1024 bp, Zea mays subsp. mays
  misc_feature (1)..(1024): Ceres Seq. ID no. 14305215
  misc_feature: MA Experiment ID: 108689 Result: Down-regulated in Transcription
  misc_feature: MA Experiment 108689 PARAMETER Experiment Name: Zm_Drought_Roots_P Parameter: Age (day) Value: 9
  misc_feature: MA Experiment 108689 PARAMETER Experiment Name: Zm_Drought_Roots_P Parameter: Organism Value: Zea mays
  misc_feature: MA Experiment 108689 PARAMETER Experiment Name: Zm_Drought_Roots_P Parameter: Plant Line Value: 35A19
  misc_feature: MA Experiment 108689 PARAMETER Experiment Name: Zm_Drought_Roots_P Parameter: Timepoint (hr) Value: 24
  misc_feature: MA Experiment 108689 PARAMETER Experiment Name: Zm_Drought_Roots_P Parameter: Tissue Value: Roots
  misc_feature: MA Experiment 108689 PARAMETER Experiment Name: Zm_Drought_Roots_P Parameter: Treatment Value: Drought vs. No Drought
  misc_feature: MA Experiment ID: 20000534 Result: Down-regulated in Transcription
  misc_feature: MA Experiment 20000534 PARAMETER Experiment Name: Zm_Hybrid_Pollen_P Parameter: Age (day) Value: 8
  misc_feature: MA Experiment 20000534 PARAMETER Experiment Name: Zm_Hybrid_Pollen_P Parameter: Organism Value: Zea mays
  misc_feature: MA Experiment 20000534 PARAMETER Experiment Name: Zm_Hybrid_Pollen_P Parameter: Plant Line Value: 35A19
  misc_feature: MA Experiment 20000534 PARAMETER Experiment Name: Zm_Hybrid_Pollen_P Parameter: Tissue Value: Pollen vs. Aerial
aatcgaaggaacaatgaaggcagtaacattgagatgtccagtgtgcaaaatattgctaatgaagaaaagtctagcgaacctttcaattttgagagcttgtaccccctaacacgacttccaaaggagggagatctgattgcctaccgattggttgagctgtcttccatgttgtgtccggagctctcttcgtaccgtgtgggaaaagttctggtatatgatcccgtatcattgcgtatcattctcgtacccgttcaagagtatccaatcaccaccgaggaaaaagaaaacaaggacgagtcagatatgcttgtggatttgtcaccgtacaaggaagatggctccttggagatcgagtactcttcacttgttgatgtaaggctactgaagggtatcgaaacatgcaacgaagttggatcagcaccggccggaaggccagttaccttgcacaaaaacgaaggcaatattgagagccagaaaccacccttggtgtcaaacaacactaaaggcgaagaacgcacactaggaaagtcagaaagtacggtctgggaaaaaaatggtgagcccagtgataaggttgatcttctgcaaaatggctgggcaacatggaaacaaaatgctagtacgtcagcttggtcttacagagccctcaggagcagcgcccttggcccgacgatggcaattctacgagggaagaacagccagagtaaaccacccaatcgaaagaacgccaagtgatgcctaagtatttaataacttcagtgatacctatgtaatccaaagttgatccgatcctttggagaaggccaagcaagtcgaggtagttggtcttatatatgtaactgcaattactgccctgcctattttgaaaattccaaagtggtgactgatgcaaagggaactttttagaccagtcaagactcattactatgtgatgccagcttatttaatgttgatgaaaattcactaaaattgatctttattgtacatcactcagatcttcagctttggaattgcttgatttatt

SEQ ID NO: 111085 - protein, 244 aa, Zea mays subsp. mays
  misc_feature (1)..(244): Ceres Seq. ID no. 14305216
  misc_feature (5)..(231): Homolog of NCBI NO: 22329527 NR Description: expressed protein [Arabidopsis thaliana]
  misc_feature (5)..(231): Homolog of NCBI NO: 25402750 NR Description: protein F3F19.5 [imported] - Arabidopsis thaliana
NRRNNEGSNIEMSSVQNIANEEKSSEPFNFESLYPLTRLPKEGDLIAYRLVELSSMLCPELSSYRVGKVLVYDPVSLRIILVPVQEYPITTEEKENKDESDMLVDLSPYKEDGSLEIEYSSLVDVRLLKGIETCNEVGSAPAGRPVTLHKNEGNIESQKPPLVSNNTKGEERTLGKSESTVWEKNGEPSDKVDLLQNGWATWKQNASTSAWSYRALRSSALGPTMAILRGKNSQSKPPNRKNAK

SEQ ID NO: 111086 - protein, 233 aa, Zea mays subsp. mays
  misc_feature (1)..(233): Ceres Seq. ID no. 14305217
  misc_feature (1)..(220): Homolog of NCBI NO: 22329527 NR Description: expressed protein [Arabidopsis thaliana]
  misc_feature (1)..(220): Homolog of NCBI NO: 25402750 NR Description: protein F3F19.5 [imported] - Arabidopsis thaliana
MSSVQNIANEEKSSEPFNFESLYPLTRLPKEGDLIAYRLVELSSMLCPELSSYRVGKVLVYDPVSLRIILVPVQEYPITTEEKENKDESDMLVDLSPYKEDGSLEIEYSSLVDVRLLKGIETCNEVGSAPAGRPVTLHKNEGNIESQKPPLVSNNTKGEERTLGKSESTVWEKNGEPSDKVDLLQNGWATWKQNASTSAWSYRALRSSALGPTMAILRGKNSQSKPPNRKNAK

SEQ ID NO: 111087 - protein, 189 aa, Zea mays subsp. mays
  misc_feature (1)..(189): Ceres Seq. ID no. 14305218
  misc_feature (1)..(176): Homolog of NCBI NO: 22329527 NR Description: expressed protein [Arabidopsis thaliana]
  misc_feature (1)..(176): Homolog of NCBI NO: 25402750 NR Description: protein F3F19.5 [imported] - Arabidopsis thaliana
MLCPELSSYRVGKVLVYDPVSLRIILVPVQEYPITTEEKENKDESDMLVDLSPYKEDGSLEIEYSSLVDVRLLKGIETCNEVGSAPAGRPVTLHKNEGNIESQKPPLVSNNTKGEERTLGKSESTVWEKNGEPSDKVDLLQNGWATWKQNASTSAWSYRALRSSALGPTMAILRGKNSQSKPPNRKNAK

SEQ ID NO: 111088 - DNA, 749 bp, Zea mays subsp. mays
  misc_feature (1)..(749): Ceres Seq. ID no. 13624430
  misc_feature: MA Experiment ID: 20000534 Result: Up-regulated in Transcription
  misc_feature: MA Experiment 20000534 PARAMETER Experiment Name: Zm_Hybrid_Pollen_P Parameter: Age (day) Value: 8
  misc_feature: MA Experiment 20000534 PARAMETER Experiment Name: Zm_Hybrid_Pollen_P Parameter: Organism Value: Zea mays
  misc_feature: MA Experiment 20000534 PARAMETER Experiment Name: Zm_Hybrid_Pollen_P Parameter: Plant Line Value: 35A19
  misc_feature: MA Experiment 20000534 PARAMETER Experiment Name: Zm_Hybrid_Pollen_P Parameter: Tissue Value: Pollen vs. Aerial
gaaccaagagagcagggtgtgggcgaagagaccccagccagtcgatcgttcaagaaaaataccagcttaccaacaacagcagcagcaagcccacccgttcgacgacatggcccgcctcggcgccggcgccgtgttggcgctcctagtggcggtcgcggcggtggccgcgttcctcgcggtgccggcctcggcgaagtccggggagctgagcgcgatggggttgctggcggcgaagggcggcagcggcgcgggcccgcagaagtgctcgggcgcggtgggcgagtgcgacgtggacgaggcggaggagctcgggctgagcggcggcggcctcggctccgacgacgcggtgcggcggacgctggcgcagcggaagccgaccaaccggtacatcagctacgcggcgctgcgcgcggaccaggtgccgtgcaacaagcgcggccggtcctactacagcaactgcgaggcgcagaaggccgccaacccctaccgccgcggctgctccgccatcacgcgctgcgcccgcaacatgaactgagcccagcgctagctgctgccggggcgcgccgtcgtcgccgagccggtcggtctggtctggtttggtctgcctgcctgccaggtcacgcagcctggctccaccgatcgcacaccatacattgacgtcgtcgtcgcggccgtacgtgccgttggacggtggaggaggcggtggcgctacgacagtatatatatacacaattacacatacacacccc

SEQ ID NO: 111089 - protein, 218 aa, Zea mays subsp. mays
  misc_feature (1)..(218): Ceres Seq. ID no. 13624431
  misc_feature (53)..(209): Homolog of NCBI NO: 23121172 NR Description: hypothetical protein [Desulfitobacterium
EPREQGVGEETPASRSFKKNTSLPTTAAASPPVRRHGPPRRRRRVGAPSGGRGGGRVPRGAGLGEVRGAERDGVAGGEGRQRRGPAEVLGRGGRVRRGRGGGARAERRRPRLRRRGAADAGAAEADQPVHQLRGAARGPGAVQQARPVLLQQLRGAEGRQPLPPRLLRHHALRPQHELSPALAAAGARRRRRAGRSGLVWSACLPGHAAWLHRSHTIH

SEQ ID NO: 111090 - protein, 177 aa, Zea mays subsp. mays
  misc_feature (1)..(177): Ceres Seq. ID no. 13624432
  misc_feature (103)..(174): Pfam Name: Rapid ALkalinization Factor (RALF) Pfam Description: Rapid ALkalinization Factor (RALF)
  misc_feature (117)..(174): Homolog of NCBI NO: 30685837 NR Description: expressed protein [Arabidopsis thaliana]
  misc_feature (58)..(172): Homolog of NCBI NO: 34915066 NR Description: P0025H06.17 [Oryza sativa (japonica
  misc_feature (47)..(172): Homolog of NCBI NO: 15218637 NR Description: expressed protein [Arabidopsis thaliana]
  misc_feature (69)..(172): Homolog of NCBI NO: 28628203 NR Description: rapid alkalinization factor 1 precursor
  misc_feature (87)..(174): Homolog of NCBI NO: 18414528 NR Description: expressed protein [Arabidopsis thaliana]
  misc_feature (64)..(172): Homolog of NCBI NO: 16566316 NR Description: RALF precursor [Nicotiana tabacum]
  misc_feature (40)..(175): Homolog of NCBI NO: 18401177 NR Description: expressed protein [Arabidopsis thaliana]
  misc_feature (49)..(172): Homolog of NCBI NO: 34902918 NR Description: unnamed protein product [Oryza sativa (japonica
  misc_feature (50)..(174): Homolog of NCBI NO: 18397246 NR Description: expressed protein [Arabidopsis thaliana]
  misc_feature (47)..(177): Homolog of NCBI NO: 34903676 NR Description: B1015E06.23 [Oryza sativa (japonica
NQESRVWAKRPQPVDRSRKIPAYQQQQQQAHPFDDMARLGAGAVLALLVAVAAVAAFLAVPASAKSGELSAMGLLAAKGGSGAGPQKCSGAVGECDVDEAEELGLSGGGLGSDDAVRRTLAQRKPTNRYISYAALRADQVPCNKRGRSYYSNCEAQKAANPYRRGCSAITRCARNMN

SEQ ID NO: 111091 - protein, 142 aa, Zea mays subsp. mays
  misc_feature (1)..(142): Ceres Seq. ID no. 13624433
  misc_feature (68)..(139): Pfam Name: Rapid ALkalinization Factor (RALF) Pfam Description: Rapid ALkalinization Factor (RALF)
  misc_feature (82)..(139): Homolog of NCBI NO: 30685837 NR Description: expressed protein [Arabidopsis thaliana]
  misc_feature (23)..(137): Homolog of NCBI NO: 34915066 NR Description: P0025H06.17 [Oryza sativa (japonica
  misc_feature (12)..(137): Homolog of NCBI NO: 15218637 NR Description: expressed protein [Arabidopsis thaliana]
  misc_feature (34)..(137): Homolog of NCBI NO: 28628203 NR Description: rapid alkalinization factor 1 precursor
  misc_feature (52)..(139): Homolog of NCBI NO: 18414528 NR Description: expressed protein [Arabidopsis thaliana]
  misc_feature (29)..(137): Homolog of NCBI NO: 16566316 NR Description: RALF precursor [Nicotiana tabacum]
  misc_feature (5)..(140): Homolog of NCBI NO: 18401177 NR Description: expressed protein [Arabidopsis thaliana]
  misc_feature (14)..(137): Homolog of NCBI NO: 34902918 NR Description: unnamed protein product [Oryza sativa (japonica
  misc_feature (15)..(139): Homolog of NCBI NO: 18397246 NR Description: expressed protein [Arabidopsis thaliana]
  misc_feature (12)..(142): Homolog of NCBI NO: 34903676 NR Description: B1015E06.23 [Oryza sativa (japonica
MARLGAGAVLALLVAVAAVAAFLAVPASAKSGELSAMGLLAAKGGSGAGPQKCSGAVGECDVDEAEELGLSGGGLGSDDAVRRTLAQRKPTNRYISYAALRADQVPCNKRGRSYYSNCEAQKAANPYRRGCSAITRCARNMN

SEQ ID NO: 111092 - DNA, 1092 bp, Zea mays subsp. mays
  misc_feature (1)..(1092): Ceres Seq. ID no. 13624427
  misc_feature: MA Experiment ID: 108528 Result: Down-regulated in Transcription
  misc_feature: MA Experiment 108528 PARAMETER Experiment Name: Zm_Imbibed_Seeds_P Parameter: Age (day) Value: 5 vs. 2
  misc_feature: MA Experiment 108528 PARAMETER Experiment Name: Zm_Imbibed_Seeds_P Parameter: Organism Value: Zea mays
  misc_feature: MA Experiment 108528 PARAMETER Experiment Name: Zm_Imbibed_Seeds_P Parameter: Plant Line Value: 35A19
  misc_feature: MA Experiment 108528 PARAMETER Experiment Name: Zm_Imbibed_Seeds_P Parameter: Tissue Value: Aerial vs. Embryo
  misc_feature: MA Experiment ID: 108530 Result: Down-regulated in Transcription
  misc_feature: MA Experiment 108530 PARAMETER Experiment Name: Zm_Imbibed_Seeds_P Parameter: Age (day) Value: 6 vs. 2
  misc_feature: MA Experiment 108530 PARAMETER Experiment Name: Zm_Imbibed_Seeds_P Parameter: Organism Value: Zea mays
  misc_feature: MA Experiment 108530 PARAMETER Experiment Name: Zm_Imbibed_Seeds_P Parameter: Plant Line Value: 35A19
  misc_feature: MA Experiment 108530 PARAMETER Experiment Name: Zm_Imbibed_Seeds_P Parameter: Tissue Value: Aerial vs. Embryo
  misc_feature: MA Experiment ID: 108535 Result: Up-regulated in Transcription
  misc_feature: MA Experiment 108535 PARAMETER Experiment Name: Zm_Meristem_P Parameter: Age (day) Value: 8
  misc_feature: MA Experiment 108535 PARAMETER Experiment Name: Zm_Meristem_P Parameter: Organism Value: Zea mays
  misc_feature: MA Experiment 108535 PARAMETER Experiment Name: Zm_Meristem_P Parameter: Plant Line Value: 35A19
  misc_feature: MA Experiment 108535 PARAMETER Experiment Name: Zm_Meristem_P Parameter: Tissue Value: Root Meristem vs. Above Root Meristem
  misc_feature: MA Experiment ID: 108536 Result: Up-regulated in Transcription
  misc_feature: MA Experiment 108536 PARAMETER Experiment Name: Zm_Meristem_P Parameter: Age (day) Value: 8
  misc_feature: MA Experiment 108536 PARAMETER Experiment Name: Zm_Meristem_P Parameter: Organism Value: Zea mays
  misc_feature: MA Experiment 108536 PARAMETER Experiment Name: Zm_Meristem_P Parameter: Plant Line Value: 35A19
  misc_feature: MA Experiment 108536 PARAMETER Experiment Name: Zm_Meristem_P Parameter: Tissue Value: Shoot Meristem vs. Above Shoot Meristem
  misc_feature: MA Experiment ID: 108543 Result: Up-regulated in Transcription
  misc_feature: MA Experiment ID: 108544 Result: Down-regulated in Transcription
  misc_feature: MA Experiment ID: 108545 Result: Down-regulated in Transcription
  misc_feature: MA Experiment 108545 PARAMETER Experiment Name: Zm_Imbibed_Seeds_P Parameter: Age (day) Value: 3 vs. 2
  misc_feature: MA Experiment 108545 PARAMETER Experiment Name: Zm_Imbibed_Seeds_P Parameter: Organism Value: Zea mays
  misc_feature: MA Experiment 108545 PARAMETER Experiment Name: Zm_Imbibed_Seeds_P Parameter: Plant Line Value: 35A19
  misc_feature: MA Experiment 108545 PARAMETER Experiment Name: Zm_Imbibed_Seeds_P Parameter: Tissue Value: Aerial vs. Embryo
  misc_feature: MA Experiment ID: 108547 Result: Down-regulated in Transcription
  misc_feature: MA Experiment 108547 PARAMETER Experiment Name: Zm_Imbibed_Seeds_P Parameter: Age (day) Value: 4 vs. 2
  misc_feature: MA Experiment 108547 PARAMETER Experiment Name: Zm_Imbibed_Seeds_P Parameter: Organism Value: Zea mays
  misc_feature: MA Experiment 108547 PARAMETER Experiment Name: Zm_Imbibed_Seeds_P Parameter: Plant Line Value: 35A19
  misc_feature: MA Experiment 108547 PARAMETER Experiment Name: Zm_Imbibed_Seeds_P Parameter: Tissue Value: Aerial vs. Embryo
  misc_feature: MA Experiment ID: 108687 Result: Up-regulated in Transcription
  misc_feature: MA Experiment 108687 PARAMETER Experiment Name: Zm_Embryos-Flowers__P Parameter: Tissue Value: Embryo vs. Aerial+
  misc_feature: MA Experiment ID: 20000108 Result: Up-regulated in Transcription
  misc_feature: MA Experiment 20000108 PARAMETER Experiment Name: Zm_Root-Tips_P Parameter: Age (day) Value: 12
  misc_feature: MA Experiment 20000108 PARAMETER Experiment Name: Zm_Root-Tips_P Parameter: Organism Value: Zea mays
  misc_feature: MA Experiment 20000108 PARAMETER Experiment Name: Zm_Root-Tips_P Parameter: Tissue Value: Root tips vs. Root mid region    35
  misc_feature: MA Experiment 20000108 PARAMETER Experiment Name: Zm_Root-Tips_P Parameter: Tissue Value: Root tips vs. Root mid region   Sequence Listing-Misc Features (4)
  misc_feature: MA Experiment ID: 20001613 Result: Up-regulated in Transcription
  misc_feature: MA Experiment 20001613 PARAMETER Experiment Name: Zm_50ppm_KNO3_L-to-H_P Parameter: Age (day) Value: 20
  misc_feature: MA Experiment 20001613 PARAMETER Experiment Name: Zm_50ppm_KNO3_L-to-H_P Parameter: Organism Value: Zea mays
  misc_feature: MA Experiment 20001613 PARAMETER Experiment Name: Zm_50ppm_KNO3_L-to-H_P Parameter: Plant Line Value: 35A19
  misc_feature: MA Experiment 20001613 PARAMETER Experiment Name: Zm_50ppm_KNO3_L-to-H_P Parameter: Timepoint (hr) Value: 24
  misc_feature: MA Experiment 20001613 PARAMETER Experiment Name: Zm_50ppm_KNO3_L-to-H_P Parameter: Tissue Value: Roots
  misc_feature: MA Experiment 20001613 PARAMETER Experiment Name: Zm_50ppm_KNO3_L-to-H_P Parameter: Treatment Value: 50ppm KNO3 vs. 50ppm KCl
atccacctcggctcactccactcactgcaccgagctcactggcaatggctaccagcaccaagctcgtggcccttggctttgccgtcctcctgagcatcggcttctccgatgcagcgagggtagttaggcttggtagccatgcgtctgcgggaggtggaggtggcggcgggggaggcggctccgggtcgactgggggtggctttggcggtgggtcgggcggtggcggtggttacggcataggtaagggtggcggggactggtggaacaatttcgtctctagtatagcaggtggtggaggaggaggacaaggcggaggcggtggcaccaatggtgggtccgggtccggcggtgggtccggttatggttctggcagcagctcgactgcagcctctggccccagcagtggcaactacgccgacgctgagggcaagggcgccggtggaggcatgggcggtggtgccaatggtgcatatggttctggtgctggtggaggcgttggcaagggcgagggtgtgagtggtgtggcactcgcaccatcgtccaacggctactacaatggcggtgccgccgatgctaccggtggcggttccggcgccggcggtggacatggtggtggcgcagccggagctccaagctatggaaccggaggcggcctcggcggaggcaagggtgaggccggcagcgatggatcgtgggggtcaggttatgctcagggaatcggtgctggcacaggcggcggtggcggcggcggatcccaaggcggctctggtggcggtggaggctctgggtccggatccggcagcggtggaatccactgagcttgcacttcagtagctagagcctagagccccgcattagtgtcagtccattctgtggttttttgctgtctttgttacgagaattaatcaggaataaagcgtaatgggcttcgtgattgtagttcgagtaggtagcaaagcatgcaactgatatgaatgcatgtaatggctatctacgagtgtgtgcccctagctgtaatctgtttctcatcgatcgttaaggtcgttgcatccggttttatttatcttctgaaaccaaaatacattggaactc

SEQ ID NO: 111093 - protein, 271 aa, Zea mays subsp. mays
  misc_feature (1)..(271): Ceres Seq. ID no. 13624428
  misc_feature (44)..(271): Pfam Name: S-antigen protein Pfam Description: S-antigen protein
  misc_feature (30)..(268): Homolog of NCBI NO: 34898126 NR Description: putative glycine-rich cell wall protein precursor
  misc_feature (43)..(269): Homolog of NCBI NO: 7636182 NR Description: glycine-rich protein [Triticum aestivum]
  misc_feature (44)..(268): Homolog of NCBI NO: 15234690 NR Description: hypothetical protein [Arabidopsis thaliana]
  misc_feature (43)..(269): Homolog of NCBI NO: 15228946 NR Description: glycine-rich protein [Arabidopsis thaliana]
  misc_feature (43)..(269): Homolog of NCBI NO: 72320 NR Description: glycine-rich cell wall protein precursor -
  misc_feature (44)..(269): Homolog of NCBI NO: 34898126 NR Description: putative glycine-rich cell wall protein precursor
  misc_feature (15)..(267): Homolog of NCBI NO: 37534920 NR Description: putative glycine-rich protein
  misc_feature (19)..(268): Homolog of NCBI NO: 37534924 NR Description: putative glycine-rich protein
  misc_feature (15)..(271): Homolog of NCBI NO: 37534936 NR Description: putative glycine-rich protein
  misc_feature (15)..(271): Homolog of NCBI NO: 7442081 NR Description: glycine-rich protein grp3 - maize
PPRLTPLTAPSSLAMATSTKLVALGFAVLLSIGFSDAARVVRLGSHASAGGGGGGGGGGSGSTGGGFGGGSGGGGGYGIGKGGGDWWNNFVSSIAGGGGGGQGGGGGTNGGSGSGGGSGYGSGSSSTAASGPSSGNYADAEGKGAGGGMGGGANGAYGSGAGGGVGKGEGVSGVALAPSSNGYYNGGAADATGGGSGAGGGHGGGAAGAPSYGTGGGLGGGKGEAGSDGSWGSGYAQGIGAGTGGGGGGGSQGGSGGGGGSGSGSGSGGIH

SEQ ID NO: 111094 - protein, 257 aa, Zea mays subsp. mays
  misc_feature (1)..(257): Ceres Seq. ID no. 13624429
  misc_feature (30)..(257): Pfam Name: S-antigen protein Pfam Description: S-antigen protein
  misc_feature (16)..(254): Homolog of NCBI NO: 34898126 NR Description: putative glycine-rich cell wall protein precursor
  misc_feature (29)..(255): Homolog of NCBI NO: 7636182 NR Description: glycine-rich protein [Triticum aestivum]
  misc_feature (30)..(254): Homolog of NCBI NO: 15234690 NR Description: hypothetical protein [Arabidopsis thaliana]
  misc_feature (29)..(255): Homolog of NCBI NO: 15228946 NR Description: glycine-rich protein [Arabidopsis thaliana]
  misc_feature (29)..(255): Homolog of NCBI NO: 72320 NR Description: glycine-rich cell wall protein precursor -
  misc_feature (30)..(255): Homolog of NCBI NO: 34898126 NR Description: putative glycine-rich cell wall protein precursor
  misc_feature (1)..(253): Homolog of NCBI NO: 37534920 NR Description: putative glycine-rich protein
  misc_feature (5)..(254): Homolog of NCBI NO: 37534924 NR Description: putative glycine-rich protein
  misc_feature (1)..(257): Homolog of NCBI NO: 37534936 NR Description: putative glycine-rich protein
  misc_feature (1)..(257): Homolog of NCBI NO: 7442081 NR Description: glycine-rich protein grp3 - maize
MATSTKLVALGFAVLLSIGFSDAARVVRLGSHASAGGGGGGGGGGSGSTGGGFGGGSGGGGGYGIGKGGGDWWNNFVSSIAGGGGGGQGGGGGTNGGSGSGGGSGYGSGSSSTAASGPSSGNYADAEGKGAGGGMGGGANGAYGSGAGGGVGKGEGVSGVALAPSSNGYYNGGAADATGGGSGAGGGHGGGAAGAPSYGTGGGLGGGKGEAGSDGSWGSGYAQGIGAGTGGGGGGGSQGGSGGGGGSGSGSGSGGIH

SEQ ID NO: 111095 - DNA, 1112 bp, Zea mays subsp. mays
  misc_feature (1)..(1112): Ceres Seq. ID no. 14301944
aaaaaaaccgcaacaaatcaaaacgagccgcaatcgcagcgcagaggcaaagccgtccatctctctcaacgccgccgccgccgccccgccccgccccagaccctaccctccacctccagtccctcgtcccagcgcgaccgattctcctcgatccagcactgatccggcggcttcccggcccggccatggatttgctggcgtccttggccgccgaggagcggtggctgttcccgttgttcctcgccatgtacgccgccatctactgcgtgggccagctcctcgtgttccggcggtgggcgccgcggcagcggctggacggcgccagctgcctgatctcgctcttccacggcacccccgcggcgctggccgccgcgggggccatcctcgcgctgcccgcggggtcccggtccttcgccgcgcccaacgcgcgcctccaggaccacgtcctcgactacagcgtcgcctacttcaccatggacctgctccactacctcgccttcctgcccggggacgtgctcttcatcgcgcaccacctggccacgctcttcgtcttcctcacctgccgctacctcgtccggcacggcgcatacgcgctcctcgtcctcctccttctcgccgaggttaccagcctgctgcagaacgtctggacgctcgcggggatctggcgggaccagtcccccgccgccgcgcgcgtctacggtgccctctcgccgcccttctacgcgctctacacgctcgtcaggggcgtcgccggcccgctcttcctcctcaagatggccgccttctacctgtccggccaggccgtcgacgtcatcccgtggtgggtgcggatctcctggatcctcgttgtcggcaccgccattgccgtcagcaacctgtggatttggaacctctggaaggagctcgtcagggaatggaagcaagccccttccaagtcaaagaaagacacataggctgccacctcattctaaccacagtaccgtaccatgtacgggtgtacgaaccatatgtagcttcttaatctttccaaatacatccgagccagatgatgcagactgatgatatgctaaaagccaatttccgttgacaattggtggaggatgcttatctgg

SEQ ID NO: 111096 - protein, 339 aa, Zea mays subsp. mays
  misc_feature (1)..(339): Ceres Seq. ID no. 14301945
  misc_feature (18)..(207): Pfam Name: Formin Homology 2 Domain Pfam Description: Formin Homology 2 Domain
  misc_feature (25)..(304): Homolog of NCBI NO: 29247944 NR Description: GLP_26_54603_52153 [Giardia lamblia ATCC 50803]
  misc_feature (24)..(66): Homolog of NCBI NO: 7510074 NR Description: hypothetical protein Y50E8A.g - Caenorhabditis
KKPQQIKTSRNRSAEAKPSISLNAAAAAPPRPRPYPPPPVPRPSATDSPRSSTDPAASRPGHGFAGVLGRRGAVAVPVVPRHVRRHLLRGPAPRVPAVGAAAAAGRRQLPDLALPRHPRGAGRRGGHPRAARGVPVLRRAQRAPPGPRPRLQRRLLHHGPAPLPRLPARGRALHRAPPGHALRLPHLPLPRPARRIRAPRPPPSRRGYQPAAERLDARGDLAGPVPRRRARLRCPLAALLRALHARQGRRRPALPPQDGRLLPVRPGRRRHPVVGADLLDPRCRHRHCRQQPVDLEPLEGARQGMEASPFQVKERHIGCHLILTTVPYHVRVYEPYVAS

SEQ ID NO: 111097 - protein, 316 aa, Zea mays subsp. mays
  misc_feature (1)..(316): Ceres Seq. ID no. 14301946
  misc_feature (77)..(298): Homolog of NCBI NO: 15232128 NR Description: expressed protein [Arabidopsis thaliana]
  misc_feature (76)..(293): Homolog of NCBI NO: 9279600 NR Description: gene_id:MPE11.12~unknown protein [Arabidopsis
  misc_feature (76)..(304): Homolog of NCBI NO: 15230950 NR Description: hypothetical protein [Arabidopsis thaliana]
  misc_feature (77)..(306): Homolog of NCBI NO: 26450181 NR Description: unknown protein [Arabidopsis thaliana]
  misc_feature (77)..(306): Homolog of NCBI NO: 15241364 NR Description: expressed protein [Arabidopsis thaliana]
KNRNKSKRAAIAAQRQSRPSLSTPPPPPRPAPDPTLHLQSLVPARPILLDPALIRRLPGPAMDLLASLAAEERWLFPLFLAMYAAIYCVGQLLVFRRWAPRQRLDGASCLISLFHGTPAALAAAGAILALPAGSRSFAAPNARLQDHVLDYSVAYFTMDLLHYLAFLPGDVLFIAHHLATLFVFLTCRYLVRHGAYALLVLLLLAEVTSLLQNVWTLAGIWRDQSPAAARVYGALSPPFYALYTLVRGVAGPLFLLKMAAFYLSGQAVDVIPWWVRISWILVVGTAIAVSNLWIWNLWKELVREWKQAPSKSKKDT

SEQ ID NO: 111098 - protein, 255 aa, Zea mays subsp. mays
  misc_feature (1)..(255): Ceres Seq. ID no. 14301947
  misc_feature (16)..(237): Homolog of NCBI NO: 15232128 NR Description: expressed protein [Arabidopsis thaliana]
  misc_feature (15)..(232): Homolog of NCBI NO: 9279600 NR Description: gene_id:MPE11.12~unknown protein [Arabidopsis
  misc_feature (15)..(243): Homolog of NCBI NO: 15230950 NR Description: hypothetical protein [Arabidopsis thaliana]
  misc_feature (16)..(245): Homolog of NCBI NO: 26450181 NR Description: unknown protein [Arabidopsis thaliana]
  misc_feature (16)..(245): Homolog of NCBI NO: 15241364 NR Description: expressed protein [Arabidopsis thaliana]
MDLLASLAAEERWLFPLFLAMYAAIYCVGQLLVFRRWAPRQRLDGASCLISLFHGTPAALAAAGAILALPAGSRSFAAPNARLQDHVLDYSVAYFTMDLLHYLAFLPGDVLFIAHHLATLFVFLTCRYLVRHGAYALLVLLLLAEVTSLLQNVWTLAGIWRDQSPAAARVYGALSPPFYALYTLVRGVAGPLFLLKMAAFYLSGQAVDVIPWWVRISWILVVGTAIAVSNLWIWNLWKELVREWKQAPSKSKKDT

SEQ ID NO: 111099 - DNA, 825 bp, Zea mays subsp. mays
  misc_feature (1)..(825): Ceres Seq. ID no. 14305247
aatcttatcctcttctcattctcctttctccctcttgtgtcttccaccaggaacaagccgccgccgcacgcctccgcttgctcccacccgcgcccgccggtgcacccgccccggccccgcccgtcgcggctgcccccaccccgcccgcccctaccaccggcgcggccgcctccggccccggccccaaacgctgcacccaacagccccagccgtcccactcccagggtccatctcagtcgccgtcgcagaccacgcagcaggcgtcaccccagcagcagcaggtggcggcggtggcagcggcataggcacaagcacagacccaggcggcatgggtacgaagccccgagatggagatggcgctgcaggacgccatgcgggtctgcaatccggacgtcaatacgcccttccagtccatcgaggacgctgtcaacaggctgcatatggcgaggcgatgtctagtcagcacggaccatactatgactagaggacctcacctattgatccccaggctgtgtatgcaagtggtgggaaaagctcatggaaggtacacaatgtttgctaacgtcatcgacttgagccaggtgagggttcagcgtggaggtttgtcgaggtctgctgctagtagctcccgtcgctccactcaagatccagcaaaagtggagcaactgcgcgaagaacttaggcgaaatcctcttcgctagtggaggtatcgaccatcactcgtcactgtaacccgatggtgatcgacgaccatgagcttccatgttattgtgttctgatacttgagaattttattatgagtatgatgatgagatgtgtcttatc

SEQ ID NO: 111100 - protein, 160 aa, Zea mays subsp. mays
  misc_feature (1)..(160): Ceres Seq. ID no. 14305248
ILSSSHSPFSLLCLPPGTSRRRTPPLAPTRARRCTRPGPARRGCPHPARPYHRRGRLRPRPQTLHPTAPAVPLPGSISVAVADHAAGVTPAAAGGGGGSGIGTSTDPGGMGTKPRDGDGAAGRHAGLQSGRQYALPVHRGRCQQAAYGEAMSSQHGPYYD

SEQ ID NO: 111101 - protein, 152 aa, Zea mays subsp. mays
  misc_feature (1)..(152): Ceres Seq. ID no. 14305249
  misc_feature (15)..(75): Pfam Name: Transferrin binding protein-like solute binding protein Pfam Description: Transferrin binding protein-like solute binding
  misc_feature (20)..(108): Homolog of NCBI NO: 29833843 NR Description: putative proline-rich protein [Streptomyces
  misc_feature (20)..(93): Homolog of NCBI NO: 6523547 NR Description: hydroxyproline-rich glycoprotein DZ-HRGP
  misc_feature (19)..(145): Homolog of NCBI NO: 6649859 NR Description: kexin-like serine endoprotease [Pneumocystis
  misc_feature (20)..(91): Homolog of NCBI NO: 11068076 NR Description: PxORF73 peptide [Plutella xylostella
  misc_feature (20)..(75): Homolog of NCBI NO: 19919 NR Description: Pistil extensin like protein, partial CDS only
  misc_feature (19)..(74): Homolog of NCBI NO: 19919 NR Description: Pistil extensin like protein, partial CDS only
  misc_feature (10)..(117): Homolog of NCBI NO: 8650496 NR Description: 163R* [porcine adenovirus 3]
  misc_feature (20)..(105): Homolog of NCBI NO: 141279 NR Description: HYPOTHETICAL PROLINE-RICH PROTEIN
  misc_feature (20)..(74): Homolog of NCBI NO: 539030 NR Description: cysteine-rich extensin-like protein 2 precursor -
  misc_feature (20)..(74): Homolog of NCBI NO: 38344072 NR Description: OSJNBa0006B20.16 [Oryza sativa (japonica
NLILFSFSFLPLVSSTRNKPPPHASACSHPRPPVHPPRPRPSRLPPPRPPLPPARPPPAPAPNAAPNSPSRPTPRVHLSRRRRPRSRRHPSSSRWRRWQRHRHKHRPRRHGYEAPRWRWRCRTPCGSAIRTSIRPSSPSRTLSTGCIWRGDV

SEQ ID NO: 111102 - protein, 117 aa, Zea mays subsp. mays
  misc_feature (1)..(117): Ceres Seq. ID no. 14305250
MEMALQDAMRVCNPDVNTPFQSIEDAVNRLHMARRCLVSTDHTMTRGPHLLIPRLCMQVVGKAHGRYTMFANVIDLSQVRVQRGGLSRSAASSSRRSTQDPAKVEQLREELRRNPLR

SEQ ID NO: 111103 - DNA, 628 bp, Zea mays subsp. mays
  misc_feature (1)..(628): Ceres Seq. ID no. 14302584
ccacacacacgcatccatcaaagaaacaagagcacacaaacaatacctctctagctcgccaccaacaatggcctctaggttctccatcatgctcgccacaacggcactggctacgttttttgtgattggttcgtgcaccaccccgctcaccttcaaggtcggcaaaggctccaagcctggccacctggtcctcacccccaacattgccaccatctccgaagtggagatcaaggagcacggtggcgatgacttctcctttgagctcaaggagggcccggccggcacctggacgcttgacacaaaggccccactcaagtaccccctctgcatccgctttgccatcaagtctggcggctaccgcatcgccgatgatgtcatccctgaaaattttaaggccgacaccacctacaagaccaccctcagcatctgatcatcctcttatgaggaataatattttgaaagagctcatctgatccatgtgccagcgagctaatatttaatttttgttctatggttattttatggcaccacaccacccaagaaataagttatgttacatgtcccttcgtgcaccttgttgtgttgggttaatacggttatataaattgaaatacaatatgtatttaat

SEQ ID NO: 111104 - protein, 142 aa, Zea mays subsp. mays
  misc_feature (1)..(142): Ceres Seq. ID no. 14302585
  misc_feature (49)..(127): Pfam Name: Pollen allergen Pfam Description: Pollen allergen
  misc_feature (47)..(140): Homolog of NCBI NO: 10314021 NR Description: acidic Cyn d 1 isoallergen isoform 1 precursor
  misc_feature (24)..(136): Homolog of NCBI NO: 1171009 NR Description: Pollen allergen Phl p 2 precursor (Phl p II)
  misc_feature (22)..(136): Homolog of NCBI NO: 4007040 NR Description: pollen allergen (group II) [Dactylis glomerata]
  misc_feature (22)..(136): Homolog of NCBI NO: 4006978 NR Description: pollen allergen (group II) [Cynodon dactylon]
  misc_feature (23)..(142): Homolog of NCBI NO: 32489537 NR Description: OSJNBa0063G07.2 [Oryza sativa (japonica
  misc_feature (23)..(142): Homolog of NCBI NO: 21740569 NR Description: OSJNBa0050F15.10 [Oryza sativa (japonica
  misc_feature (23)..(142): Homolog of NCBI NO: 38345097 NR Description: OSJNBa0050F15.8 [Oryza sativa (japonica
  misc_feature (23)..(142): Homolog of NCBI NO: 32489538 NR Description: OSJNBa0063G07.3 [Oryza sativa (japonica
  misc_feature (23)..(142): Homolog of NCBI NO: 38345096 NR Description: OSJNBa0050F15.7 [Oryza sativa (japonica
  misc_feature (23)..(142): Homolog of NCBI NO: 33188338 NR Description: group 3 pollen allergen [Zea mays]
HTHASIKETRAHKQYLSSSPPTMASRFSIMLATTALATFFVIGSCTTPLTFKVGKGSKPGHLVLTPNIATISEVEIKEHGGDDFSFELKEGPAGTWTLDTKAPLKYPLCIRFAIKSGGYRIADDVIPENFKADTTYKTTLSI

SEQ ID NO: 111105 - protein, 120 aa, Zea mays subsp. mays
  misc_feature (1)..(120): Ceres Seq. ID no. 14302586
  misc_feature (27)..(105): Pfam Name: Pollen allergen Pfam Description: Pollen allergen
  misc_feature (1)..(120): Homolog of NCBI NO: 38345096 NR Description: OSJNBa0050F15.7 [Oryza sativa (japonica
  misc_feature (1)..(120): Homolog of NCBI NO: 38345097 NR Description: OSJNBa0050F15.8 [Oryza sativa (japonica
  misc_feature (25)..(118): Homolog of NCBI NO: 10314021 NR Description: acidic Cyn d 1 isoallergen isoform 1 precursor
  misc_feature (1)..(114): Homolog of NCBI NO: 4007040 NR Description: pollen allergen (group II) [Dactylis glomerata]
  misc_feature (1)..(120): Homolog of NCBI NO: 32489537 NR Description: OSJNBa0063G07.2 [Oryza sativa (japonica
  misc_feature (1)..(120): Homolog of NCBI NO: 21740569 NR Description: OSJNBa0050F15.10 [Oryza sativa (japonica
  misc_feature (1)..(114): Homolog of NCBI NO: 4006978 NR Description: pollen allergen (group II) [Cynodon dactylon]
  misc_feature (2)..(114): Homolog of NCBI NO: 1171009 NR Description: Pollen allergen Phl p 2 precursor (Phl p II)
  misc_feature (1)..(120): Homolog of NCBI NO: 32489538 NR Description: OSJNBa0063G07.3 [Oryza sativa (japonica
  misc_feature (1)..(120): Homolog of NCBI NO: 33188338 NR Description: group 3 pollen allergen [Zea mays]
MASRFSIMLATTALATFFVIGSCTTPLTFKVGKGSKPGHLVLTPNIATISEVEIKEHGGDDFSFELKEGPAGTWTLDTKAPLKYPLCIRFAIKSGGYRIADDVIPENFKADTTYKTTLSI

SEQ ID NO: 111106 - protein, 113 aa, Zea mays subsp. mays
  misc_feature (1)..(113): Ceres Seq. ID no. 14302587
  misc_feature (20)..(98): Pfam Name: Pollen allergen Pfam Description: Pollen allergen
  misc_feature (18)..(111): Homolog of NCBI NO: 10314021 NR Description: acidic Cyn d 1 isoallergen isoform 1 precursor
  misc_feature (1)..(107): Homolog of NCBI NO: 1171009 NR Description: Pollen allergen Phl p 2 precursor (Phl p II)
  misc_feature (1)..(107): Homolog of NCBI NO: 4007040 NR Description: pollen allergen (group II) [Dactylis glomerata]
  misc_feature (1)..(107): Homolog of NCBI NO: 4006978 NR Description: pollen allergen (group II) [Cynodon dactylon]
  misc_feature (1)..(113): Homolog of NCBI NO: 32489537 NR Description: OSJNBa0063G07.2 [Oryza sativa (japonica
  misc_feature (1)..(113): Homolog of NCBI NO: 21740569 NR Description: OSJNBa0050F15.10 [Oryza sativa (japonica
  misc_feature (1)..(113): Homolog of NCBI NO: 38345097 NR Description: OSJNBa0050F15.8 [Oryza sativa (japonica
  misc_feature (1)..(113): Homolog of NCBI NO: 32489538 NR Description: OSJNBa0063G07.3 [Oryza sativa (japonica
  misc_feature (1)..(113): Homolog of NCBI NO: 38345096 NR Description: OSJNBa0050F15.7 [Oryza sativa (japonica
  misc_feature (1)..(113): Homolog of NCBI NO: 33188338 NR Description: group 3 pollen allergen [Zea mays]
MLATTALATFFVIGSCTTPLTFKVGKGSKPGHLVLTPNIATISEVEIKEHGGDDFSFELKEGPAGTWTLDTKAPLKYPLCIRFAIKSGGYRIADDVIPENFKADTTYKTTLSI

SEQ ID NO: 111107 - DNA, 2788 bp, Zea mays subsp. mays
  misc_feature (1)..(2788): Ceres Seq. ID no. 15180188
  misc_feature: MA Experiment ID: 108527 Result: Down-regulated in Transcription
  misc_feature: MA Experiment 108527 PARAMETER Experiment Name: Zm_5mM_NO_P Parameter: Age (day) Value: 8
  misc_feature: MA Experiment 108527 PARAMETER Experiment Name: Zm_5mM_NO_P Parameter: Organism Value: Zea mays
  misc_feature: MA Experiment 108527 PARAMETER Experiment Name: Zm_5mM_NO_P Parameter: Plant Line Value: 35A19
  misc_feature: MA Experiment 108527 PARAMETER Experiment Name: Zm_5mM_NO_P Parameter: Timepoint (hr) Value: 6
  misc_feature: MA Experiment 108527 PARAMETER Experiment Name: Zm_5mM_NO_P Parameter: Tissue Value: Aerial
  misc_feature: MA Experiment 108527 PARAMETER Experiment Name: Zm_5mM_NO_P Parameter: Treatment Value: 5mM NO vs. No Treatment
  misc_feature: MA Experiment ID: 108556 Result: Down-regulated in Transcription
  misc_feature: MA Experiment 108556 PARAMETER Experiment Name: Zm_Drought_P Parameter: Age (day) Value: 9
  misc_feature: MA Experiment 108556 PARAMETER Experiment Name: Zm_Drought_P Parameter: Organism Value: Zea mays
  misc_feature: MA Experiment 108556 PARAMETER Experiment Name: Zm_Drought_P Parameter: Plant Line Value: 35A19
  misc_feature: MA Experiment 108556 PARAMETER Experiment Name: Zm_Drought_P Parameter: Timepoint (hr) Value: 24
  misc_feature: MA Experiment 108556 PARAMETER Experiment Name: Zm_Drought_P Parameter: Tissue Value: Aerial
  misc_feature: MA Experiment 108556 PARAMETER Experiment Name: Zm_Drought_P Parameter: Treatment Value: Drought vs. No Drought
  misc_feature: MA Experiment ID: 20000479 Result: Down-regulated in Transcription
  misc_feature: MA Experiment 20000479 PARAMETER Experiment Name: Zm_Drought_P Parameter: Age (day) Value: 10
  misc_feature: MA Experiment 20000479 PARAMETER Experiment Name: Zm_Drought_P Parameter: Organism Value: Zea mays
  misc_feature: MA Experiment 20000479 PARAMETER Experiment Name: Zm_Drought_P Parameter: Plant Line Value: 35A19
  misc_feature: MA Experiment 20000479 PARAMETER Experiment Name: Zm_Drought_P Parameter: Timepoint (hr) Value: 48
  misc_feature: MA Experiment 20000479 PARAMETER Experiment Name: Zm_Drought_P Parameter: Tissue Value: Aerial
  misc_feature: MA Experiment 20000479 PARAMETER Experiment Name: Zm_Drought_P Parameter: Treatment Value: Drought vs. No Drought
  misc_feature: MA Experiment ID: 20000480 Result: Down-regulated in Transcription
  misc_feature: MA Experiment 20000480 PARAMETER Experiment Name: Zm_Drought_P Parameter: Age (day) Value: 11
  misc_feature: MA Experiment 20000480 PARAMETER Experiment Name: Zm_Drought_P Parameter: Organism Value: Zea mays
  misc_feature: MA Experiment 20000480 PARAMETER Experiment Name: Zm_Drought_P Parameter: Plant Line Value: 35A19
  misc_feature: MA Experiment 20000480 PARAMETER Experiment Name: Zm_Drought_P Parameter: Timepoint (hr) Value: 72
  misc_feature: MA Experiment 20000480 PARAMETER Experiment Name: Zm_Drought_P Parameter: Tissue Value: Aerial
  misc_feature: MA Experiment 20000480 PARAMETER Experiment Name: Zm_Drought_P Parameter: Treatment Value: Drought vs. No Drought
  misc_feature: MA Experiment ID: 20000492 Result: Up-regulated in Transcription
  misc_feature: MA Experiment 20000492 PARAMETER Experiment Name: Zm_Hybrid_Seed_Dev_P Parameter: DAP Value: 12
  misc_feature: MA Experiment 20000492 PARAMETER Experiment Name: Zm_Hybrid_Seed_Dev_P Parameter: Organism Value: Zea mays
  misc_feature: MA Experiment 20000492 PARAMETER Experiment Name: Zm_Hybrid_Seed_Dev_P Parameter: Plant Line Value: 35A19
  misc_feature: MA Experiment 20000492 PARAMETER Experiment Name: Zm_Hybrid_Seed_Dev_P Parameter: Tissue Value: Fert Kernel vs. Unfert Floret
caacaagggagaaggggaaaccaccaccaccaccacacttgataagaagggggccgcacgcgcctgcccgctcccgccgctacgccatggacgcctgggaggccaccaaggcggtgttcgaccgggtgcgggcgctggacccggacaacgcgtccaagatcatgggcctgctgctcatccaggacaacagcgacaaggagctcatccgcctcgccttcggccccgaccacctcctccacgccttcgtctccgccgcgcgcgccgacctcgccgccaagcccgcgtccccgccgtcgcccgtgctgggcccgctccaccagacctggggagcgccgccgcacccgagccctaccgctggctccgaccaccaacaccaggcccccttcgccgccgacctcgcgctcggctacgacttcgacggcgccggcgccggcgctgacgcgttcttccccgacgactacgactgctggtcaccggccggcgccgcccaccgccgcagcttctcgctcagcgacgccgaggccaccgccgccgccgccggaggcgctgcgtggaggccatgcatgtacttcgcgcgcgggttctgcaagaacggctcctcctgccgcttcctccacggctttccggaggacgatgacgccgccgcggagcgcgagatggtcgtcatgcgcgccaaagcccttgccgccgccgccgcgcgcccccagcagcagcagcagctcatggcgtccgcgtttcccttctcgccgtcgccgcccaagggcgtcaacctcaacttcctgctccaccagcaccagcagcagaacgagccgcaaagggcggcggcggcggcggccatgctgctccagggcggcgacgacatgcacagcaggttcccggtgcggtcgccccggatggaccgcggcgagctcatgtccagccccgccgcgcggcagatctacctcaccttcccggccgactccaccttcagcgaggaggacgtctccatctacttcagcatgtacgggccggtgcaggacgtgcgcatcccgtaccagcagaagcgcatgttcggcttcgtcaccttcgtctacgccgagacggtgaagatcatcctcagcaagggcaacccgcacttcgtttgcgacgctcgcgtgctcgtcaagccctacaaggagaagggcaaggtccccgacaggttcaggaagctgcagcacccgcaccacggcgacttcgccggctgcacgtcgcccaccggactgctggattccagggaccccttcgacctgcagcaaccgcagattggacctaggatgatgtacgggaacgttgctggccacgaagcattcctgaggaggaaactggaagagcagcagcaggcggccgagctgcagcaggccatcgagctggaggggcgccgcttcatggtgctgcacctcctcgacctcaagagcaggggccaccaccacctcggctcctcccccgcggccatggccaccaccactctggggcaaggcgacgacggctgcaaaggccgcagcgccaacgggaatgacaatgccgtcgccttccatttggaggatgccaacatccaagatactcctaccaagatgaacagtaacagccttgcaatgagtggtgggcctgcagccggtgcaggaggcgagcacgaggagcagcagcaggatggggacggggatggcagtcccaagcaggcagtcaaccctgggaaagaggagaagacggaatctggtcctgtcacagccacgcccattgttgcctgtggattccaagaaagtggcgtggtggagcacatcttgcctgacagcccctttgcgtcccccagcaaggcctccactcaaaatgggagcatcatcagcaatgcgggttggtccctcttccccccgcctgcatccaccatggagctgcccccgtacagctcttgcttcttccaggcgcccaggttttctcctgggcatgaagccattgggctgtgaatacagagcaaggggagggagggggtctactttcctctaatctgtgaggactatcggtgaccccgtcaagtggaggcaagagttaggaagctttgattaacaaatactaggtgtatgttcagagagagggacagcaacaacatcaaccaaaaagagagagagagagacaaagacaagtctaggttgttttagctctaggccctaagtatatgatgatagcagtcgtataaataacagtgttttagtaagtatctcctgccgggtatgaagactcaagaacaaaggtcagatctcgcgtatgctcgtttgtagcagtgtggatctgatacaggtaattgaaacctttagatggtggtagggctagtagtgagcagtagacgacaactagtcctggcagccagttgtagtgaggtgacatggctgcatacagacatccaaccaaaggaaacagagggtgtggtgtggaaagaaggggagagtggacaaaagccagacatggctggcgctgctgctgcataggcacaggcacaggcacagggaaaggtgatgagacgagaggggtggggtggtactctgctgggaccggcgcactcacgggtgcggagaatcagcttcgcctcacgagcgatgcagcagcggagacacagacacctctcgtctgcgtactgtttcgcccatgctcttgtcttgtacgcatgcagcagcgctccttgtcctttggctccatcgatgtattacctggctcttcttttcaactaggagtttagcggacaaagaaatgaaaaagtaattagcagtcatttatcttggtc

SEQ ID NO: 111108 - protein, 657 aa, Zea mays subsp. mays
  misc_feature (1)..(657): Ceres Seq. ID no. 15180189
  misc_feature (324)..(380): Pfam Name: RNA recognition motif. (a.k.a. RRM, RBD, or RNP domain) Pfam Description: RNA recognition motif. (a.k.a. RRM, RBD, or RNP
  misc_feature (29)..(257): Homolog of NCBI NO: 19423979 NR Description: unknown protein [Arabidopsis thaliana]
  misc_feature (223)..(562): Homolog of NCBI NO: 19423979 NR Description: unknown protein [Arabidopsis thaliana]
  misc_feature (29)..(257): Homolog of NCBI NO: 15231090 NR Description: RNA recognition motif (RRM)-containing protein
  misc_feature (223)..(562): Homolog of NCBI NO: 15231090 NR Description: RNA recognition motif (RRM)-containing protein
  misc_feature (29)..(257): Homolog of NCBI NO: 21594547 NR Description: unknown [Arabidopsis thaliana]
  misc_feature (223)..(562): Homolog of NCBI NO: 21594547 NR Description: unknown [Arabidopsis thaliana]
  misc_feature (29)..(107): Homolog of NCBI NO: 38230504 NR Description: predicted protein [Populus alba x Populus tremula]
  misc_feature (142)..(657): Homolog of NCBI NO: 38230504 NR Description: predicted protein [Populus alba x Populus tremula]
  misc_feature (29)..(97): Homolog of NCBI NO: 33146675 NR Description: putative DAZ associated protein 1
  misc_feature (91)..(607): Homolog of NCBI NO: 33146675 NR Description: putative DAZ associated protein 1
TREKGKPPPPPHLIRRGPHAPARSRRYAMDAWEATKAVFDRVRALDPDNASKIMGLLLIQDNSDKELIRLAFGPDHLLHAFVSAARADLAAKPASPPSPVLGPLHQTWGAPPHPSPTAGSDHQHQAPFAADLALGYDFDGAGAGADAFFPDDYDCWSPAGAAHRRSFSLSDAEATAAAAGGAAWRPCMYFARGFCKNGSSCRFLHGFPEDDDAAAEREMVVMRAKALAAAAARPQQQQQLMASAFPFSPSPPKGVNLNFLLHQHQQQNEPQRAAAAAAMLLQGGDDMHSRFPVRSPRMDRGELMSSPAARQIYLTFPADSTFSEEDVSIYFSMYGPVQDVRIPYQQKRMFGFVTFVYAETVKIILSKGNPHFVCDARVLVKPYKEKGKVPDRFRKLQHPHHGDFAGCTSPTGLLDSRDPFDLQQPQIGPRMMYGNVAGHEAFLRRKLEEQQQAAELQQAIELEGRRFMVLHLLDLKSRGHHHLGSSPAAMATTTLGQGDDGCKGRSANGNDNAVAFHLEDANIQDTPTKMNSNSLAMSGGPAAGAGGEHEEQQQDGDGDGSPKQAVNPGKEEKTESGPVTATPIVACGFQESGVVEHILPDSPFASPSKASTQNGSIISNAGWSLFPPPASTMELPPYSSCFFQAPRFSPGHEAIGL

SEQ ID NO: 111109 - protein, 629 aa, Zea mays subsp. mays
  misc_feature (1)..(629): Ceres Seq. ID no. 15180190
  misc_feature (296)..(352): Pfam Name: RNA recognition motif. (a.k.a. RRM, RBD, or RNP domain) Pfam Description: RNA recognition motif. (a.k.a. RRM, RBD, or RNP
  misc_feature (1)..(229): Homolog of NCBI NO: 19423979 NR Description: unknown protein [Arabidopsis thaliana]
  misc_feature (195)..(534): Homolog of NCBI NO: 19423979 NR Description: unknown protein [Arabidopsis thaliana]
  misc_feature (1)..(229): Homolog of NCBI NO: 15231090 NR Description: RNA recognition motif (RRM)-containing protein
  misc_feature (195)..(534): Homolog of NCBI NO: 15231090 NR Description: RNA recognition motif (RRM)-containing protein
  misc_feature (1)..(229): Homolog of NCBI NO: 21594547 NR Description: unknown [Arabidopsis thaliana]
  misc_feature (195)..(534): Homolog of NCBI NO: 21594547 NR Description: unknown [Arabidopsis thaliana]
  misc_feature (1)..(79): Homolog of NCBI NO: 38230504 NR Description: predicted protein [Populus alba x Populus tremula]
  misc_feature (114)..(629): Homolog of NCBI NO: 38230504 NR Description: predicted protein [Populus alba x Populus tremula]
  misc_feature (1)..(69): Homolog of NCBI NO: 33146675 NR Description: putative DAZ associated protein 1
  misc_feature (63)..(579): Homolog of NCBI NO: 33146675 NR Description: putative DAZ associated protein 1
MDAWEATKAVFDRVRALDPDNASKIMGLLLIQDNSDKELIRLAFGPDHLLHAFVSAARADLAAKPASPPSPVLGPLHQTWGAPPHPSPTAGSDHQHQAPFAADLALGYDFDGAGAGADAFFPDDYDCWSPAGAAHRRSFSLSDAEATAAAAGGAAWRPCMYFARGFCKNGSSCRFLHGFPEDDDAAAEREMVVMRAKALAAAAARPQQQQQLMASAFPFSPSPPKGVNLNFLLHQHQQQNEPQRAAAAAAMLLQGGDDMHSRFPVRSPRMDRGELMSSPAARQIYLTFPADSTFSEEDVSIYFSMYGPVQDVRIPYQQKRMFGFVTFVYAETVKIILSKGNPHFVCDARVLVKPYKEKGKVPDRFRKLQHPHHGDFAGCTSPTGLLDSRDPFDLQQPQIGPRMMYGNVAGHEAFLRRKLEEQQQAAELQQAIELEGRRFMVLHLLDLKSRGHHHLGSSPAAMATTTLGQGDDGCKGRSANGNDNAVAFHLEDANIQDTPTKMNSNSLAMSGGPAAGAGGEHEEQQQDGDGDGSPKQAVNPGKEEKTESGPVTATPIVACGFQESGVVEHILPDSPFASPSKASTQNGSIISNAGWSLFPPPASTMELPPYSSCFFQAPRFSPGHEAIGL

SEQ ID NO: 111110 - protein, 604 aa, Zea mays subsp. mays
  misc_feature (1)..(604): Ceres Seq. ID no. 15180191
  misc_feature (271)..(327): Pfam Name: RNA recognition motif. (a.k.a. RRM, RBD, or RNP domain) Pfam Description: RNA recognition motif. (a.k.a. RRM, RBD, or RNP
  misc_feature (1)..(204): Homolog of NCBI NO: 19423979 NR Description: unknown protein [Arabidopsis thaliana]
  misc_feature (170)..(509): Homolog of NCBI NO: 19423979 NR Description: unknown protein [Arabidopsis thaliana]
  misc_feature (1)..(204): Homolog of NCBI NO: 15231090 NR Description: RNA recognition motif (RRM)-containing protein
  misc_feature (170)..(509): Homolog of NCBI NO: 15231090 NR Description: RNA recognition motif (RRM)-containing protein
  misc_feature (1)..(204): Homolog of NCBI NO: 21594547 NR Description: unknown [Arabidopsis thaliana]
  misc_feature (170)..(509): Homolog of NCBI NO: 21594547 NR Description: unknown [Arabidopsis thaliana]
  misc_feature (1)..(54): Homolog of NCBI NO: 38230504 NR Description: predicted protein [Populus alba x Populus tremula]
  misc_feature (89)..(604): Homolog of NCBI NO: 38230504 NR Description: predicted protein [Populus alba x Populus tremula]
  misc_feature (1)..(44): Homolog of NCBI NO: 33146675 NR Description: putative DAZ associated protein 1
  misc_feature (38)..(554): Homolog of NCBI NO: 33146675 NR Description: putative DAZ associated protein 1
MGLLLIQDNSDKELIRLAFGPDHLLHAFVSAARADLAAKPASPPSPVLGPLHQTWGAPPHPSPTAGSDHQHQAPFAADLALGYDFDGAGAGADAFFPDDYDCWSPAGAAHRRSFSLSDAEATAAAAGGAAWRPCMYFARGFCKNGSSCRFLHGFPEDDDAAAEREMVVMRAKALAAAAARPQQQQQLMASAFPFSPSPPKGVNLNFLLHQHQQQNEPQRAAAAAAMLLQGGDDMHSRFPVRSPRMDRGELMSSPAARQIYLTFPADSTFSEEDVSIYFSMYGPVQDVRIPYQQKRMFGFVTFVYAETVKIILSKGNPHFVCDARVLVKPYKEKGKVPDRFRKLQHPHHGDFAGCTSPTGLLDSRDPFDLQQPQIGPRMMYGNVAGHEAFLRRKLEEQQQAAELQQAIELEGRRFMVLHLLDLKSRGHHHLGSSPAAMATTTLGQGDDGCKGRSANGNDNAVAFHLEDANIQDTPTKMNSNSLAMSGGPAAGAGGEHEEQQQDGDGDGSPKQAVNPGKEEKTESGPVTATPIVACGFQESGVVEHILPDSPFASPSKASTQNGSIISNAGWSLFPPPASTMELPPYSSCFFQAPRFSPGHEAIGL

SEQ ID NO: 111111 - DNA, 1789 bp, Zea mays subsp. mays
  misc_feature (1)..(1789): Ceres Seq. ID no. 14303249
atctagggctattagaaaacgtgcaaggcttctttcctcccaaatcccctgagcaaggcccccgtcggctagcgccgcagccgtcgccgtcgacgccgactctcaccggcagccgcttgcagcgcgtcccttccccgctcccggcgccatggactgcgcaaagggaaggtcgatggcggacctctacgacgagctgatgttggagatcttctcgcgcatgcccgtcaaagacctccgccattccacttacgtgtgcaaatcttggcgcaacctcatcaccgaccccctcaacggcaagaagctgccccagaccctggaaggcttcttccacggcggcgtcggagggcctcgcagctacggccatttcaccagcctgccggggagcggagtgcctccggtcgacccttccttctcttttatcaaggcaatggtgcctggggtcgagcgcatggtcctcttggattcttgcaacgggctcctgctctttgggtgcacgcgggagggcaagttcgggtacatcgtgtcaaaccctgcgaccaagaaattggtgactgtgcccgccagctccggctcttgtccgcctccacctttatttgcatttgaagcggaagtcgattatgatagtggggaaaaatatgcacacacctttctgatgtttaacccggctgtctcctcgcacttccacttgttccagatctggcaggatatgacggtggaggatgtggaaacggtgcactcttactcgtctgaaacgaaggcatggagtgacaggtcaagcaagtggcggcgaggtgaagagggcagtgaatgggggctgtggggtgaatgcctcatcaaattcaggatgggcagggctttgatcaacgatctgctgcattttgttggcttcgattctcagaaacaagaggatgtgatagttgcagtggatggggaagggaagacttgtaggatcatcgactggcatggtaaggatgtgagattaatcatttttattggtcaatcccaagaccgtctgcactgcatcggtgtcaatacgaaagcaggtcaagaccatatacacatcacgcggatgtcaatctgggttcttgaggactatgatacaaaagcatggatcctgaagcacagtgtgggctctttgcagttttttggattactgggtcgcctggtccatgatttcaatattgtggccattcatccagatcacaattctatcatcattgttcagcactggaaccagaaacttgtatcatataacatggatacccaggaactgcgtggtctccgcactcttgaaaatggctgtgcctatgtggctattaccccatacgttccctgtttcttggagtcatcagttcttgccaccaaaggttgaggttgttgctttttggagacttctctgcatgttcagcaatagcttgatcatccaagtgtggggcaaactagcagtgtgggtaaacctactagaatcaggtggtgcaaagttggattacatgtctttaggtgatctattctgatggtgctttaatgtcctcttgtaatgctgtgagaaagctctttacaagacagcatgcaggttagcattacatattactagttcgagctgcccaacacatgtaagttctcagttttgagtttcagatgctacactttgtgtttccagaatgatgtctccatcttttttgtgtgcttcctttttctcggcctatattagcgagccattactgactgaatttgtgcttggtcggtgctgtatatgtattttatgctgggaaatgcatttatcttcccc

SEQ ID NO: 111112 - protein, 407 aa, Zea mays subsp. mays
  misc_feature (1)..(407): Ceres Seq. ID no. 14303250
  misc_feature (10)..(54): Pfam Name: F-box domain Pfam Description: F-box domain
  misc_feature (15)..(186): Homolog of NCBI NO: 34898796 NR Description: OJ1131_E05.24 [Oryza sativa (japonica
  misc_feature (189)..(401): Homolog of NCBI NO: 34898796 NR Description: OJ1131_E05.24 [Oryza sativa (japonica
  misc_feature (39)..(212): Homolog of NCBI NO: 33146479 NR Description: receptor-like kinase-like [Oryza sativa (japonica
  misc_feature (190)..(400): Homolog of NCBI NO: 33146479 NR Description: receptor-like kinase-like [Oryza sativa (japonica
  misc_feature (39)..(212): Homolog of NCBI NO: 34898802 NR Description: OJ1131_E05.28 [Oryza sativa (japonica
  misc_feature (190)..(400): Homolog of NCBI NO: 34898802 NR Description: OJ1131_E05.28 [Oryza sativa (japonica
  misc_feature (189)..(400): Homolog of NCBI NO: 34898790 NR Description: OJ1131_E05.21 [Oryza sativa (japonica
  misc_feature (2)..(212): Homolog of NCBI NO: 34898790 NR Description: OJ1131_E05.21 [Oryza sativa (japonica
  misc_feature (189)..(400): Homolog of NCBI NO: 34898788 NR Description: OJ1131_E05.20 [Oryza sativa (japonica
  misc_feature (2)..(212): Homolog of NCBI NO: 34898788 NR Description: OJ1131_E05.20 [Oryza sativa (japonica
MDCAKGRSMADLYDELMLEIFSRMPVKDLRHSTYVCKSWRNLITDPLNGKKLPQTLEGFFHGGVGGPRSYGHFTSLPGSGVPPVDPSFSFIKAMVPGVERMVLLDSCNGLLLFGCTREGKFGYIVSNPATKKLVTVPASSGSCPPPPLFAFEAEVDYDSGEKYAHTFLMFNPAVSSHFHLFQIWQDMTVEDVETVHSYSSETKAWSDRSSKWRRGEEGSEWGLWGECLIKFRMGRALINDLLHFVGFDSQKQEDVIVAVDGEGKTCRIIDWHGKDVRLIIFIGQSQDRLHCIGVNTKAGQDHIHITRMSIWVLEDYDTKAWILKHSVGSLQFFGLLGRLVHDFNIVAIHPDHNSIIIVQHWNQKLVSYNMDTQELRGLRTLENGCAYVAITPYVPCFLESSVLATKG

SEQ ID NO: 111113 - protein, 399 aa, Zea mays subsp. mays
  misc_feature (1)..(399): Ceres Seq. ID no. 14303251
  misc_feature (2)..(46): Pfam Name: F-box domain Pfam Description: F-box domain
  misc_feature (7)..(178): Homolog of NCBI NO: 34898796 NR Description: OJ1131_E05.24 [Oryza sativa (japonica
  misc_feature (181)..(393): Homolog of NCBI NO: 34898796 NR Description: OJ1131_E05.24 [Oryza sativa (japonica
  misc_feature (31)..(204): Homolog of NCBI NO: 33146479 NR Description: receptor-like kinase-like [Oryza sativa (japonica
  misc_feature (182)..(392): Homolog of NCBI NO: 33146479 NR Description: receptor-like kinase-like [Oryza sativa (japonica
  misc_feature (31)..(204): Homolog of NCBI NO: 34898802 NR Description: OJ1131_E05.28 [Oryza sativa (japonica
  misc_feature (182)..(392): Homolog of NCBI NO: 34898802 NR Description: OJ1131_E05.28 [Oryza sativa (japonica
  misc_feature (181)..(392): Homolog of NCBI NO: 34898790 NR Description: OJ1131_E05.21 [Oryza sativa (japonica
  misc_feature (1)..(204): Homolog of NCBI NO: 34898790 NR Description: OJ1131_E05.21 [Oryza sativa (japonica
  misc_feature (181)..(392): Homolog of NCBI NO: 34898788 NR Description: OJ1131_E05.20 [Oryza sativa (japonica
  misc_feature (1)..(204): Homolog of NCBI NO: 34898788 NR Description: OJ1131_E05.20 [Oryza sativa (japonica
MADLYDELMLEIFSRMPVKDLRHSTYVCKSWRNLITDPLNGKKLPQTLEGFFHGGVGGPRSYGHFTSLPGSGVPPVDPSFSFIKAMVPGVERMVLLDSCNGLLLFGCTREGKFGYIVSNPATKKLVTVPASSGSCPPPPLFAFEAEVDYDSGEKYAHTFLMFNPAVSSHFHLFQIWQDMTVEDVETVHSYSSETKAWSDRSSKWRRGEEGSEWGLWGECLIKFRMGRALINDLLHFVGFDSQKQEDVIVAVDGEGKTCRIIDWHGKDVRLIIFIGQSQDRLHCIGVNTKAGQDHIHITRMSIWVLEDYDTKAWILKHSVGSLQFFGLLGRLVHDFNIVAIHPDHNSIIIVQHWNQKLVSYNMDTQELRGLRTLENGCAYVAITPYVPCFLESSVLATKG

SEQ ID NO: 111114 - protein, 391 aa, Zea mays subsp. mays
  misc_feature (1)..(391): Ceres Seq. ID no. 14303252
  misc_feature (1)..(38): Pfam Name: F-box domain Pfam Description: F-box domain
  misc_feature (1)..(170): Homolog of NCBI NO: 34898796 NR Description: OJ1131_E05.24 [Oryza sativa (japonica
  misc_feature (173)..(385): Homolog of NCBI NO: 34898796 NR Description: OJ1131_E05.24 [Oryza sativa (japonica
  misc_feature (23)..(196): Homolog of NCBI NO: 33146479 NR Description: receptor-like kinase-like [Oryza sativa (japonica
  misc_feature (174)..(384): Homolog of NCBI NO: 33146479 NR Description: receptor-like kinase-like [Oryza sativa (japonica
  misc_feature (23)..(196): Homolog of NCBI NO: 34898802 NR Description: OJ1131_E05.28 [Oryza sativa (japonica
  misc_feature (174)..(384): Homolog of NCBI NO: 34898802 NR Description: OJ1131_E05.28 [Oryza sativa (japonica
  misc_feature (173)..(384): Homolog of NCBI NO: 34898790 NR Description: OJ1131_E05.21 [Oryza sativa (japonica
  misc_feature (1)..(196): Homolog of NCBI NO: 34898790 NR Description: OJ1131_E05.21 [Oryza sativa (japonica
  misc_feature (173)..(384): Homolog of NCBI NO: 34898788 NR Description: OJ1131_E05.20 [Oryza sativa (japonica
  misc_feature (1)..(196): Homolog of NCBI NO: 34898788 NR Description: OJ1131_E05.20 [Oryza sativa (japonica
MLEIFSRMPVKDLRHSTYVCKSWRNLITDPLNGKKLPQTLEGFFHGGVGGPRSYGHFTSLPGSGVPPVDPSFSFIKAMVPGVERMVLLDSCNGLLLFGCTREGKFGYIVSNPATKKLVTVPASSGSCPPPPLFAFEAEVDYDSGEKYAHTFLMFNPAVSSHFHLFQIWQDMTVEDVETVHSYSSETKAWSDRSSKWRRGEEGSEWGLWGECLIKFRMGRALINDLLHFVGFDSQKQEDVIVAVDGEGKTCRIIDWHGKDVRLIIFIGQSQDRLHCIGVNTKAGQDHIHITRMSIWVLEDYDTKAWILKHSVGSLQFFGLLGRLVHDFNIVAIHPDHNSIIIVQHWNQKLVSYNMDTQELRGLRTLENGCAYVAITPYVPCFLESSVLATKG

SEQ ID NO: 111115 - DNA, 1073 bp, Zea mays subsp. mays
  misc_feature (1)..(1073): Ceres Seq. ID no. 13622757
aaagttgtggctgcgacacaaacactgcgccatcacatacacataccatctctccaccatcctctgtccagacgaccagaccaaattaaaaggagaagcaaacagagatctggcaatctgggtgggggtgggcggcgagagagcaggaggagaagaccattgccccttgaaggcgggctccagagcgagcttctccgcgcgccctctctgtttgccttgcctgcttgcctctactcgtccggcccagccatggccaccatcctggagaccatccagaaggcgaggctcctgccgcccaggccgctcaaggacgagctgccaaccttcggcggcggcggcagagaggagagccacctcacgggcctgcggaagcggctgtccgccttctccggcaagatccagcccatctcctccgcgtcggccgagtgggcgttccgccggcgctcccggccggcgccctccctcggcgcgggaggcggcggctccctgaggcagtggtggcggcggggcgtcgtcggctggctcctgtcccggaagccggggttcgcgggcgacctcgagatgaacgaggacgaggcccgccacggccaggggcacctggggctggggccacgtcctctacagggtgcgctccggcgtccgccgcctcgtcgtgtccgcgcactcgctgcccaccacgcagaggcagtccctgccgccgccggcgcactgcaagccggcggcgctcgcccacgcgcagaggctgggcttccaccacgccggccacgccatggccactaaggagggtcgccggtcgcgccgcgccgcgctgcgcttgccggtgctgtttgcggccgatctccctccagattcggaaacggagaagcgggcgagaggcacgagaagaggaggattcaggttgcaggtaggtgcgtgagatcggtggcgaagaaatcgctgtaccgttataagtgaaaactagctcggtgaatcgatggtgaatggaatggaatggaaggtttaccatcctgtgctgtagaggtcaactggtcaagtgttgtatcatatgctcgttctttatattctttttgggt

SEQ ID NO: 111116 - protein, 259 aa, Zea mays subsp. mays
  misc_feature (1)..(259): Ceres Seq. ID no. 13622758
  misc_feature (88)..(194): Homolog of NCBI NO: 7486016 NR Description: hypothetical protein F23E12.120 - Arabidopsis
  misc_feature (84)..(194): Homolog of NCBI NO: 18418660 NR Description: expressed protein [Arabidopsis thaliana]
  misc_feature (84)..(194): Homolog of NCBI NO: 21593793 NR Description: unknown [Arabidopsis thaliana]
  misc_feature (84)..(193): Homolog of NCBI NO: 28411879 NR Description: OSJNBa0016N23.32 [Oryza sativa (japonica
KVVAATQTLRHHIHIPSLHHPLSRRPDQIKRRSKQRSGNLGGGGRRESRRRRPLPLEGGLQSELLRAPSLFALPACLYSSGPAMATILETIQKARLLPPRPLKDELPTFGGGGREESHLTGLRKRLSAFSGKIQPISSASAEWAFRRRSRPAPSLGAGGGGSLRQWWRRGVVGWLLSRKPGFAGDLEMNEDEARHGQGHLGLGPRPLQGALRRPPPRRVRALAAHHAEAVPAAAGALQAGGARPRAEAGLPPRRPRHGH

SEQ ID NO: 111117 - protein, 176 aa, Zea mays subsp. mays
  misc_feature (1)..(176): Ceres Seq. ID no. 13622759
  misc_feature (5)..(111): Homolog of NCBI NO: 7486016 NR Description: hypothetical protein F23E12.120 - Arabidopsis
  misc_feature (1)..(111): Homolog of NCBI NO: 18418660 NR Description: expressed protein [Arabidopsis thaliana]
  misc_feature (1)..(111): Homolog of NCBI NO: 21593793 NR Description: unknown [Arabidopsis thaliana]
  misc_feature (1)..(110): Homolog of NCBI NO: 28411879 NR Description: OSJNBa0016N23.32 [Oryza sativa (japonica
MATILETIQKARLLPPRPLKDELPTFGGGGREESHLTGLRKRLSAFSGKIQPISSASAEWAFRRRSRPAPSLGAGGGGSLRQWWRRGVVGWLLSRKPGFAGDLEMNEDEARHGQGHLGLGPRPLQGALRRPPPRRVRALAAHHAEAVPAAAGALQAGGARPRAEAGLPPRRPRHGH

SEQ ID NO: 111118 - protein, 162 aa, Zea mays subsp. mays
  misc_feature (1)..(162): Ceres Seq. ID no. 13622760
KLWLRHKHCAITYTYHLSTILCPDDQTKLKGEANRDLAIWVGVGGERAGGEDHCPLKAGSRASFSARPLCLPCLLASTRPAQPWPPSWRPSRRRGSCRPGRSRTSCQPSAAAAERRATSRACGSGCPPSPARSSPSPPRRPSGRSAGAPGRRPPSAREAAAP

SEQ ID NO: 111119 - DNA, 872 bp, Zea mays subsp. mays
  misc_feature (1)..(872): Ceres Seq. ID no. 12634327
  misc_feature: MA Experiment ID: 108523 Result: Down-regulated in Transcription
  misc_feature: MA Experiment 108523 PARAMETER Experiment Name: Zm_42deg_Heat_P Parameter: Age (day) Value: 8
  misc_feature: MA Experiment 108523 PARAMETER Experiment Name: Zm_42deg_Heat_P Parameter: Organism Value: Zea mays
  misc_feature: MA Experiment 108523 PARAMETER Experiment Name: Zm_42deg_Heat_P Parameter: Plant Line Value: 35A19
  misc_feature: MA Experiment 108523 PARAMETER Experiment Name: Zm_42deg_Heat_P Parameter: Temperature (deg C) Value: 42 vs. 22
  misc_feature: MA Experiment 108523 PARAMETER Experiment Name: Zm_42deg_Heat_P Parameter: Timepoint (hr) Value: 6
  misc_feature: MA Experiment 108523 PARAMETER Experiment Name: Zm_42deg_Heat_P Parameter: Tissue Value: Aerial
  misc_feature: MA Experiment ID: 108528 Result: Down-regulated in Transcription
  misc_feature: MA Experiment 108528 PARAMETER Experiment Name: Zm_Imbibed_Seeds_P Parameter: Age (day) Value: 5 vs. 2
  misc_feature: MA Experiment 108528 PARAMETER Experiment Name: Zm_Imbibed_Seeds_P Parameter: Organism Value: Zea mays
  misc_feature: MA Experiment 108528 PARAMETER Experiment Name: Zm_Imbibed_Seeds_P Parameter: Plant Line Value: 35A19
  misc_feature: MA Experiment 108528 PARAMETER Experiment Name: Zm_Imbibed_Seeds_P Parameter: Tissue Value: Aerial vs. Embryo
agtcgtcacgaccatgatttggtaactgaagcaacaggaagccggcggtgtaggcgacccatggcgccacagaggaggagagagagggcggtgggggaggcgcggccgagctcgtcggcgccgacaccggcggggccggggtgggtcgaggtgcagcgccggcgggtgggcggcggttggacaagccgccggatctctatctacgcctcccgagtctacttcctcctcctgatgctccagatcccgctcttcagggttccttgtagagcaggcacatgcacaactcctattcaagtcacatcgtctcagttggtgtcaaacgagatattcccaccagctgttgtgaaggccatgctctaccctggagctatcgtgagcagcctaactaaaagcaaggcatttccgagttggagtgacctgtttgacatgtacaacctgacagaagccaaaaatgcttctgctgtagttgatctccagcgtctagagatacttgcgggaagctacttctgtgttgctggagggcttcttggcatcataaatcctgggaggatgactttgtttggtactcttttggttatctggggtctcgtgaaggaagcactatttgggaagccagtgaacagcgatccgactgaatcaagttatgtctacccaaccattttgattgcacttatatgtgctttcatgtcaataacttacaatgtaaagaagacagcagcaagtagtcctgtttctctcgcgaagccactgaaaagttctgccaagtcaaaactgaagtagaccctgttacaactttaatccttgtaactcattccagaatatttatttatccttgtaactttcaatcctatagcattcagttttttccttgt

SEQ ID NO: 111120 - protein, 259 aa, Zea mays subsp. mays
  misc_feature (1)..(259): Ceres Seq. ID no. 12634328
  misc_feature (86)..(251): Homolog of NCBI NO: 15220078 NR Description: hypothetical protein; protein id: At1g80200.1
  misc_feature (107)..(259): Homolog of NCBI NO: 8953390 NR Description: putative protein [Arabidopsis thaliana]
  misc_feature (59)..(259): Homolog of NCBI NO: 17064978 NR Description: putative protein [Arabidopsis thaliana]
  misc_feature (59)..(259): Homolog of NCBI NO: 18416514 NR Description: putative protein
  misc_feature (21)..(259): Homolog of NCBI NO: 34913974 NR Description: B1110C07.25 [Oryza sativa (japonica
SRHDHDLVTEATGSRRCRRPMAPQRRRERAVGEARPSSSAPTPAGPGWVEVQRRRVGGGWTSRRISIYASRVYFLLLMLQIPLFRVPCRAGTCTTPIQVTSSQLVSNEIFPPAVVKAMLYPGAIVSSLTKSKAFPSWSDLFDMYNLTEAKNASAVVDLQRLEILAGSYFCVAGGLLGIINPGRMTLFGTLLVIWGLVKEALFGKPVNSDPTESSYVYPTILIALICAFMSITYNVKKTAASSPVSLAKPLKSSAKSKLK

SEQ ID NO: 111121 - protein, 239 aa, Zea mays subsp. mays
  misc_feature (1)..(239): Ceres Seq. ID no. 12634329
  misc_feature (66)..(231): Homolog of NCBI NO: 15220078 NR Description: hypothetical protein; protein id: At1g80200.1
  misc_feature (87)..(239): Homolog of NCBI NO: 8953390 NR Description: putative protein [Arabidopsis thaliana]
  misc_feature (39)..(239): Homolog of NCBI NO: 17064978 NR Description: putative protein [Arabidopsis thaliana]
  misc_feature (39)..(239): Homolog of NCBI NO: 18416514 NR Description: putative protein
  misc_feature (1)..(239): Homolog of NCBI NO: 34913974 NR Description: B1110C07.25 [Oryza sativa (japonica
MAPQRRRERAVGEARPSSSAPTPAGPGWVEVQRRRVGGGWTSRRISIYASRVYFLLLMLQIPLFRVPCRAGTCTTPIQVTSSQLVSNEIFPPAVVKAMLYPGAIVSSLTKSKAFPSWSDLFDMYNLTEAKNASAVVDLQRLEILAGSYFCVAGGLLGIINPGRMTLFGTLLVIWGLVKEALFGKPVNSDPTESSYVYPTILIALICAFMSITYNVKKTAASSPVSLAKPLKSSAKSKLK

SEQ ID NO: 111122 - protein, 182 aa, Zea mays subsp. mays
  misc_feature (1)..(182): Ceres Seq. ID no. 12634330
  misc_feature (1)..(182): Homolog of NCBI NO: 17064978 NR Description: putative protein [Arabidopsis thaliana]
  misc_feature (1)..(182): Homolog of NCBI NO: 18416514 NR Description: putative protein
  misc_feature (1)..(182): Homolog of NCBI NO: 34913974 NR Description: B1110C07.25 [Oryza sativa (japonica
  misc_feature (9)..(174): Homolog of NCBI NO: 15220078 NR Description: hypothetical protein; protein id: At1g80200.1
  misc_feature (30)..(182): Homolog of NCBI NO: 8953390 NR Description: putative protein [Arabidopsis thaliana]
MLQIPLFRVPCRAGTCTTPIQVTSSQLVSNEIFPPAVVKAMLYPGAIVSSLTKSKAFPSWSDLFDMYNLTEAKNASAVVDLQRLEILAGSYFCVAGGLLGIINPGRMTLFGTLLVIWGLVKEALFGKPVNSDPTESSYVYPTILIALICAFMSITYNVKKTAASSPVSLAKPLKSSAKSKLK

SEQ ID NO: 111123 - DNA, 877 bp, Zea mays subsp. mays
  misc_feature (1)..(877): Ceres Seq. ID no. 15180222
  misc_feature: MA Experiment ID: 108527 Result: Up-regulated in Transcription
  misc_feature: MA Experiment 108527 PARAMETER Experiment Name: Zm_5mM_NO_P Parameter: Age (day) Value: 8
  misc_feature: MA Experiment 108527 PARAMETER Experiment Name: Zm_5mM_NO_P Parameter: Organism Value: Zea mays
  misc_feature: MA Experiment 108527 PARAMETER Experiment Name: Zm_5mM_NO_P Parameter: Plant Line Value: 35A19
  misc_feature: MA Experiment 108527 PARAMETER Experiment Name: Zm_5mM_NO_P Parameter: Timepoint (hr) Value: 6
  misc_feature: MA Experiment 108527 PARAMETER Experiment Name: Zm_5mM_NO_P Parameter: Tissue Value: Aerial
  misc_feature: MA Experiment 108527 PARAMETER Experiment Name: Zm_5mM_NO_P Parameter: Treatment Value: 5mM NO vs. No Treatment
  misc_feature: MA Experiment ID: 108529 Result: Up-regulated in Transcription
  misc_feature: MA Experiment 108529 PARAMETER Experiment Name: Zm_Imbibed_Seeds_P Parameter: Age (day) Value: 5 vs. 2
  misc_feature: MA Experiment 108529 PARAMETER Experiment Name: Zm_Imbibed_Seeds_P Parameter: Organism Value: Zea mays
  misc_feature: MA Experiment 108529 PARAMETER Experiment Name: Zm_Imbibed_Seeds_P Parameter: Plant Line Value: 35A19
  misc_feature: MA Experiment 108529 PARAMETER Experiment Name: Zm_Imbibed_Seeds_P Parameter: Tissue Value: Roots vs. Embryo
  misc_feature: MA Experiment ID: 108535 Result: Down-regulated in Transcription
  misc_feature: MA Experiment 108535 PARAMETER Experiment Name: Zm_Meristem_P Parameter: Age (day) Value: 8
  misc_feature: MA Experiment 108535 PARAMETER Experiment Name: Zm_Meristem_P Parameter: Organism Value: Zea mays
  misc_feature: MA Experiment 108535 PARAMETER Experiment Name: Zm_Meristem_P Parameter: Plant Line Value: 35A19
  misc_feature: MA Experiment 108535 PARAMETER Experiment Name: Zm_Meristem_P Parameter: Tissue Value: Root Meristem vs. Above Root Meristem
  misc_feature: MA Experiment ID: 108556 Result: Up-regulated in Transcription
  misc_feature: MA Experiment 108556 PARAMETER Experiment Name: Zm_Drought_P Parameter: Age (day) Value: 9
  misc_feature: MA Experiment 108556 PARAMETER Experiment Name: Zm_Drought_P Parameter: Organism Value: Zea mays
  misc_feature: MA Experiment 108556 PARAMETER Experiment Name: Zm_Drought_P Parameter: Plant Line Value: 35A19
  misc_feature: MA Experiment 108556 PARAMETER Experiment Name: Zm_Drought_P Parameter: Timepoint (hr) Value: 24
  misc_feature: MA Experiment 108556 PARAMETER Experiment Name: Zm_Drought_P Parameter: Tissue Value: Aerial
  misc_feature: MA Experiment 108556 PARAMETER Experiment Name: Zm_Drought_P Parameter: Treatment Value: Drought vs. No Drought
  misc_feature: MA Experiment ID: 108559 Result: Up-regulated in Transcription
  misc_feature: MA Experiment 108559 PARAMETER Experiment Name: Zm_5mM_NO_P Parameter: Age (day) Value: 8
  misc_feature: MA Experiment 108559 PARAMETER Experiment Name: Zm_5mM_NO_P Parameter: Organism Value: Zea mays
  misc_feature: MA Experiment 108559 PARAMETER Experiment Name: Zm_5mM_NO_P Parameter: Plant Line Value: 35A19
  misc_feature: MA Experiment 108559 PARAMETER Experiment Name: Zm_5mM_NO_P Parameter: Timepoint (hr) Value: 12
  misc_feature: MA Experiment 108559 PARAMETER Experiment Name: Zm_5mM_NO_P Parameter: Tissue Value: Aerial
  misc_feature: MA Experiment 108559 PARAMETER Experiment Name: Zm_5mM_NO_P Parameter: Treatment Value: 5mM NO vs. No Treatment
  misc_feature: MA Experiment ID: 20000479 Result: Up-regulated in Transcription
  misc_feature: MA Experiment 20000479 PARAMETER Experiment Name: Zm_Drought_P Parameter: Age (day) Value: 10
  misc_feature: MA Experiment 20000479 PARAMETER Experiment Name: Zm_Drought_P Parameter: Organism Value: Zea mays
  misc_feature: MA Experiment 20000479 PARAMETER Experiment Name: Zm_Drought_P Parameter: Plant Line Value: 35A19
  misc_feature: MA Experiment 20000479 PARAMETER Experiment Name: Zm_Drought_P Parameter: Timepoint (hr) Value: 48
  misc_feature: MA Experiment 20000479 PARAMETER Experiment Name: Zm_Drought_P Parameter: Tissue Value: Aerial
  misc_feature: MA Experiment 20000479 PARAMETER Experiment Name: Zm_Drought_P Parameter: Treatment Value: Drought vs. No Drought
  misc_feature: MA Experiment ID: 20000480 Result: Up-regulated in Transcription
  misc_feature: MA Experiment 20000480 PARAMETER Experiment Name: Zm_Drought_P Parameter: Age (day) Value: 11
  misc_feature: MA Experiment 20000480 PARAMETER Experiment Name: Zm_Drought_P Parameter: Organism Value: Zea mays
  misc_feature: MA Experiment 20000480 PARAMETER Experiment Name: Zm_Drought_P Parameter: Plant Line Value: 35A19
  misc_feature: MA Experiment 20000480 PARAMETER Experiment Name: Zm_Drought_P Parameter: Timepoint (hr) Value: 72
  misc_feature: MA Experiment 20000480 PARAMETER Experiment Name: Zm_Drought_P Parameter: Tissue Value: Aerial
  misc_feature: MA Experiment 20000480 PARAMETER Experiment Name: Zm_Drought_P Parameter: Treatment Value: Drought vs. No Drought
aaacatctcccctgcccttcccctcgcgcagccaaaaaaaaaaccaaaacgcctcctccgcttcgtctcctccctccccctcgccgccgcgactcccgccaccagcccaccacactattaattctgcccctcccccctcgtcctcttccacgtccacaactcccatcccacgtcgcagagccgttcctgtctgcgcctcctccctagacacgcgacgcagagcatatatatagcagcaggggcaggggcaaggacgaagggacgaaagagccagagccgccgccgccgccgccatgtccgtccgcgtggcgtccgtgccgtacctggagcagatggcgcggtgggagcggcaggtggagcggcggcagctgttcctccgcagctaccacttctcgcgcgacgccgacgcggcggcggcgctccccccgcgcgcccgcgccaggcgcgtcgtctgggcggggatgcgccgcctgcgccgcgcagccgccacgggcctccgccgcctccgcgcgcgcctccgcctctgcttcggctgggccgcccgccgccgctcttcctcccgctacggccgcctctccggcgccggcagggcccgcggcgccgccgccgccggtgccgccgagtctgcatgcttctggtaggactgcactgcacaaggactcgaagcgttctttgcttcgtctcccttggttggcgtgcgtgcgtgcgtgtgtgtgaaagtgagaaggtgagcttactttagacatggattagccggtgcgtgtgttgtttgtttgtttgtttgataacttggactgctgctccgtggagtggagttgagtgcctaattaaattagaatgaatgaatcgtctagtagtaattttggttttttgctcg

SEQ ID NO: 111124 - protein, 115 aa, Zea mays subsp. mays
  misc_feature (1)..(115): Ceres Seq. ID no. 15180223
  misc_feature (1)..(115): Homolog of NCBI NO: 34897322 NR Description: hypothetical protein [Oryza sativa]
MSVRVASVPYLEQMARWERQVERRQLFLRSYHFSRDADAAAALPPRARARRVVWAGMRRLRRAAATGLRRLRARLRLCFGWAARRRSSSRYGRLSGAGRARGAAAAGAAESACFW

SEQ ID NO: 111125 - protein, 102 aa, Zea mays subsp. mays
  misc_feature (1)..(102): Ceres Seq. ID no. 15180224
  misc_feature (1)..(102): Homolog of NCBI NO: 34897322 NR Description: hypothetical protein [Oryza sativa]
MARWERQVERRQLFLRSYHFSRDADAAAALPPRARARRVVWAGMRRLRRAAATGLRRLRARLRLCFGWAARRRSSSRYGRLSGAGRARGAAAAGAAESACFW

SEQ ID NO: 111126 - protein, 76 aa, Zea mays subsp. mays
  misc_feature (1)..(76): Ceres Seq. ID no. 15180225
  misc_feature (23)..(49): Homolog of NCBI NO: 7506732 NR Description: hypothetical protein R144.4 - Caenorhabditis
  misc_feature (2)..(45): Homolog of NCBI NO: 15240851 NR Description: expressed protein [Arabidopsis thaliana]
  misc_feature (2)..(56): Homolog of NCBI NO: 15242969 NR Description: formin homology 2 (FH2) domain-containing protein
  misc_feature (23)..(49): Homolog of NCBI NO: 25148492 NR Description: actin-binding WH2 (3G109) [Caenorhabditis elegans]
  misc_feature (16)..(51): Homolog of NCBI NO: 7510074 NR Description: hypothetical protein Y50E8A.g - Caenorhabditis
TSPLPFPSRSQKKNQNASSASSPPSPSPPRLPPPAHHTINSAPPPSSSSTSTTPIPRRRAVPVCASSLDTRRRAYI

SEQ ID NO: 111127 - DNA, 576 bp, Zea mays subsp. mays
  misc_feature (1)..(576): Ceres Seq. ID no. 13586586
  misc_feature: MA Experiment ID: 108530 Result: Down-regulated in Transcription
  misc_feature: MA Experiment 108530 PARAMETER Experiment Name: Zm_Imbibed_Seeds_P Parameter: Age (day) Value: 6 vs. 2
  misc_feature: MA Experiment 108530 PARAMETER Experiment Name: Zm_Imbibed_Seeds_P Parameter: Organism Value: Zea mays
  misc_feature: MA Experiment 108530 PARAMETER Experiment Name: Zm_Imbibed_Seeds_P Parameter: Plant Line Value: 35A19
  misc_feature: MA Experiment 108530 PARAMETER Experiment Name: Zm_Imbibed_Seeds_P Parameter: Tissue Value: Aerial vs. Embryo
  misc_feature: MA Experiment ID: 108535 Result: Up-regulated in Transcription
  misc_feature: MA Experiment 108535 PARAMETER Experiment Name: Zm_Meristem_P Parameter: Age (day) Value: 8
  misc_feature: MA Experiment 108535 PARAMETER Experiment Name: Zm_Meristem_P Parameter: Organism Value: Zea mays
  misc_feature: MA Experiment 108535 PARAMETER Experiment Name: Zm_Meristem_P Parameter: Plant Line Value: 35A19
  misc_feature: MA Experiment 108535 PARAMETER Experiment Name: Zm_Meristem_P Parameter: Tissue Value: Root Meristem vs. Above Root Meristem
accctctgtctcgcaagcgccggccaagtcctgtccctctcccttgtctggttcggatcgtcgttgctagccaggtgctggatccgtagcggcggcggcggccatggacaagagcatgctcggcgacctggacggcctccccgaggaggacaagatgcggatggccgccatgatcgaccagttccagatccgcgacagcctgagaatgtacaattcgctggtggagaggtgcttcacggactgcgtggacacgttccggcgcaagaacctggacaagcaagaggagtcgtgcgtccgccggtgcgcggagaagttcctgaagcactccatgagggtcggcatgaggttcgccgagcttaaccagggtgtggccacgccggactaagaaacacgctgccgctggctggctgctctcgttgcgcgcccgccgccaggtttctggctttcgctggcacagatttgtagccgacaaaaggatttcagcacttcccctgcctgagatatatgcgttttagagccgaacgctgggtgtcagattgaataaaaactgccttgagaagtgttgtatttcgtttc

SEQ ID NO: 111128 - protein, 119 aa, Zea mays subsp. mays
  misc_feature (1)..(119): Ceres Seq. ID no. 15220801
TLCLASAGQVLSLSLVWFGSSLLARCWIRSGGGGHGQEHARRPGRPPRGGQDADGRHDRPVPDPRQPENVQFAGGEVLHGLRGHVPAQEPGQARGVVRPPVRGEVPEALHEGRHEVRRA

SEQ ID NO: 111129 - protein, 93 aa, Zea mays subsp. mays
  misc_feature (1)..(93): Ceres Seq. ID no. 15220802
  misc_feature (20)..(85): Pfam Name: Tim10/DDP family zinc finger Pfam Description: Tim10/DDP family zinc finger
  misc_feature (1)..(84): Homolog of NCBI NO: 23481518 NR Description: mitochondrial import inner membrane translocase
  misc_feature (9)..(86): Homolog of NCBI NO: 19075508 NR Description: similar to yeast Tim9p essential component of the
  misc_feature (9)..(86): Homolog of NCBI NO: 6320815 NR Description: Translocase in inner membrane of mitochondria
  misc_feature (9)..(86): Homolog of NCBI NO: 12230144 NR Description: Mitochondrial import inner membrane translocase
  misc_feature (1)..(91): Homolog of NCBI NO: 11358850 NR Description: small zinc finger-like protein [imported] -
  misc_feature (1)..(91): Homolog of NCBI NO: 5107210 NR Description: small zinc finger-like protein [Arabidopsis
  misc_feature (1)..(93): Homolog of NCBI NO: 21617942 NR Description: mitochondrial import inner membrane translocase
  misc_feature (1)..(93): Homolog of NCBI NO: 15231455 NR Description: small zinc finger-related protein TIM9
  misc_feature (1)..(93): Homolog of NCBI NO: 12230182 NR Description: Mitochondrial import inner membrane translocase
  misc_feature (1)..(93): Homolog of NCBI NO: 12230181 NR Description: Mitochondrial import inner membrane translocase
MDKSMLGDLDGLPEEDKMRMAAMIDQFQIRDSLRMYNSLVERCFTDCVDTFRRKNLDKQEESCVRRCAEKFLKHSMRVGMRFAELNQGVATPD

SEQ ID NO: 111130 - protein, 89 aa, Zea mays subsp. mays
  misc_feature (1)..(89): Ceres Seq. ID no. 15220803
  misc_feature (16)..(81): Pfam Name: Tim10/DDP family zinc finger Pfam Description: Tim10/DDP family zinc finger
  misc_feature (1)..(80): Homolog of NCBI NO: 23481518 NR Description: mitochondrial import inner membrane translocase
  misc_feature (5)..(82): Homolog of NCBI NO: 19075508 NR Description: similar to yeast Tim9p essential component of the
  misc_feature (5)..(82): Homolog of NCBI NO: 6320815 NR Description: Translocase in inner membrane of mitochondria
  misc_feature (5)..(82): Homolog of NCBI NO: 12230144 NR Description: Mitochondrial import inner membrane translocase
  misc_feature (1)..(87): Homolog of NCBI NO: 11358850 NR Description: small zinc finger-like protein [imported] -
  misc_feature (1)..(87): Homolog of NCBI NO: 5107210 NR Description: small zinc finger-like protein [Arabidopsis
  misc_feature (1)..(89): Homolog of NCBI NO: 21617942 NR Description: mitochondrial import inner membrane translocase
  misc_feature (1)..(89): Homolog of NCBI NO: 15231455 NR Description: small zinc finger-related protein TIM9
  misc_feature (1)..(89): Homolog of NCBI NO: 12230182 NR Description: Mitochondrial import inner membrane translocase
  misc_feature (1)..(89): Homolog of NCBI NO: 12230181 NR Description: Mitochondrial import inner membrane translocase
MLGDLDGLPEEDKMRMAAMIDQFQIRDSLRMYNSLVERCFTDCVDTFRRKNLDKQEESCVRRCAEKFLKHSMRVGMRFAELNQGVATPD

SEQ ID NO: 111131 - DNA, 488 bp, Zea mays subsp. mays
  misc_feature (1)..(488): Ceres Seq. ID no. 13586589
gctggacctgatgtttaatgatagtaaggtttgggattttcaaaaaaaactagcaggtctcaacctcgaggcactctcacgcccaacggccacaccaccgccctctccgcgtgcccccgaaaccaccacacgcggccacgccacgccgcccactacgggcgggcctccttgcgcttggagtattggtcgacgtgctcctctcaccgcaccctctactgatactgggttggcgcgagaacggcgagcccacctgaacgcgtgattttggatggtgaaggcacagagtaaagagtctgcaacctttggtggtgcagtttttatgtgcaaccatctgaccaggaaggagtgctttgacaagaaaatatttggcctctctgatttctgtgctgattttgtagagaaagttaaagctggcacaactttattcttatatgatgttgatcagtgtaagctccatggtgttttcgaagcaacttcagatggggctg

SEQ ID NO: 111132 - protein, 86 aa, Zea mays subsp. mays
  misc_feature (1)..(86): Ceres Seq. ID no. 13586590
LDLMFNDSKVWDFQKKLAGLNLEALSRPTATPPPSPRAPETTTRGHATPPTTGGPPCAWSIGRRAPLTAPSTDTGLARERRAHLNA

SEQ ID NO: 111133 - protein, 83 aa, Zea mays subsp. mays
  misc_feature (1)..(83): Ceres Seq. ID no. 13586591
MFNDSKVWDFQKKLAGLNLEALSRPTATPPPSPRAPETTTRGHATPPTTGGPPCAWSIGRRAPLTAPSTDTGLARERRAHLNA

SEQ ID NO: 111134 - protein, 73 aa, Zea mays subsp. mays
  misc_feature (1)..(73): Ceres Seq. ID no. 13586592
  misc_feature (11)..(72): Homolog of NCBI NO: 9757950 NR Description: gene_id:MJC20.15~similar to unknown
  misc_feature (14)..(72): Homolog of NCBI NO: 9758390 NR Description: gene_id:K22G18.3~pir||T01116~similar to unknown
  misc_feature (14)..(72): Homolog of NCBI NO: 22328008 NR Description: expressed protein [Arabidopsis thaliana]
  misc_feature (11)..(72): Homolog of NCBI NO: 584825 NR Description: B2 PROTEIN
  misc_feature (13)..(72): Homolog of NCBI NO: 34896110 NR Description: P0701D05.9 [Oryza sativa (japonica
  misc_feature (13)..(72): Homolog of NCBI NO: 28393783 NR Description: unknown protein [Arabidopsis thaliana]
  misc_feature (2)..(72): Homolog of NCBI NO: 15225756 NR Description: expressed protein [Arabidopsis thaliana]
  misc_feature (14)..(72): Homolog of NCBI NO: 15226909 NR Description: hypothetical protein [Arabidopsis thaliana]
  misc_feature (12)..(72): Homolog of NCBI NO: 34898440 NR Description: Similar to Arabidopsis thaliana chromosome II BAC
MVKAQSKESATFGGAVFMCNHLTRKECFDKKIFGLSDFCADFVEKVKAGTTLFLYDVDQCKLHGVFEATSDGA

SEQ ID NO: 111135 - DNA, 1353 bp, Zea mays subsp. mays
  misc_feature (1)..(1353): Ceres Seq. ID no. 15178630
gcttgtccccaccaggcgccatggacgctcgcgacgacgaaccccccgttctcctcgaccgcgccgcccgcgcctcccgaggcaagaggataaccaagctgctcgaggacgaggtcgagcaggacgaggctttctggaaccaagaagccctcaaggatgaggagaacgatgacaactacgtggaagagccggatgctggtgacgaattcgacagtgattttggtgaagatgaatctgaaactgatgatgagccggagaaggaagtacgcgagagattacctatcaagaaacggctaatgtttcctggcaagacgctgaggaagaccaacgtcaagaagaagaaggcgaccccaaaaccagaagatggcacaaaagccgacaagtctgctgataagccgagttcatccacacaagcagatcttcctgatgaactggaggctgagaaggccatccggaaatcatccagaacgtcggtcatcgtgaggcaagctgaaagagaagcgatacgtgctgaaaaagaagcaacggccaagccgattaagagaaaaaaggagggagaagaaaagcggatgacacaagaggagatgcttttggaagcagctgaaacagagatcatgaacatgagaaatctagaacgtgtcctggcaagagaggaggaagtgaagaaaaaagctgttgttcataaggacacttatgagggtcctacaattcgttttttctcaagagatggggaatcacgtctggaattcataaatggagcatcatttgggtctgaactttgtacaacatcatctccttatccggagaaacctgtttgtgtggtgacaggacttccagccaaataccgtgatccgaagacagggctgccttatgcaactatggaagcatttaaaataatccgggagagtttcctgaaagaggaggctgatagaaagcgtccgaacatgtcgaatatgggagagcttttcgaatcaataactggtggacacttgatgcctaagaagagaagggttgagataaggtctccgaacatgttaggaggctctaggcatggcgggcgtacctggcgaatacctgcttttgatatggtggacgaggactaacgagacagatcccgtggctcccaatatgtcaatatgagagatctttctaaatcaatagccggtgaagaggaagatggataggatgttgtatttagtgttagatcttgtgcttgtagttatcttaatgtatttttgtcagttgataaattcatggttattaaagtggtaaaacgttaaaatgttatgaaacaactttttaatattttaacgcttaaacgaacgttgaaacgccaaaaaaaaaaaaaaaaaa

SEQ ID NO: 111136 - protein, 366 aa, Zea mays subsp. mays
  misc_feature (1)..(366): Ceres Seq. ID no. 15178631
  misc_feature (64)..(249): Pfam Name: Tropomyosin Pfam Description: Tropomyosin
  misc_feature (267)..(319): Homolog of NCBI NO: 6678255 NR Description: transcription factor-like 1 [Mus musculus]
  misc_feature (20)..(240): Homolog of NCBI NO: 37572298 NR Description: Transcription factor-like 1 [Mus musculus]
  misc_feature (20)..(240): Homolog of NCBI NO: 13436005 NR Description: transcription factor-like 1 [Mus musculus]
  misc_feature (20)..(240): Homolog of NCBI NO: 6678255 NR Description: transcription factor-like 1 [Mus musculus]
  misc_feature (7)..(198): Homolog of NCBI NO: 15228030 NR Description: expressed protein [Arabidopsis thaliana]
  misc_feature (9)..(226): Homolog of NCBI NO: 12054305 NR Description: stress responsive gene 6 protein, Srg6
  misc_feature (20)..(366): Homolog of NCBI NO: 15228030 NR Description: expressed protein [Arabidopsis thaliana]
  misc_feature (76)..(366): Homolog of NCBI NO: 12054303 NR Description: stress responsive gene 6 protein, Srg6
  misc_feature (20)..(366): Homolog of NCBI NO: 12054305 NR Description: stress responsive gene 6 protein, Srg6
  misc_feature (8)..(366): Homolog of NCBI NO: 40253658 NR Description: putative stress responsive gene 6 protein, Srg6
LSPPGAMDARDDEPPVLLDRAARASRGKRITKLLEDEVEQDEAFWNQEALKDEENDDNYVEEPDAGDEFDSDFGEDESETDDEPEKEVRERLPIKKRLMFPGKTLRKTNVKKKKATPKPEDGTKADKSADKPSSSTQADLPDELEAEKAIRKSSRTSVIVRQAEREAIRAEKEATAKPIKRKKEGEEKRMTQEEMLLEAAETEIMNMRNLERVLAREEEVKKKAVVHKDTYEGPTIRFFSRDGESRLEFINGASFGSELCTTSSPYPEKPVCVVTGLPAKYRDPKTGLPYATMEAFKIIRESFLKEEADRKRPNMSNMGELFESITGGHLMPKKRRVEIRSPNMLGGSRHGGRTWRIPAFDMVDED

SEQ ID NO: 111137 - protein, 360 aa, Zea mays subsp. mays
  misc_feature (1)..(360): Ceres Seq. ID no. 15178632
  misc_feature (58)..(243): Pfam Name: Tropomyosin Pfam Description: Tropomyosin
  misc_feature (261)..(313): Homolog of NCBI NO: 6678255 NR Description: transcription factor-like 1 [Mus musculus]
  misc_feature (14)..(234): Homolog of NCBI NO: 13436005 NR Description: transcription factor-like 1 [Mus musculus]
  misc_feature (14)..(234): Homolog of NCBI NO: 37572298 NR Description: Transcription factor-like 1 [Mus musculus]
  misc_feature (14)..(234): Homolog of NCBI NO: 6678255 NR Description: transcription factor-like 1 [Mus musculus]
  misc_feature (1)..(192): Homolog of NCBI NO: 15228030 NR Description: expressed protein [Arabidopsis thaliana]
  misc_feature (3)..(220): Homolog of NCBI NO: 12054305 NR Description: stress responsive gene 6 protein, Srg6
  misc_feature (14)..(360): Homolog of NCBI NO: 15228030 NR Description: expressed protein [Arabidopsis thaliana]
  misc_feature (70)..(360): Homolog of NCBI NO: 12054303 NR Description: stress responsive gene 6 protein, Srg6
  misc_feature (14)..(360): Homolog of NCBI NO: 12054305 NR Description: stress responsive gene 6 protein, Srg6
  misc_feature (2)..(360): Homolog of NCBI NO: 40253658 NR Description: putative stress responsive gene 6 protein, Srg6
MDARDDEPPVLLDRAARASRGKRITKLLEDEVEQDEAFWNQEALKDEENDDNYVEEPDAGDEFDSDFGEDESETDDEPEKEVRERLPIKKRLMFPGKTLRKTNVKKKKATPKPEDGTKADKSADKPSSSTQADLPDELEAEKAIRKSSRTSVIVRQAEREAIRAEKEATAKPIKRKKEGEEKRMTQEEMLLEAAETEIMNMRNLERVLAREEEVKKKAVVHKDTYEGPTIRFFSRDGESRLEFINGASFGSELCTTSSPYPEKPVCVVTGLPAKYRDPKTGLPYATMEAFKIIRESFLKEEADRKRPNMSNMGELFESITGGHLMPKKRRVEIRSPNMLGGSRHGGRTWRIPAFDMVDED

SEQ ID NO: 111138 - protein, 268 aa, Zea mays subsp. mays
  misc_feature (1)..(268): Ceres Seq. ID no. 15178633
  misc_feature (1)..(151): Pfam Name: Tropomyosin Pfam Description: Tropomyosin
  misc_feature (169)..(221): Homolog of NCBI NO: 6678255 NR Description: transcription factor-like 1 [Mus musculus]
  misc_feature (1)..(142): Homolog of NCBI NO: 13436005 NR Description: transcription factor-like 1 [Mus musculus]
  misc_feature (1)..(142): Homolog of NCBI NO: 37572298 NR Description: Transcription factor-like 1 [Mus musculus]
  misc_feature (1)..(142): Homolog of NCBI NO: 6678255 NR Description: transcription factor-like 1 [Mus musculus]
  misc_feature (1)..(100): Homolog of NCBI NO: 15228030 NR Description: expressed protein [Arabidopsis thaliana]
  misc_feature (1)..(128): Homolog of NCBI NO: 12054305 NR Description: stress responsive gene 6 protein, Srg6
  misc_feature (1)..(268): Homolog of NCBI NO: 15228030 NR Description: expressed protein [Arabidopsis thaliana]
  misc_feature (1)..(268): Homolog of NCBI NO: 12054303 NR Description: stress responsive gene 6 protein, Srg6
  misc_feature (1)..(268): Homolog of NCBI NO: 12054305 NR Description: stress responsive gene 6 protein, Srg6
  misc_feature (1)..(268): Homolog of NCBI NO: 40253658 NR Description: putative stress responsive gene 6 protein, Srg6
MFPGKTLRKTNVKKKKATPKPEDGTKADKSADKPSSSTQADLPDELEAEKAIRKSSRTSVIVRQAEREAIRAEKEATAKPIKRKKEGEEKRMTQEEMLLEAAETEIMNMRNLERVLAREEEVKKKAVVHKDTYEGPTIRFFSRDGESRLEFINGASFGSELCTTSSPYPEKPVCVVTGLPAKYRDPKTGLPYATMEAFKIIRESFLKEEADRKRPNMSNMGELFESITGGHLMPKKRRVEIRSPNMLGGSRHGGRTWRIPAFDMVDED

SEQ ID NO: 111139 - DNA, 2309 bp, Zea mays subsp. mays
  misc_feature (1)..(2309): Ceres Seq. ID no. 13622744
ccagcctctcctagccgaggccaaaacccccataccaacacacacttcgcttctcgctgcctccgcggcggcgcgccgctccgctccgagccctcttcctcctcctcctctgcccgttcggtctagaatgttctactcgcatcagcttctcgcgcggaaggcgccgctcggccagatatggatggcggcgacgctccactcgaagatcaaccgcaaacggctcgacaagctcgacatcatcaaaatctgtgaggaaattttgaacccctcggtgcccatggctctgaggctctctggaatcctcatgggtggcgtggtgatcgtgtacgagaggaaggtgaagcttctctacactgatgtctctcggcttctgactgagatcaacgaggcatggcggatcaaaccggtcacagaccccaccgtcctccccaagggtaaaactcaagccaagtatgaagcagtaacactgccagagatcaatatggtggtggaacagcccatgtttttctcagagcctgatggtgccaagttccgacgaatgggattggaagatctggatgaacagtatgttcaagtcaatcttgatgatgatgacttctctcatgctgatgatcgtcatcaagctaaagcagtgaatataaccctggtcgataattttgagtctgggcttgcagaaactgatttattcaatcactttgagagatttgacatagcagatgatgagaccacagtcaatatcactcctgatgagtacccacaagttccaagtacgctgattccgtcaccacctaggcaggaagacattcctcaacaagaataaccgtactacgctgccccctcccctgttcatggagaacctcaacaagggggaccagaggaccaagaggaacagaagatgaagcaaccaccgaaagcatcaaagcggaaagcacgttgggaagtcccacgagtaattatggacaataaccagatgatgatcccaggaaacatatatcagacatggctgaaggatgcatcaagccttgtctcaaaaaggcgtaaacttaacagcaattttaattttattcgatcaaccaagataagtgatctcatgcacatccccccggttgctctaatatctcatgacaacttgttctcagaattatgttatcctaagccacttatgcagctctggaaggactgcactgaggtcaagtccacaaaagcttcttcaggagggcagcgatcatcatcacaagaaccacaaccgaaaaactcaccacctcaggctgggggagagtatgagatggaaacaggtggtctgccgatggatttaacagatggcattgaaaaactcagggcaaacatgagtgcaaaatatgacagagcttacaatattcttcacagtgaccatagtgttactcctggaagtcctgggttaagtcgcaggtctgcttcaagctctggtggctctggatcggcgtttatacaattggatccagaagtacaattgccatcaggaagtggaaggtccaaaagggggcagcattcatctgcaagaagcttggggaatcttgatactgttgaggaagattttccactggagcaggaagtgagggacttcaagatgagaaggctttcagattatgtgccaactcctgacctactggaagaaactgaaccgactcaaaccccatatgagaggcgctccaatccaatggacaagatcacagaaacaatccagtcgcatctcaaacttcatttcgataccccaggtgtcccacaatctgaatccttaagtcatttagctcatggaatgaccaaagccagggcagcccgactattctatcaaatagctgttttggcaacttgtgattacatcaaggttactcagctggaacggaaaggagatgaactgtacggagacatcttgatctccagaggattaaagatgtgacttggtgatgttggaaacaattttgctgcggtggttcccggtgcacatctcgtgtttatattacagaatgcttacatattgcataggatgtcttgtagttaacacataatctatacatggtgatctggtgaaagaaagggagcgagatatgaggcagtagttttgtgttatgtggcaagcaaaattctaagctgttattttagaggtttcataatttaagtacgaacatgtgttatactattatgaaactaagttgtcctgaaagcacttactgaaagggagaaatttacatggtaccttgtcaacgatgaaacatacatcggaggacaacataaagatgcacactgtatcctgctcttcggctgcttcatgt

SEQ ID NO: 111140 - protein, 346 aa, Zea mays subsp. mays
  misc_feature (1)..(346): Ceres Seq. ID no. 13622745
  misc_feature (186)..(326): Homolog of NCBI NO: 32309542 NR Description: cohesin-like protein [Oryza sativa (indica
  misc_feature (1)..(346): Homolog of NCBI NO: 30680958 NR Description: SYN1 splice variant 1 (gb AAF08981.1)
  misc_feature (1)..(346): Homolog of NCBI NO: 15239141 NR Description: SYN1 splice variant 1 (gb AAF08981.1)
  misc_feature (1)..(118): Homolog of NCBI NO: 30680958 NR Description: SYN1 splice variant 1 (gb AAF08981.1)
  misc_feature (1)..(118): Homolog of NCBI NO: 15239141 NR Description: SYN1 splice variant 1 (gb AAF08981.1)
  misc_feature (107)..(316): Homolog of NCBI NO: 5091612 NR Description: 10A19I.14 [Oryza sativa]
  misc_feature (1)..(108): Homolog of NCBI NO: 5091612 NR Description: 10A19I.14 [Oryza sativa]
  misc_feature (1)..(346): Homolog of NCBI NO: 34558723 NR Description: Rad21-4 protein [Oryza sativa (japonica
MKQPPKASKRKARWEVPRVIMDNNQMMIPGNIYQTWLKDASSLVSKRRKLNSNFNFIRSTKISDLMHIPPVALISHDNLFSELCYPKPLMQLWKDCTEVKSTKASSGGQRSSSQEPQPKNSPPQAGGEYEMETGGLPMDLTDGIEKLRANMSAKYDRAYNILHSDHSVTPGSPGLSRRSASSSGGSGSAFIQLDPEVQLPSGSGRSKRGQHSSARSLGNLDTVEEDFPLEQEVRDFKMRRLSDYVPTPDLLEETEPTQTPYERRSNPMDKITETIQSHLKLHFDTPGVPQSESLSHLAHGMTKARAARLFYQIAVLATCDYIKVTQLERKGDELYGDILISRGLKM

SEQ ID NO: 111141 - protein, 326 aa, Zea mays subsp. mays
  misc_feature (1)..(326): Ceres Seq. ID no. 13622746
  misc_feature (1)..(98): Homolog of NCBI NO: 30680958 NR Description: SYN1 splice variant 1 (gb AAF08981.1)
  misc_feature (1)..(98): Homolog of NCBI NO: 15239141 NR Description: SYN1 splice variant 1 (gb AAF08981.1)
  misc_feature (87)..(296): Homolog of NCBI NO: 5091612 NR Description: 10A19I.14 [Oryza sativa]
  misc_feature (1)..(88): Homolog of NCBI NO: 5091612 NR Description: 10A19I.14 [Oryza sativa]
  misc_feature (1)..(326): Homolog of NCBI NO: 34558723 NR Description: Rad21-4 protein [Oryza sativa (japonica
  misc_feature (166)..(306): Homolog of NCBI NO: 32309542 NR Description: cohesin-like protein [Oryza sativa (indica
  misc_feature (1)..(326): Homolog of NCBI NO: 30680958 NR Description: SYN1 splice variant 1 (gb AAF08981.1)
  misc_feature (1)..(326): Homolog of NCBI NO: 15239141 NR Description: SYN1 splice variant 1 (gb AAF08981.1)
MDNNQMMIPGNIYQTWLKDASSLVSKRRKLNSNFNFIRSTKISDLMHIPPVALISHDNLFSELCYPKPLMQLWKDCTEVKSTKASSGGQRSSSQEPQPKNSPPQAGGEYEMETGGLPMDLTDGIEKLRANMSAKYDRAYNILHSDHSVTPGSPGLSRRSASSSGGSGSAFIQLDPEVQLPSGSGRSKRGQHSSARSLGNLDTVEEDFPLEQEVRDFKMRRLSDYVPTPDLLEETEPTQTPYERRSNPMDKITETIQSHLKLHFDTPGVPQSESLSHLAHGMTKARAARLFYQIAVLATCDYIKVTQLERKGDELYGDILISRGLKM

SEQ ID NO: 111142 - protein, 321 aa, Zea mays subsp. mays
  misc_feature (1)..(321): Ceres Seq. ID no. 13622747
  misc_feature (161)..(301): Homolog of NCBI NO: 32309542 NR Description: cohesin-like protein [Oryza sativa (indica
  misc_feature (1)..(321): Homolog of NCBI NO: 30680958 NR Description: SYN1 splice variant 1 (gb AAF08981.1)
  misc_feature (1)..(321): Homolog of NCBI NO: 15239141 NR Description: SYN1 splice variant 1 (gb AAF08981.1)
  misc_feature (1)..(93): Homolog of NCBI NO: 30680958 NR Description: SYN1 splice variant 1 (gb AAF08981.1)
  misc_feature (1)..(93): Homolog of NCBI NO: 15239141 NR Description: SYN1 splice variant 1 (gb AAF08981.1)
  misc_feature (82)..(291): Homolog of NCBI NO: 5091612 NR Description: 10A19I.14 [Oryza sativa]
  misc_feature (1)..(83): Homolog of NCBI NO: 5091612 NR Description: 10A19I.14 [Oryza sativa]
  misc_feature (1)..(321): Homolog of NCBI NO: 34558723 NR Description: Rad21-4 protein [Oryza sativa (japonica
MMIPGNIYQTWLKDASSLVSKRRKLNSNFNFIRSTKISDLMHIPPVALISHDNLFSELCYPKPLMQLWKDCTEVKSTKASSGGQRSSSQEPQPKNSPPQAGGEYEMETGGLPMDLTDGIEKLRANMSAKYDRAYNILHSDHSVTPGSPGLSRRSASSSGGSGSAFIQLDPEVQLPSGSGRSKRGQHSSARSLGNLDTVEEDFPLEQEVRDFKMRRLSDYVPTPDLLEETEPTQTPYERRSNPMDKITETIQSHLKLHFDTPGVPQSESLSHLAHGMTKARAARLFYQIAVLATCDYIKVTQLERKGDELYGDILISRGLKM

SEQ ID NO: 111143 - DNA, 598 bp, Zea mays subsp. mays
  misc_feature (1)..(598): Ceres Seq. ID no. 14305238
gagcagcggccacgcattctcccttccctggactattcttggtgggtggagagagccgcagaaggcagctggaagaggagaggaccgcgcgaggctccgtgccggcgagttcgggtgcttttcctgcggtccgagatgcgatcgttgggacccgggagacagcgcagctcgggttcgggttcgggggggcggtagccacctgagcaggatgtttaactggaacgacgagcagcaccaggtcgaagcacataagaggccagtgtggtcacgtagaaaaccagaggaaagaggtaaaagtaaaatatccagcagtacaagtggcttctcccacagcaaagtagagagttcatcgacgaatttgcaaactcctatggaacctgtacagactcctcaatatgcactgttccaggatagcaaattcgtcgatgaactctctaccttgttgctggcaaagcgtagttctgtacctcctctatcgttgtcctaccactctaggtctatcccttgatctaggtttctatggtctgaagatttgtgattttctccgcactgttgttgctatccccgtgtcgtaataatacgatgttttaagcggttg

SEQ ID NO: 111144 - protein, 168 aa, Zea mays subsp. mays
  misc_feature (1)..(168): Ceres Seq. ID no. 14305239
  misc_feature (65)..(144): Homolog of NCBI NO: 34905386 NR Description: OJ1126_G08.25 [Oryza sativa (japonica
SSGHAFSLPWTILGGWREPQKAAGRGEDRARLRAGEFGCFSCGPRCDRWDPGDSAARVRVRGGGSHLSRMFNWNDEQHQVEAHKRPVWSRRKPEERGKSKISSSTSGFSHSKVESSSTNLQTPMEPVQTPQYALFQDSKFVDELSTLLLAKRSSVPPLSLSYHSRSIP

SEQ ID NO: 111145 - protein, 99 aa, Zea mays subsp. mays
  misc_feature (1)..(99): Ceres Seq. ID no. 14305240
  misc_feature (1)..(75): Homolog of NCBI NO: 34905386 NR Description: OJ1126_G08.25 [Oryza sativa (japonica
MFNWNDEQHQVEAHKRPVWSRRKPEERGKSKISSSTSGFSHSKVESSSTNLQTPMEPVQTPQYALFQDSKFVDELSTLLLAKRSSVPPLSLSYHSRSIP

SEQ ID NO: 111146 - DNA, 1134 bp, Zea mays subsp. mays
  misc_feature (1)..(1134): Ceres Seq. ID no. 14305110
gaaaatcgaaaccctagaccgcgcgccccctcgccctccggccttccacgtccgatccgatccaaaatgcataagctaggcagaggaagccgggacaaggtgcaacagttcatggcaattaccggcgcaaggtacatatatttttttaaacttttcgatttgttcggagagaccggtgttcagtgctaaattgtggtttggttggttagtggccgtagtatgtcaattttgcgagctgttgggagaacttgtttgtagtgcagcaacagcattcgtgttctgcaatttggcaataatatcatgctagaaagtaagaagttcttttggttgcaggaacatggaattttgtactgtcttttatgtggaaacatgtgttactgcctaatcttgatttgtaattttgtaatggaattctccaacacactggtagcattatactccccctttgtttgggatggaccactttttcatcttttaccaaaagttaacttttttttttggtgctgcaagagtgatccattgtcattgtcctgaaaaatcactagggttgtacattacagtcagtcatcggaccaactgaacctccgaggactactgtacactttagacactgctatcccaattttctgttaattttgtcaagcattgcatatttcacacagtgagaaagctgcccttcaggctcttaaagctagtgattggcacttggaaggagcttttgatgttttctacagccagccacaaattgctgttgctaatactcgacatctggaagagctctacaacagatataaaggtggaatattttactctctgttgcgccaatcatctttttatgccttgtctctgatttttttttccaattttacctgcgccatcatgttgtgtcttgattgctcagaaccagatgctgatatgataatggtggaaggcatatcacagatctgcaatgatttacaggtcattttttgggattttttttctttgaatgtatgttgttacactaaagtatcagcctgcagtcacttgtaatggataggtatatcaggcatcaggctcgaaatttgtgaactgtgattgtttcctttgttttgtgttttcttcatagtattcttcaatggaattcgtggaacg

SEQ ID NO: 111147 - protein, 77 aa, Zea mays subsp. mays
  misc_feature (1)..(77): Ceres Seq. ID no. 14305111
MLESKKFFWLQEHGILYCLLCGNMCYCLILICNFVMEFSNTLVALYSPFVWDGPLFHLLPKVNFFFWCCKSDPLSLS

SEQ ID NO: 111148 - protein, 62 aa, Zea mays subsp. mays
  misc_feature (1)..(62): Ceres Seq. ID no. 14305112
  misc_feature (23)..(43): Homolog of NCBI NO: 18399737 NR Description: expressed protein [Arabidopsis thaliana]
  misc_feature (23)..(43): Homolog of NCBI NO: 15292985 NR Description: unknown protein [Arabidopsis thaliana]
ENRNPRPRAPSPSGLPRPIRSKMHKLGRGSRDKVQQFMAITGARYIYFFKLFDLFGETGVQC

SEQ ID NO: 111149 - protein, 54 aa, Zea mays subsp. mays
  misc_feature (1)..(54): Ceres Seq. ID no. 14305113
MCYCLILICNFVMEFSNTLVALYSPFVWDGPLFHLLPKVNFFFWCCKSDPLSLS

SEQ ID NO: 111150 - DNA, 919 bp, Zea mays subsp. mays
  misc_feature (1)..(919): Ceres Seq. ID no. 15180249
aagtttgcagaaacgaaagcagcagcccaattgggagctccaccccacacaacccaacccgccacctctcatggcgactgctgcgaccaccaccaggaggccgagcggccccgtcctctcggccgcgcactaccgctacgcctcgcccacgcgcgtctcgctctccggcgccgggcagtccgtcagcgtcagcgtctcgtcgtcgtcgcggggccgacggacctgcatgtgctcgccgaccagccacccgggctcgttccgctgcagcctgcacaaggagcgcgcgacgaagccgccgccgccgcacgggcacggcaagccgacctccccgccgccgcccctgaccaccaccagccgtctgtgcgcggcgggcaggcggatgggcagcgcgctggtgcggatcggcgccgtcgagggcggccagtgcgcgcgccgcgcgctcgcggcaaccgcccgcccgtcccccgccgcggcgcagcaccgccgccgcgtcggcgccggcgccggcgccgcccggccccgccccagccgcctctccgccgtctccgtggccggcgaccgccccggcgacaacggccacctatagacccgccgccgccttgccaccgtaccgtgtagagctagcctagcggcactagtagtaacagtatagtactagcatcgtagtaataataataaaaaaaaactggagcggcggttaactagaagaaagaacagagcagagccgggaggttggagcgctggatcaggactagttttgggagcctggtccatggatcatcatcaccatccagggaaaaaggctctctctctctttctctctcttgtacgtgtacatagaattgcagatgatgggatgcatgcgagtgtccagtttggatttcttggatggataaacatgaccggaggaatggagact

SEQ ID NO: 111151 - protein, 205 aa, Zea mays subsp. mays
  misc_feature (1)..(205): Ceres Seq. ID no. 15180250
  misc_feature (82)..(197): Pfam Name: Rubella capsid protein Pfam Description: Rubella capsid protein
  misc_feature (122)..(199): Homolog of NCBI NO: 14018072 NR Description: hypothetical protein [Oryza sativa]
KFAETKAAAQLGAPPHTTQPATSHGDCCDHHQEAERPRPLGRALPLRLAHARLALRRRAVRQRQRLVVVAGPTDLHVLADQPPGLVPLQPAQGARDEAAAAARARQADLPAAAPDHHQPSVRGGQADGQRAGADRRRRGRPVRAPRARGNRPPVPRRGAAPPPRRRRRRRRPAPPQPPLRRLRGRRPPRRQRPPIDPPPPCHRTV

SEQ ID NO: 111152 - protein, 194 aa, Zea mays subsp. mays
  misc_feature (1)..(194): Ceres Seq. ID no. 15180251
  misc_feature (35)..(163): Homolog of NCBI NO: 21618161 NR Description: serine-rich protein [Arabidopsis thaliana]
  misc_feature (35)..(163): Homolog of NCBI NO: 15238753 NR Description: serine-rich protein [Arabidopsis thaliana]
  misc_feature (44)..(166): Homolog of NCBI NO: 15238947 NR Description: expressed protein [Arabidopsis thaliana]
  misc_feature (15)..(186): Homolog of NCBI NO: 24461857 NR Description: CTV.15 [Poncirus trifoliata]
SLQKRKQQPNWELHPTQPNPPPLMATAATTTRRPSGPVLSAAHYRYASPTRVSLSGAGQSVSVSVSSSSRGRRTCMCSPTSHPGSFRCSLHKERATKPPPPHGHGKPTSPPPPLTTTSRLCAAGRRMGSALVRIGAVEGGQCARRALAATARPSPAAAQHRRRVGAGAGAARPRPSRLSAVSVAGDRPGDNGHL

SEQ ID NO: 111153 - protein, 171 aa, Zea mays subsp. mays
  misc_feature (1)..(171): Ceres Seq. ID no. 15180252
  misc_feature (12)..(140): Homolog of NCBI NO: 21618161 NR Description: serine-rich protein [Arabidopsis thaliana]
  misc_feature (12)..(140): Homolog of NCBI NO: 15238753 NR Description: serine-rich protein [Arabidopsis thaliana]
  misc_feature (21)..(143): Homolog of NCBI NO: 15238947 NR Description: expressed protein [Arabidopsis thaliana]
  misc_feature (1)..(163): Homolog of NCBI NO: 24461857 NR Description: CTV.15 [Poncirus trifoliata]
MATAATTTRRPSGPVLSAAHYRYASPTRVSLSGAGQSVSVSVSSSSRGRRTCMCSPTSHPGSFRCSLHKERATKPPPPHGHGKPTSPPPPLTTTSRLCAAGRRMGSALVRIGAVEGGQCARRALAATARPSPAAAQHRRRVGAGAGAARPRPSRLSAVSVAGDRPGDNGHL

SEQ ID NO: 111154 - DNA, 1162 bp, Zea mays subsp. mays
  misc_feature (1)..(1162): Ceres Seq. ID no. 13624277
gatttagtacaacgtctcctgtagtcctgtgtcctctcgcgcgccgcgccgcccctcaggccccagctctcgctctccagtctccaccgccgctccggtgctcccttccgggattcccctccggcgagcttgctcagctccgctccaggtttccacgtcgtccatggcgctcgtcgtgatgtgtgggcagccgtgcagcagtaaaacatcagccgccgcttgccttgctgtggcgctgcactcctcctcgcctgaccttactgtccgaatcatcgatgagtcatccctccatctcaggcgcaacgatagctacaaagatatggttgtggagaaaaacttgagagggcttcttagatcagaagttgacaggtctgtgtcacgcgacagcataattattgtcgactcgttgaataatattaaggggtaccgctatgagttgtggtgtcttgcgcgtgcatctggtgtaagatattgtgtgcttttttgtgatacagaagtggaccattgtaaggaatggaacaacaaccgccaggagaaaggggaaccagcatatgatactaatatatttgaagatcttgtaagtagatttgagaagccagatagacgcaatcgttgggattcccctctttttgaattgttcccatctagagatgaattagtggaaacagctcctgatattgctgaagctgtgtcatatttgacaaaaaaagtggattccaaaacaagagatgtaaaagttctccagcctacaatagccactcagacggtgcgaacaacagaggctaattccctctatgagatggacaaggcaacgcaggaggtggtcaatgcaattgttgaagcacagtcatgcggtcttgggcttgctgtgaataagatctccattggacccaacttgccaactatcaagcttgagagatctgttggcctacctgagctcagaagcctgcggagaactttcatcaagctggcagggcagtacagtctgagtgggccaccaccaccgacagatgctgacagcgcaaagaggatgtttgtcgactacttaaaccgtgaacttggtgcatgataattttcattcgcctgcgttgcatgaacactatgtagcatgtggttaactttggggaatagataattgaagacaacttgattgtacttgttc

SEQ ID NO: 111155 - protein, 301 aa, Zea mays subsp. mays
  misc_feature (1)..(301): Ceres Seq. ID no. 15219178
  misc_feature (1)..(108): Homolog of NCBI NO: 19923939 NR Description: hypothetical protein BC012173 [Homo sapiens]
  misc_feature (130)..(267): Homolog of NCBI NO: 19923939 NR Description: hypothetical protein BC012173 [Homo sapiens]
  misc_feature (1)..(299): Homolog of NCBI NO: 6322739 NR Description: Protein involved in resistance to K. lactis
  misc_feature (1)..(108): Homolog of NCBI NO: 20270210 NR Description: RIKEN cDNA 1110001A12 [Mus musculus]
  misc_feature (123)..(267): Homolog of NCBI NO: 20270210 NR Description: RIKEN cDNA 1110001A12 [Mus musculus]
  misc_feature (1)..(299): Homolog of NCBI NO: 39583457 NR Description: Hypothetical protein CBG21524 [Caenorhabditis
  misc_feature (1)..(299): Homolog of NCBI NO: 33300521 NR Description: Hypothetical protein Y57G11C.43 [Caenorhabditis
  misc_feature (1)..(233): Homolog of NCBI NO: 28850452 NR Description: similar to similarity to S. cerevisiae kti12
  misc_feature (1)..(300): Homolog of NCBI NO: 23504265 NR Description: DRL1 protein [Arabidopsis thaliana]
  misc_feature (1)..(300): Homolog of NCBI NO: 15222972 NR Description: expressed protein [Arabidopsis thaliana]
MALVVMCGQPCSSKTSAAACLAVALHSSSPDLTVRIIDESSLHLRRNDSYKDMVVEKNLRGLLRSEVDRSVSRDSIIIVDSLNNIKGYRYELWCLARASGVRYCVLFCDTEVDHCKEWNNNRQEKGEPAYDTNIFEDLVSRFEKPDRRNRWDSPLFELFPSRDELVETAPDIAEAVSYLTKKVDSKTRDVKVLQPTIATQTVRTTEANSLYEMDKATQEVVNAIVEAQSCGLGLAVNKISIGPNLPTIKLERSVGLPELRSLRRTFIKLAGQYSLSGPPPPTDADSAKRMFVDYLNRELGA

SEQ ID NO: 111156 - protein, 296 aa, Zea mays subsp. mays
  misc_feature (1)..(296): Ceres Seq. ID no. 15219179
  misc_feature (1)..(103): Homolog of NCBI NO: 19923939 NR Description: hypothetical protein BC012173 [Homo sapiens]
  misc_feature (125)..(262): Homolog of NCBI NO: 19923939 NR Description: hypothetical protein BC012173 [Homo sapiens]
  misc_feature (1)..(294): Homolog of NCBI NO: 6322739 NR Description: Protein involved in resistance to K. lactis
  misc_feature (1)..(103): Homolog of NCBI NO: 20270210 NR Description: RIKEN cDNA 1110001A12 [Mus musculus]
  misc_feature (118)..(262): Homolog of NCBI NO: 20270210 NR Description: RIKEN cDNA 1110001A12 [Mus musculus]
  misc_feature (1)..(294): Homolog of NCBI NO: 39583457 NR Description: Hypothetical protein CBG21524 [Caenorhabditis
  misc_feature (1)..(294): Homolog of NCBI NO: 33300521 NR Description: Hypothetical protein Y57G11C.43 [Caenorhabditis
  misc_feature (1)..(228): Homolog of NCBI NO: 28850452 NR Description: similar to similarity to S. cerevisiae kti12
  misc_feature (1)..(295): Homolog of NCBI NO: 23504265 NR Description: DRL1 protein [Arabidopsis thaliana]
  misc_feature (1)..(295): Homolog of NCBI NO: 15222972 NR Description: expressed protein [Arabidopsis thaliana]
MCGQPCSSKTSAAACLAVALHSSSPDLTVRIIDESSLHLRRNDSYKDMVVEKNLRGLLRSEVDRSVSRDSIIIVDSLNNIKGYRYELWCLARASGVRYCVLFCDTEVDHCKEWNNNRQEKGEPAYDTNIFEDLVSRFEKPDRRNRWDSPLFELFPSRDELVETAPDIAEAVSYLTKKVDSKTRDVKVLQPTIATQTVRTTEANSLYEMDKATQEVVNAIVEAQSCGLGLAVNKISIGPNLPTIKLERSVGLPELRSLRRTFIKLAGQYSLSGPPPPTDADSAKRMFVDYLNRELGA

SEQ ID NO: 111157 - protein, 249 aa, Zea mays subsp. mays
  misc_feature (1)..(249): Ceres Seq. ID no. 15219180
  misc_feature (1)..(56): Homolog of NCBI NO: 19923939 NR Description: hypothetical protein BC012173 [Homo sapiens]
  misc_feature (78)..(215): Homolog of NCBI NO: 19923939 NR Description: hypothetical protein BC012173 [Homo sapiens]
  misc_feature (1)..(247): Homolog of NCBI NO: 6322739 NR Description: Protein involved in resistance to K. lactis
  misc_feature (1)..(56): Homolog of NCBI NO: 20270210 NR Description: RIKEN cDNA 1110001A12 [Mus musculus]
  misc_feature (71)..(215): Homolog of NCBI NO: 20270210 NR Description: RIKEN cDNA 1110001A12 [Mus musculus]
  misc_feature (1)..(247): Homolog of NCBI NO: 39583457 NR Description: Hypothetical protein CBG21524 [Caenorhabditis
  misc_feature (1)..(247): Homolog of NCBI NO: 33300521 NR Description: Hypothetical protein Y57G11C.43 [Caenorhabditis
  misc_feature (1)..(181): Homolog of NCBI NO: 28850452 NR Description: similar to similarity to S. cerevisiae kti12
  misc_feature (1)..(248): Homolog of NCBI NO: 23504265 NR Description: DRL1 protein [Arabidopsis thaliana]
  misc_feature (1)..(248): Homolog of NCBI NO: 15222972 NR Description: expressed protein [Arabidopsis thaliana]
MVVEKNLRGLLRSEVDRSVSRDSIIIVDSLNNIKGYRYELWCLARASGVRYCVLFCDTEVDHCKEWNNNRQEKGEPAYDTNIFEDLVSRFEKPDRRNRWDSPLFELFPSRDELVETAPDIAEAVSYLTKKVDSKTRDVKVLQPTIATQTVRTTEANSLYEMDKATQEVVNAIVEAQSCGLGLAVNKISIGPNLPTIKLERSVGLPELRSLRRTFIKLAGQYSLSGPPPPTDADSAKRMFVDYLNRELGA

SEQ ID NO: 111158 - DNA, 663 bp, Zea mays subsp. mays
  misc_feature (1)..(663): Ceres Seq. ID no. 12634445
accacttcctcctcagtccgccgccgcagccgcctccctgtcgcccaccacacctcggtctcaaacccacgcacccgccgccgcgggaaaaatggccatggacgccgcagcgctggagtcgctcatcctggacctccacgccatcgaggcagtgaagctgggctccttcgtgctcaagtccggcatcacctcccccatctatctggacctccgcgcgctcgtctcccacccgcgcctgctctccgccgtctcctcgctcctccacgcgctccccgccacgcgcccctacggcctcgtctgcggcgtcccctacacggcgctccccatcgccgccgtcctctccgtcgaccgctccgtccccatgctcatgcgccgcaaggaggccaaggcccacggcaccgccaagtccatcgaggagcctgggaaggaagctctcaaatatcggtgacacgccgtctgttgaggagtttgtctttcttaagctatagagactgaggaagtaggttaggggacccaaaattacatttgtacgtgctatagtagcgtgagattgatgttgttgccatgattttagtagctagcccggggtactttatgctttgtgtacttgaggacacgccgccggtcacaaatactaatagtaatatatcaagggatacatgc

SEQ ID NO: 111159 - protein, 164 aa, Zea mays subsp. mays
  misc_feature (1)..(164): Ceres Seq. ID no. 12634446
TTSSSVRRRSRLPVAHHTSVSNPRTRRRGKNGHGRRSAGVAHPGPPRHRGSEAGLLRAQVRHHLPHLSGPPRARLPPAPALRRLLAPPRAPRHAPLRPRLRRPLHGAPHRRRPLRRPLRPHAHAPQGGQGPRHRQVHRGAWEGSSQISVTRRLLRSLSFLSYRD

SEQ ID NO: 111160 - protein, 148 aa, Zea mays subsp. mays
  misc_feature (1)..(148): Ceres Seq. ID no. 12634447
  misc_feature (31)..(145): Homolog of NCBI NO: 4507835 NR Description: uridine monophosphate synthetase (orotate
  misc_feature (31)..(145): Homolog of NCBI NO: 2081620 NR Description: UMP synthase [Homo sapiens]
  misc_feature (48)..(145): Homolog of NCBI NO: 2499946 NR Description: Uridine 5'-monophosphate synthase (UMP synthase)
  misc_feature (33)..(145): Homolog of NCBI NO: 28277693 NR Description: Unknown (protein for MGC:55723) [Danio rerio]
  misc_feature (36)..(138): Homolog of NCBI NO: 22331787 NR Description: similar to UMP synthase {Arabidopsis thaliana}
  misc_feature (36)..(138): Homolog of NCBI NO: 1076363 NR Description: bifunctional UMP synthase [validated] -
  misc_feature (33)..(145): Homolog of NCBI NO: 9255873 NR Description: UMP synthase [Nicotiana plumbaginifolia]
  misc_feature (33)..(138): Homolog of NCBI NO: 19386830 NR Description: putative UMP synthase 1 [Oryza sativa (japonica
  misc_feature (33)..(138): Homolog of NCBI NO: 7106173 NR Description: UMP synthase 1 [Oryza sativa (japonica
  misc_feature (31)..(145): Homolog of NCBI NO: 9255871 NR Description: UMP synthase [Zea mays]
PLPPQSAAAAASLSPTTPRSQTHAPAAAGKMAMDAAALESLILDLHAIEAVKLGSFVLKSGITSPIYLDLRALVSHPRLLSAVSSLLHALPATRPYGLVCGVPYTALPIAAVLSVDRSVPMLMRRKEAKAHGTAKSIEEPGKEALKYR

SEQ ID NO: 111161 - protein, 118 aa, Zea mays subsp. mays
  misc_feature (1)..(118): Ceres Seq. ID no. 12634448
  misc_feature (1)..(115): Homolog of NCBI NO: 4507835 NR Description: uridine monophosphate synthetase (orotate
  misc_feature (1)..(115): Homolog of NCBI NO: 2081620 NR Description: UMP synthase [Homo sapiens]
  misc_feature (18)..(115): Homolog of NCBI NO: 2499946 NR Description: Uridine 5'-monophosphate synthase (UMP synthase)
  misc_feature (3)..(115): Homolog of NCBI NO: 28277693 NR Description: Unknown (protein for MGC:55723) [Danio rerio]
  misc_feature (6)..(108): Homolog of NCBI NO: 22331787 NR Description: similar to UMP synthase {Arabidopsis thaliana}
  misc_feature (6)..(108): Homolog of NCBI NO: 1076363 NR Description: bifunctional UMP synthase [validated] -
  misc_feature (3)..(115): Homolog of NCBI NO: 9255873 NR Description: UMP synthase [Nicotiana plumbaginifolia]
  misc_feature (3)..(108): Homolog of NCBI NO: 19386830 NR Description: putative UMP synthase 1 [Oryza sativa (japonica
  misc_feature (3)..(108): Homolog of NCBI NO: 7106173 NR Description: UMP synthase 1 [Oryza sativa (japonica
  misc_feature (1)..(115): Homolog of NCBI NO: 9255871 NR Description: UMP synthase [Zea mays]
MAMDAAALESLILDLHAIEAVKLGSFVLKSGITSPIYLDLRALVSHPRLLSAVSSLLHALPATRPYGLVCGVPYTALPIAAVLSVDRSVPMLMRRKEAKAHGTAKSIEEPGKEALKYR

SEQ ID NO: 111162 - DNA, 952 bp, Zea mays subsp. mays
  misc_feature (1)..(952): Ceres Seq. ID no. 12590523
cgtaatcaaaaacttctgattcattttcagttctagctgtgtgctgaagtgttattctggatgtatacttgattatttgtcagtttcctaaacgcacaacacattactaccattactcccaccattgctatctaggtctgatatggtttttgtgagttcttaacttgtcgtttttgtcattttggtccaggagtgtagcaccaattagttcgagtgatgtatctctgcccacatcatcattagatctcccagatgttgcagatctctttgctccccctgcagacaatgcatcaaggaagagggaatcaaataggtctgctcttcatgactcgcgcaataaatttccaatggtgggagcacaaccctaaggcataggaagtgctgcagggaacaccctaattccaccgcagctccgtggaagtagccgatggatggagaatggtggatcgaggagaccgatgacgtactgctgcatcccgcgctgctcaatgggcagcagtaccggccagtctggtcaaacgacggcgctgtgatccacgcagatttccagttaagtttcttctgatggtgatggtactaaagaggactatgttcatatccgggcaaagcgaggccaagccactaacagccacagccttgcagaaagactggggagaaagaagataagtgagaggatgaagcttcttcaagatcttgttcctgaatgcagtaaggatcaagcggccttactggcccatttaaccaaggaatcatgcagccataattgatgtgcaccattgccaatcccgttgatgttttgcacggagctattcacgacgcgtcaacaatgaaccatgtaattttacagagtgacatactgatatatgtatatgcagttccatatgtgcttccaaagataatgccttaaacatctgtgcatcacaatatttagaatcatacacttgctctactc

SEQ ID NO: 111163 - protein, 46 aa, Zea mays subsp. mays
  misc_feature (1)..(46): Ceres Seq. ID no. 12590524
  misc_feature (1)..(24): Homolog of NCBI NO: 28273388 NR Description: putative Helix-loop-helix DNA-binding domain
MCTIANPVDVLHGAIHDASTMNHVILQSDILIYVYAVPYVLPKIMP

SEQ ID NO: 111164 - protein, 45 aa, Zea mays subsp. mays
  misc_feature (1)..(45): Ceres Seq. ID no. 12590525
MDGEWWIEETDDVLLHPALLNGQQYRPVWSNDGAVIHADFQLSFF

SEQ ID NO: 111165 - protein, 40 aa, Zea mays subsp. mays
  misc_feature (1)..(40): Ceres Seq. ID no. 12590526
MLQISLLPLQTMHQGRGNQIGLLFMTRAINFQWWEHNPKA

SEQ ID NO: 111166 - DNA, 970 bp, Zea mays subsp. mays
  misc_feature (1)..(970): Ceres Seq. ID no. 12590628
  misc_feature: MA Experiment ID: 108543 Result: Down-regulated in Transcription
  misc_feature: MA Experiment ID: 108544 Result: Down-regulated in Transcription
agaaaggagaggtggtggggcgatggcagcgactgcggcggagggggtggccgcgacggcgctgcgagccgtgctggggcgggcgggtatggcggcggagcggtcggggcgcgccgcggaggcggtacgggttgtggcggtggggaagaccaagcctgtttcgatgctgcggcagctatacgacgcgggccaccgctgcttcagcgagaactacgtgcaggagttcgtcaccaaggccccccagcttccgcaagatacccggtggcattttatcgggcacctgcagagcaacaaagtgaaaccactgttagctgctgttccaaatcttgatatggttgagggcgtagacaatgaaaagattgctaaccacctagatcgagccgtcaacagtttgggaaggcagcctttgaaagttttggttcaagtgaacactagtggagaagaatctaaatctggaatcgatccctccaaatgtgtcgaccttgctaagcatgtgaaactagcatgcccacacctaatattttcaggtctgatgacaataggtatgaaagactactcgtcaacaccagaaaattttaaggcattggttaattgtaagcttgaagtttgcaaggcccttgacataccaacagaacagtttgaactctccatgggaatgtctggtgactttgagcaggcgattgagatgggcagcacgaatgtgaggattggatcaaccatttttggaccaagggagtatccaaacaaaaggcagaactagtgagattcaacgcataagtgtcatctcaatacccagtcctcttgattaaccttttgcctatgtaagcatgatgctatgtataaatgcacatgtgaataggtaacatgtacaaccccatacaacactgtttgcagggggagggggaaccctccatacaacagtacggcattgtagaagaaattttgtgacatggtcttgaatagaaatttc

SEQ ID NO: 111167 - protein, 252 aa, Zea mays subsp. mays
  misc_feature (1)..(252): Ceres Seq. ID no. 12590629
  misc_feature (18)..(246): Pfam Name: Alanine racemase, N-terminal domain Pfam Description: Alanine racemase, N-terminal domain
  misc_feature (4)..(249): Homolog of NCBI NO: 34879017 NR Description: similar to Proline synthetase associated [Rattus
  misc_feature (6)..(249): Homolog of NCBI NO: 6005842 NR Description: proline synthetase co-transcribed homolog
  misc_feature (5)..(249): Homolog of NCBI NO: 16930823 NR Description: proline synthetase co-transcribed [Mus musculus]
  misc_feature (12)..(250): Homolog of NCBI NO: 11359716 NR Description: conserved hypothetical protein [imported] -
  misc_feature (103)..(227): Homolog of NCBI NO: 19386824 NR Description: B1147A04.19 [Oryza sativa (japonica
  misc_feature (8)..(239): Homolog of NCBI NO: 7445224 NR Description: hypothetical protein F10M23.200 - Arabidopsis
  misc_feature (1)..(249): Homolog of NCBI NO: 18391333 NR Description: putative Proline synthetase associated protein
  misc_feature (1)..(249): Homolog of NCBI NO: 30682530 NR Description: Proline synthetase associated protein -related
  misc_feature (8)..(249): Homolog of NCBI NO: 14030629 NR Description: AT4g26860/F10M23_200 [Arabidopsis thaliana]
  misc_feature (8)..(249): Homolog of NCBI NO: 18416879 NR Description: putative Proline synthetase associated protein
ERRGGGAMAATAAEGVAATALRAVLGRAGMAAERSGRAAEAVRVVAVGKTKPVSMLRQLYDAGHRCFSENYVQEFVTKAPQLPQDTRWHFIGHLQSNKVKPLLAAVPNLDMVEGVDNEKIANHLDRAVNSLGRQPLKVLVQVNTSGEESKSGIDPSKCVDLAKHVKLACPHLIFSGLMTIGMKDYSSTPENFKALVNCKLEVCKALDIPTEQFELSMGMSGDFEQAIEMGSTNVRIGSTIFGPREYPNKRQN

SEQ ID NO: 111168 - protein, 245 aa, Zea mays subsp. mays
  misc_feature (1)..(245): Ceres Seq. ID no. 12590630
  misc_feature (11)..(239): Pfam Name: Alanine racemase, N-terminal domain Pfam Description: Alanine racemase, N-terminal domain
  misc_feature (1)..(242): Homolog of NCBI NO: 34879017 NR Description: similar to Proline synthetase associated [Rattus
  misc_feature (1)..(242): Homolog of NCBI NO: 6005842 NR Description: proline synthetase co-transcribed homolog
  misc_feature (1)..(242): Homolog of NCBI NO: 16930823 NR Description: proline synthetase co-transcribed [Mus musculus]
  misc_feature (5)..(243): Homolog of NCBI NO: 11359716 NR Description: conserved hypothetical protein [imported] -
  misc_feature (96)..(220): Homolog of NCBI NO: 19386824 NR Description: B1147A04.19 [Oryza sativa (japonica
  misc_feature (1)..(232): Homolog of NCBI NO: 7445224 NR Description: hypothetical protein F10M23.200 - Arabidopsis
  misc_feature (1)..(242): Homolog of NCBI NO: 18391333 NR Description: putative Proline synthetase associated protein
  misc_feature (1)..(242): Homolog of NCBI NO: 30682530 NR Description: Proline synthetase associated protein -related
  misc_feature (1)..(242): Homolog of NCBI NO: 14030629 NR Description: AT4g26860/F10M23_200 [Arabidopsis thaliana]
  misc_feature (1)..(242): Homolog of NCBI NO: 18416879 NR Description: putative Proline synthetase associated protein
MAATAAEGVAATALRAVLGRAGMAAERSGRAAEAVRVVAVGKTKPVSMLRQLYDAGHRCFSENYVQEFVTKAPQLPQDTRWHFIGHLQSNKVKPLLAAVPNLDMVEGVDNEKIANHLDRAVNSLGRQPLKVLVQVNTSGEESKSGIDPSKCVDLAKHVKLACPHLIFSGLMTIGMKDYSSTPENFKALVNCKLEVCKALDIPTEQFELSMGMSGDFEQAIEMGSTNVRIGSTIFGPREYPNKRQN

SEQ ID NO: 111169 - protein, 223 aa, Zea mays subsp. mays
  misc_feature (1)..(223): Ceres Seq. ID no. 12590631
  misc_feature (1)..(217): Pfam Name: Alanine racemase, N-terminal domain Pfam Description: Alanine racemase, N-terminal domain
  misc_feature (1)..(220): Homolog of NCBI NO: 34879017 NR Description: similar to Proline synthetase associated [Rattus
  misc_feature (1)..(220): Homolog of NCBI NO: 6005842 NR Description: proline synthetase co-transcribed homolog
  misc_feature (1)..(220): Homolog of NCBI NO: 16930823 NR Description: proline synthetase co-transcribed [Mus musculus]
  misc_feature (1)..(221): Homolog of NCBI NO: 11359716 NR Description: conserved hypothetical protein [imported] -
  misc_feature (74)..(198): Homolog of NCBI NO: 19386824 NR Description: B1147A04.19 [Oryza sativa (japonica
  misc_feature (1)..(210): Homolog of NCBI NO: 7445224 NR Description: hypothetical protein F10M23.200 - Arabidopsis
  misc_feature (1)..(220): Homolog of NCBI NO: 18391333 NR Description: putative Proline synthetase associated protein
  misc_feature (1)..(220): Homolog of NCBI NO: 30682530 NR Description: Proline synthetase associated protein -related
  misc_feature (1)..(220): Homolog of NCBI NO: 14030629 NR Description: AT4g26860/F10M23_200 [Arabidopsis thaliana]
  misc_feature (1)..(220): Homolog of NCBI NO: 18416879 NR Description: putative Proline synthetase associated protein
MAAERSGRAAEAVRVVAVGKTKPVSMLRQLYDAGHRCFSENYVQEFVTKAPQLPQDTRWHFIGHLQSNKVKPLLAAVPNLDMVEGVDNEKIANHLDRAVNSLGRQPLKVLVQVNTSGEESKSGIDPSKCVDLAKHVKLACPHLIFSGLMTIGMKDYSSTPENFKALVNCKLEVCKALDIPTEQFELSMGMSGDFEQAIEMGSTNVRIGSTIFGPREYPNKRQN

SEQ ID NO: 111170 - DNA, 789 bp, Zea mays subsp. mays
  misc_feature (1)..(789): Ceres Seq. ID no. 13586610
  misc_feature: MA Experiment ID: 108528 Result: Up-regulated in Transcription
  misc_feature: MA Experiment 108528 PARAMETER Experiment Name: Zm_Imbibed_Seeds_P Parameter: Age (day) Value: 5 vs. 2
  misc_feature: MA Experiment 108528 PARAMETER Experiment Name: Zm_Imbibed_Seeds_P Parameter: Organism Value: Zea mays
  misc_feature: MA Experiment 108528 PARAMETER Experiment Name: Zm_Imbibed_Seeds_P Parameter: Plant Line Value: 35A19
  misc_feature: MA Experiment 108528 PARAMETER Experiment Name: Zm_Imbibed_Seeds_P Parameter: Tissue Value: Aerial vs. Embryo
  misc_feature: MA Experiment ID: 20000487 Result: Up-regulated in Transcription
  misc_feature: MA Experiment 20000487 PARAMETER Experiment Name: Zm_50mM_NH4NO3_L_to_H_P Parameter: Organism Value: Zea mays
  misc_feature: MA Experiment 20000487 PARAMETER Experiment Name: Zm_50mM_NH4NO3_L_to_H_P Parameter: Timepoint (hr) Value: 4
  misc_feature: MA Experiment 20000487 PARAMETER Experiment Name: Zm_50mM_NH4NO3_L_to_H_P Parameter: Tissue Value: Leaves
  misc_feature: MA Experiment 20000487 PARAMETER Experiment Name: Zm_50mM_NH4NO3_L_to_H_P Parameter: Treatment Value: 50mM NH4NO3 vs. 100mM Mannitol
gtcggataagccgcgcgccgtcgccgtggccatggcgtccctctcccccgcgctcctccccggcgccggcgtgaccctcctccgagcgccgcccgtgttccgcgtcaccgcctcttcctcgagctcggggagcaagaagggcaagaagcccaagagcggcagcaagggcaaggacaccaaggcgctggagcctccagcgcccgtggtccgccgcgcgccgccgggaagcgcctccatattccagcagcagaagaatgaggcggcgtccagggccgggggcgccggtgggaaggggcccacggaggaggagctacggcagcggcaggccaacgagaacgccttcctcctcgcctggcttgggctaggcatcatcatccttgtcgagggcatcgcactcgccgcctccggttttctgccagaggaatatgacagcttctttgttaagtacctttatccatcgttcactccaacagttgttctgtttttggctggtacggttgggtatggtgtcctcaaatactttgaaagcgagaaaagcaaaagctagatgacagcacgaagcatgtttggagcaatgatgagggtagagttagcaaatgtgcttgttatgtatgaagtagcttaaagcagcagatatgtgccagagaataggctggtgtttttatttatttttccttatatcctgcatcccaaattcctaattattcttttttgtttgtttgtaaattaacgatcaatggatactttcctgaatatgtattaagttgagttgtatattggtttttggcg

SEQ ID NO: 111171 - protein, 181 aa, Zea mays subsp. mays
  misc_feature (1)..(181): Ceres Seq. ID no. 13586611
  misc_feature (38)..(180): Homolog of NCBI NO: 15242116 NR Description: hypothetical protein [Arabidopsis thaliana]
SDKPRAVAVAMASLSPALLPGAGVTLLRAPPVFRVTASSSSSGSKKGKKPKSGSKGKDTKALEPPAPVVRRAPPGSASIFQQQKNEAASRAGGAGGKGPTEEELRQRQANENAFLLAWLGLGIIILVEGIALAASGFLPEEYDSFFVKYLYPSFTPTVVLFLAGTVGYGVLKYFESEKSKS

SEQ ID NO: 111172 - protein, 171 aa, Zea mays subsp. mays
  misc_feature (1)..(171): Ceres Seq. ID no. 13586612
  misc_feature (28)..(170): Homolog of NCBI NO: 15242116 NR Description: hypothetical protein [Arabidopsis thaliana]
MASLSPALLPGAGVTLLRAPPVFRVTASSSSSGSKKGKKPKSGSKGKDTKALEPPAPVVRRAPPGSASIFQQQKNEAASRAGGAGGKGPTEEELRQRQANENAFLLAWLGLGIIILVEGIALAASGFLPEEYDSFFVKYLYPSFTPTVVLFLAGTVGYGVLKYFESEKSKS

SEQ ID NO: 111173 - DNA, 2053 bp, Zea mays subsp. mays
  misc_feature (1)..(2053): Ceres Seq. ID no. 15180230
agtatcgacgcccttctaaaaccctaactccctctgtgtcctcgacgccgccaagccatcctccctctggagtaccgaccgactctccacctcaggaccgcaagctacttcctccgcctcgacaggcgtcggcgagatggtgaagagaagcaagaagagcaagagcaagcgcgtcacgctgcggcagaagcacaaggtgctgcgcaaggtgaaggagcaccaccgcaagaagcgcaaggaggccaagaaggagggcaaggccggccagcggaagaaggtcgagaaggaccccgggatccccaacgagtggcccttcaaggagcaggagctcaaggcgctcgaggcccgacgcgcgcaggcgctccaggagctcgagctcaagaaggaggcgcgcaaggagagggctcggaagaggaagctaggattgctcgaggatgaggaaattgctaatttggcatctgcagcttccgcgcagggcagtgagtttgcagcaaaggatgcagcaaaggataaagctcctttaacagtggcaaagagcaatgatcattctgagagatctttctacaaggagcttgttaaagtaatcgaagcttctgatgtgattcttgaggttcttgatgcaagagatccgctgggcacccgttgcattgacatggaaaagatggttaggaaggctgatccaagtaaacggattgtactacttctcaacaagatagatcttgttcctaaggaggcggtagagaagtggcttacatatctgagagaagaaatgccaacagttgcgtttaagtgtaatacccaagagcagcggaccaagctgggatggaaatcttcaaaactagataaaacaaacatcatcccacaaagtagtgattgccttggtgctgagaatctaattagattgctcaagaattattccagaagccacgagctcaaactggcaattacggtgggtattgttggactccctaatgttggcaagagcagtctgatcaacagcctgaagaggtcccgagtggttaatgtcggttccactccaggggttactagatcaatgcaagaagttcaattagacaagaaggtaaagttgttggattgtcctggtgttgttatgctcaaatcttccaacagcggtgtgtctgtagctcttcgaaactgcaaaagagttgagaaaatggaagatccagtcactcctgttaaggagatccttggtatttgcccacatgagaagttgctgtctatgtataaggttccaagcttcagttcagttgatgatttccttcagaaagtatcaactgtacgggggaaattgaaaaagggtggtgtggtggatgttgaagctgctgcgagaattgtgcttcatgactggaatgaaggtaaaataccatattttacactgccacctaaaagagatgctgtggaggactcagatgtagtgattatatcagaagatgtgaaagaatttaatattgatgaaatttacaaagctgagtcttcatatattggtggtttgaagtccattgaggagttccatcatattgagattcctcctaatgctccaccggcaattgacgaagagatgctagaggatggcagcaaaccaagtgaacccgctcaggaaaaccgggaggagcaaatgtctgacgcgaacgacccacaaggaagcaagccagccaccgccagcacgcagaacgacaagttgtacaccgccgagggcatactcgaccctcgcaagaggaaagcagagaagaaacggcgcaaggcgaacaggttcagtctgctgaacgacatggacgcggactacgatttcaaggtggattaccagatggaggacgccgcggatggtgaagacgaagacgctggggatgaagccaaggaggataatgagccgatgactggcgtcgacgattcgtgaaattttggccccttcgtcgtgtatgaggtgatggctaggctcagcgggggttgcaaaattgacccaccaaggttttgtgctcagtttgcttgtttaatgaaaagattatactatgagaaggcttgcgttttacctgtg

SEQ ID NO: 111174 - protein, 592 aa, Zea mays subsp. mays
  misc_feature (1)..(592): Ceres Seq. ID no. 15180231
  misc_feature (15)..(451): Homolog of NCBI NO: 9506611 NR Description: hypothetical protein FLJ10613 [Homo sapiens]
  misc_feature (30)..(530): Homolog of NCBI NO: 33468623 NR Description: SI:zK13A21.8 (novel protein similar to human
  misc_feature (2)..(591): Homolog of NCBI NO: 31209693 NR Description: ENSANGP00000012225 [Anopheles gambiae]
  misc_feature (2)..(552): Homolog of NCBI NO: 24647590 NR Description: CG3983-PB [Drosophila melanogaster]
  misc_feature (2)..(552): Homolog of NCBI NO: 21428328 NR Description: AT23067p [Drosophila melanogaster]
  misc_feature (1)..(551): Homolog of NCBI NO: 17534827 NR Description: nucleostemin (62.3 kD) (2I572) [Caenorhabditis
  misc_feature (1)..(551): Homolog of NCBI NO: 39587211 NR Description: Hypothetical protein CBG00673 [Caenorhabditis
  misc_feature (37)..(540): Homolog of NCBI NO: 15451214 NR Description: putative GTPase [Arabidopsis thaliana]
  misc_feature (1)..(589): Homolog of NCBI NO: 15231373 NR Description: GTPase -related [Arabidopsis thaliana]
  misc_feature (1)..(592): Homolog of NCBI NO: 34914820 NR Description: putative GTPase [Oryza sativa (japonica
MVKRSKKSKSKRVTLRQKHKVLRKVKEHHRKKRKEAKKEGKAGQRKKVEKDPGIPNEWPFKEQELKALEARRAQALQELELKKEARKERARKRKLGLLEDEEIANLASAASAQGSEFAAKDAAKDKAPLTVAKSNDHSERSFYKELVKVIEASDVILEVLDARDPLGTRCIDMEKMVRKADPSKRIVLLLNKIDLVPKEAVEKWLTYLREEMPTVAFKCNTQEQRTKLGWKSSKLDKTNIIPQSSDCLGAENLIRLLKNYSRSHELKLAITVGIVGLPNVGKSSLINSLKRSRVVNVGSTPGVTRSMQEVQLDKKVKLLDCPGVVMLKSSNSGVSVALRNCKRVEKMEDPVTPVKEILGICPHEKLLSMYKVPSFSSVDDFLQKVSTVRGKLKKGGVVDVEAAARIVLHDWNEGKIPYFTLPPKRDAVEDSDVVIISEDVKEFNIDEIYKAESSYIGGLKSIEEFHHIEIPPNAPPAIDEEMLEDGSKPSEPAQENREEQMSDANDPQGSKPATASTQNDKLYTAEGILDPRKRKAEKKRRKANRFSLLNDMDADYDFKVDYQMEDAADGEDEDAGDEAKEDNEPMTGVDDS

SEQ ID NO: 111175 - protein, 420 aa, Zea mays subsp. mays
  misc_feature (1)..(420): Ceres Seq. ID no. 15180232
  misc_feature (1)..(420): Homolog of NCBI NO: 34914820 NR Description: putative GTPase [Oryza sativa (japonica
  misc_feature (1)..(279): Homolog of NCBI NO: 9506611 NR Description: hypothetical protein FLJ10613 [Homo sapiens]
  misc_feature (1)..(358): Homolog of NCBI NO: 33468623 NR Description: SI:zK13A21.8 (novel protein similar to human
  misc_feature (1)..(419): Homolog of NCBI NO: 31209693 NR Description: ENSANGP00000012225 [Anopheles gambiae]
  misc_feature (1)..(380): Homolog of NCBI NO: 24647590 NR Description: CG3983-PB [Drosophila melanogaster]
  misc_feature (1)..(380): Homolog of NCBI NO: 21428328 NR Description: AT23067p [Drosophila melanogaster]
  misc_feature (1)..(379): Homolog of NCBI NO: 17534827 NR Description: nucleostemin (62.3 kD) (2I572) [Caenorhabditis
  misc_feature (1)..(379): Homolog of NCBI NO: 39587211 NR Description: Hypothetical protein CBG00673 [Caenorhabditis
  misc_feature (1)..(368): Homolog of NCBI NO: 15451214 NR Description: putative GTPase [Arabidopsis thaliana]
  misc_feature (1)..(417): Homolog of NCBI NO: 15231373 NR Description: GTPase -related [Arabidopsis thaliana]
MEKMVRKADPSKRIVLLLNKIDLVPKEAVEKWLTYLREEMPTVAFKCNTQEQRTKLGWKSSKLDKTNIIPQSSDCLGAENLIRLLKNYSRSHELKLAITVGIVGLPNVGKSSLINSLKRSRVVNVGSTPGVTRSMQEVQLDKKVKLLDCPGVVMLKSSNSGVSVALRNCKRVEKMEDPVTPVKEILGICPHEKLLSMYKVPSFSSVDDFLQKVSTVRGKLKKGGVVDVEAAARIVLHDWNEGKIPYFTLPPKRDAVEDSDVVIISEDVKEFNIDEIYKAESSYIGGLKSIEEFHHIEIPPNAPPAIDEEMLEDGSKPSEPAQENREEQMSDANDPQGSKPATASTQNDKLYTAEGILDPRKRKAEKKRRKANRFSLLNDMDADYDFKVDYQMEDAADGEDEDAGDEAKEDNEPMTGVDDS

SEQ ID NO: 111176 - protein, 417 aa, Zea mays subsp. mays
  misc_feature (1)..(417): Ceres Seq. ID no. 15180233
  misc_feature (1)..(276): Homolog of NCBI NO: 9506611 NR Description: hypothetical protein FLJ10613 [Homo sapiens]
  misc_feature (1)..(355): Homolog of NCBI NO: 33468623 NR Description: SI:zK13A21.8 (novel protein similar to human
  misc_feature (1)..(416): Homolog of NCBI NO: 31209693 NR Description: ENSANGP00000012225 [Anopheles gambiae]
  misc_feature (1)..(377): Homolog of NCBI NO: 24647590 NR Description: CG3983-PB [Drosophila melanogaster]
  misc_feature (1)..(377): Homolog of NCBI NO: 21428328 NR Description: AT23067p [Drosophila melanogaster]
  misc_feature (1)..(376): Homolog of NCBI NO: 17534827 NR Description: nucleostemin (62.3 kD) (2I572) [Caenorhabditis
  misc_feature (1)..(376): Homolog of NCBI NO: 39587211 NR Description: Hypothetical protein CBG00673 [Caenorhabditis
  misc_feature (1)..(365): Homolog of NCBI NO: 15451214 NR Description: putative GTPase [Arabidopsis thaliana]
  misc_feature (1)..(414): Homolog of NCBI NO: 15231373 NR Description: GTPase -related [Arabidopsis thaliana]
  misc_feature (1)..(417): Homolog of NCBI NO: 34914820 NR Description: putative GTPase [Oryza sativa (japonica
MVRKADPSKRIVLLLNKIDLVPKEAVEKWLTYLREEMPTVAFKCNTQEQRTKLGWKSSKLDKTNIIPQSSDCLGAENLIRLLKNYSRSHELKLAITVGIVGLPNVGKSSLINSLKRSRVVNVGSTPGVTRSMQEVQLDKKVKLLDCPGVVMLKSSNSGVSVALRNCKRVEKMEDPVTPVKEILGICPHEKLLSMYKVPSFSSVDDFLQKVSTVRGKLKKGGVVDVEAAARIVLHDWNEGKIPYFTLPPKRDAVEDSDVVIISEDVKEFNIDEIYKAESSYIGGLKSIEEFHHIEIPPNAPPAIDEEMLEDGSKPSEPAQENREEQMSDANDPQGSKPATASTQNDKLYTAEGILDPRKRKAEKKRRKANRFSLLNDMDADYDFKVDYQMEDAADGEDEDAGDEAKEDNEPMTGVDDS

SEQ ID NO: 111177 - DNA, 962 bp, Zea mays subsp. mays
  misc_feature (1)..(962): Ceres Seq. ID no. 13599004
aacatcaaagcagagaaatgctgtcgcctgccaatctgttgccagccgttggattgcttcaacggtggagagcagctgactgggtgagccttcggtgggcgacggcaggcgatcccagtccagcacctccccctcccttcctatctctctgatctctccctcgctctcgcagccgccactgtagaagcttcgaggctgctgctgcgcccatggccgcggaagccaagacgccgtccctcgctgaggaatattcacttccaccacaggaagttccagtggaaaaggtagctgaggagaagccctctagtggtactgagactgaatctgctccttcaaccaatgatgggactccttcatctgtagaagataagaatgaaacatctgaagtacaagatgctgctgaaaagtcagacgcagaagaaactaacactgctgcagaggaagcaagtgagactaccgaggaggaagaggctgagaaacctgagatcaagattgaaacagctccagcagattttcgtttcccaacaacaaatcaaacgaggcactgtttcacacgctatgttgaataccacaggtgtgtggctgcaaaaggtgaggatgcacctgagtgtgataagtttgccaagtactatcgatccctgtgcccaggtgaatgggttgaacgctggaacgagcagcgtgaaaatggcacgttccctggacctctgtaatcctacaatgcaaaaagaattaggaactcacgatgttgtgccggccttctcctccttggtaactggcgccaagttagcagggagagagacaaatcatcctctttggagctctctacaaaataagagattctttttgacttgaagaatgccttgttgctcttcctaacggtcttgttctgcgctgctgagaaaccagcgtcacagttacatttttgtccgtatatacagtttaaaataaatgattcatgattc

SEQ ID NO: 111178 - protein, 166 aa, Zea mays subsp. mays
  misc_feature (1)..(166): Ceres Seq. ID no. 15222486
  misc_feature (92)..(165): Pfam Name: Cytochrome oxidase c subunit VIb Pfam Description: Cytochrome oxidase c subunit VIb
  misc_feature (80)..(164): Homolog of NCBI NO: 38048151 NR Description: similar to Drosophila melanogaster CG14235
  misc_feature (92)..(166): Homolog of NCBI NO: 21592329 NR Description: cytochrome c oxidase subunit 6b [Arabidopsis
  misc_feature (90)..(166): Homolog of NCBI NO: 15234375 NR Description: hypothetical protein [Arabidopsis thaliana]
  misc_feature (92)..(166): Homolog of NCBI NO: 18424030 NR Description: expressed protein [Arabidopsis thaliana]
  misc_feature (92)..(166): Homolog of NCBI NO: 9967162 NR Description: cytochrome c oxidase subunit 6b
  misc_feature (2)..(166): Homolog of NCBI NO: 21554378 NR Description: cytochrome c oxidase subunit, putative
  misc_feature (2)..(166): Homolog of NCBI NO: 15219886 NR Description: cytochrome c oxidase subunit -related
  misc_feature (2)..(166): Homolog of NCBI NO: 34906824 NR Description: putative cytochrome c oxidase subunit 6b-1
  misc_feature (1)..(166): Homolog of NCBI NO: 22204116 NR Description: putative cytochrome c oxidase subunit [Triticum
  misc_feature (1)..(166): Homolog of NCBI NO: 4586449 NR Description: cytochrome c oxidase subunit 6b-1
MAAEAKTPSLAEEYSLPPQEVPVEKVAEEKPSSGTETESAPSTNDGTPSSVEDKNETSEVQDAAEKSDAEETNTAAEEASETTEEEEAEKPEIKIETAPADFRFPTTNQTRHCFTRYVEYHRCVAAKGEDAPECDKFAKYYRSLCPGEWVERWNEQRENGTFPGPL

SEQ ID NO: 111179 - protein, 159 aa, Zea mays subsp. mays
  misc_feature (1)..(159): Ceres Seq. ID no. 15222487
MKHLKYKMLLKSQTQKKLTLLQRKQVRLPRRKRLRNLRSRLKQLQQIFVSQQQIKRGTVSHAMLNTTGVWLQKVRMHLSVISLPSTIDPCAQVNGLNAGTSSVKMARSLDLCNPTMQKELGTHDVVPAFSSLVTGAKLAGRETNHPLWSSLQNKRFFLT

SEQ ID NO: 111180 - protein, 152 aa, Zea mays subsp. mays
  misc_feature (1)..(152): Ceres Seq. ID no. 15222488
MLLKSQTQKKLTLLQRKQVRLPRRKRLRNLRSRLKQLQQIFVSQQQIKRGTVSHAMLNTTGVWLQKVRMHLSVISLPSTIDPCAQVNGLNAGTSSVKMARSLDLCNPTMQKELGTHDVVPAFSSLVTGAKLAGRETNHPLWSSLQNKRFFLT

SEQ ID NO: 111181 - DNA, 1365 bp, Zea mays subsp. mays
  misc_feature (1)..(1365): Ceres Seq. ID no. 13586619
tcaaaccatcaatcacagagcaactcgaatagcagctccaacaaaagctcaacgcaccagcagcaatggcgtctcgccgtttcttctacgacgacccctacgactactactacacctccccgtaccactacgcctacccctattaccggtaccagcaccccgatccgtcccgcggcgtcggcgggttcttcccggccgccgcagaagccgcgccggaggcggtgaaggtggacccgcggcccagggtcgagtcttcgaggtcggtctccgttcccgtccgcttcgtcggttccgacccggagccggtgcgcggggcggccaggatgccaccggcggcggtgccgaggaagcgggcgccgtcggcggaagcggcggcggtgctgctgcaggccgcggtgcgcgggttcatggcgaggaagtcggtgcgtgctgttcgcgaggtggagcgtgaggcggcggaggtcggcgagaaggttgcgcgcgaggcggaggcgctgcgcggagacgcgagggcgcggatcgccgtcggggaggcgctgatgaagatgctgctgcggctcgatgcggtgcgcggcgcgcgggaataccggaagagggtcaccaagcgggtcctcgcgctgcaggatgctgttgacgccctcgaaccaaagccgacgccggattcggaggtcgtggcggaggagagcgagtctgaggtgacgtccgagatggcggacgacagcgccgaggcgacggagatgccggtcgccgcggagcacagcggcggcattgaggtgaatgcggcggctgagacggttgccgatatggaggtggacgggggcaaagctgacagcgaggcggtgccagaagcggtgaaggaatccgaaaataagcaggacgacgggcacattaacggcgaccagacggaagtctccaatgagggcgaatgggagatggtggcggatgaagcggagcctacaactgcggcgacgggttccaccgaggcgcccccgcagacaccgatgacgagcgaggtgatgaggccgacagtggaggccggagctgccgacagcgccctggacactcggaaggttatggagatggtcgcggccctgtgcgagcagaacgcgcagcagtgcgcggtgatcggggctctggcggagcgcgtggacgcgcttgagcgcgccgtgcggcgggtggaggacgccgagcgccgccgccggcggggcaagaagctgaagaaggatgggaaggggagcaataggtgctacaccgattgaggacagctctgcttcttatttgtttttacatggttagaccaggaaccttcacgagctgtagaatttagttcttgttggccaaaaaaaaaaaaaaaaaggcttggcg

SEQ ID NO: 111182 - protein, 397 aa, Zea mays subsp. mays
  misc_feature (1)..(397): Ceres Seq. ID no. 13586620
  misc_feature (123)..(192): Pfam Name: BAG domain Pfam Description: BAG domain
  misc_feature (10)..(389): Homolog of NCBI NO: 22208514 NR Description: hypothetical protein [Sorghum bicolor]
  misc_feature (10)..(389): Homolog of NCBI NO: 22208518 NR Description: hypothetical protein [Sorghum bicolor]
  misc_feature (1)..(389): Homolog of NCBI NO: 22208514 NR Description: hypothetical protein [Sorghum bicolor]
  misc_feature (161)..(397): Homolog of NCBI NO: 4185307 NR Description: unknown [Zea mays]
MASRRFFYDDPYDYYYTSPYHYAYPYYRYQHPDPSRGVGGFFPAAAEAAPEAVKVDPRPRVESSRSVSVPVRFVGSDPEPVRGAARMPPAAVPRKRAPSAEAAAVLLQAAVRGFMARKSVRAVREVEREAAEVGEKVAREAEALRGDARARIAVGEALMKMLLRLDAVRGAREYRKRVTKRVLALQDAVDALEPKPTPDSEVVAEESESEVTSEMADDSAEATEMPVAAEHSGGIEVNAAAETVADMEVDGGKADSEAVPEAVKESENKQDDGHINGDQTEVSNEGEWEMVADEAEPTTAATGSTEAPPQTPMTSEVMRPTVEAGAADSALDTRKVMEMVAALCEQNAQQCAVIGALAERVDALERAVRRVEDAERRRRRGKKLKKDGKGSNRCYTD

SEQ ID NO: 111183 - protein, 311 aa, Zea mays subsp. mays
  misc_feature (1)..(311): Ceres Seq. ID no. 13586621
  misc_feature (37)..(106): Pfam Name: BAG domain Pfam Description: BAG domain
  misc_feature (1)..(303): Homolog of NCBI NO: 22208514 NR Description: hypothetical protein [Sorghum bicolor]
  misc_feature (1)..(303): Homolog of NCBI NO: 22208518 NR Description: hypothetical protein [Sorghum bicolor]
  misc_feature (1)..(303): Homolog of NCBI NO: 22208514 NR Description: hypothetical protein [Sorghum bicolor]
  misc_feature (75)..(311): Homolog of NCBI NO: 4185307 NR Description: unknown [Zea mays]
MPPAAVPRKRAPSAEAAAVLLQAAVRGFMARKSVRAVREVEREAAEVGEKVAREAEALRGDARARIAVGEALMKMLLRLDAVRGAREYRKRVTKRVLALQDAVDALEPKPTPDSEVVAEESESEVTSEMADDSAEATEMPVAAEHSGGIEVNAAAETVADMEVDGGKADSEAVPEAVKESENKQDDGHINGDQTEVSNEGEWEMVADEAEPTTAATGSTEAPPQTPMTSEVMRPTVEAGAADSALDTRKVMEMVAALCEQNAQQCAVIGALAERVDALERAVRRVEDAERRRRRGKKLKKDGKGSNRCYTD

SEQ ID NO: 111184 - protein, 283 aa, Zea mays subsp. mays
  misc_feature (1)..(283): Ceres Seq. ID no. 13586622
  misc_feature (9)..(78): Pfam Name: BAG domain Pfam Description: BAG domain
  misc_feature (1)..(275): Homolog of NCBI NO: 22208514 NR Description: hypothetical protein [Sorghum bicolor]
  misc_feature (1)..(275): Homolog of NCBI NO: 22208518 NR Description: hypothetical protein [Sorghum bicolor]
  misc_feature (1)..(275): Homolog of NCBI NO: 22208514 NR Description: hypothetical protein [Sorghum bicolor]
  misc_feature (47)..(283): Homolog of NCBI NO: 4185307 NR Description: unknown [Zea mays]
MARKSVRAVREVEREAAEVGEKVAREAEALRGDARARIAVGEALMKMLLRLDAVRGAREYRKRVTKRVLALQDAVDALEPKPTPDSEVVAEESESEVTSEMADDSAEATEMPVAAEHSGGIEVNAAAETVADMEVDGGKADSEAVPEAVKESENKQDDGHINGDQTEVSNEGEWEMVADEAEPTTAATGSTEAPPQTPMTSEVMRPTVEAGAADSALDTRKVMEMVAALCEQNAQQCAVIGALAERVDALERAVRRVEDAERRRRRGKKLKKDGKGSNRCYTD

SEQ ID NO: 111185 - DNA, 1084 bp, Zea mays subsp. mays
  misc_feature (1)..(1084): Ceres Seq. ID no. 15180245
  misc_feature: MA Experiment ID: 108528 Result: Up-regulated in Transcription
  misc_feature: MA Experiment 108528 PARAMETER Experiment Name: Zm_Imbibed_Seeds_P Parameter: Age (day) Value: 5 vs. 2
  misc_feature: MA Experiment 108528 PARAMETER Experiment Name: Zm_Imbibed_Seeds_P Parameter: Organism Value: Zea mays
  misc_feature: MA Experiment 108528 PARAMETER Experiment Name: Zm_Imbibed_Seeds_P Parameter: Plant Line Value: 35A19
  misc_feature: MA Experiment 108528 PARAMETER Experiment Name: Zm_Imbibed_Seeds_P Parameter: Tissue Value: Aerial vs. Embryo
  misc_feature: MA Experiment ID: 108529 Result: Down-regulated in Transcription
  misc_feature: MA Experiment 108529 PARAMETER Experiment Name: Zm_Imbibed_Seeds_P Parameter: Age (day) Value: 5 vs. 2
  misc_feature: MA Experiment 108529 PARAMETER Experiment Name: Zm_Imbibed_Seeds_P Parameter: Organism Value: Zea mays
  misc_feature: MA Experiment 108529 PARAMETER Experiment Name: Zm_Imbibed_Seeds_P Parameter: Plant Line Value: 35A19
  misc_feature: MA Experiment 108529 PARAMETER Experiment Name: Zm_Imbibed_Seeds_P Parameter: Tissue Value: Roots vs. Embryo
  misc_feature: MA Experiment ID: 108530 Result: Up-regulated in Transcription
  misc_feature: MA Experiment 108530 PARAMETER Experiment Name: Zm_Imbibed_Seeds_P Parameter: Age (day) Value: 6 vs. 2
  misc_feature: MA Experiment 108530 PARAMETER Experiment Name: Zm_Imbibed_Seeds_P Parameter: Organism Value: Zea mays
  misc_feature: MA Experiment 108530 PARAMETER Experiment Name: Zm_Imbibed_Seeds_P Parameter: Plant Line Value: 35A19
  misc_feature: MA Experiment 108530 PARAMETER Experiment Name: Zm_Imbibed_Seeds_P Parameter: Tissue Value: Aerial vs. Embryo
  misc_feature: MA Experiment ID: 108536 Result: Down-regulated in Transcription
  misc_feature: MA Experiment 108536 PARAMETER Experiment Name: Zm_Meristem_P Parameter: Age (day) Value: 8
  misc_feature: MA Experiment 108536 PARAMETER Experiment Name: Zm_Meristem_P Parameter: Organism Value: Zea mays
  misc_feature: MA Experiment 108536 PARAMETER Experiment Name: Zm_Meristem_P Parameter: Plant Line Value: 35A19
  misc_feature: MA Experiment 108536 PARAMETER Experiment Name: Zm_Meristem_P Parameter: Tissue Value: Shoot Meristem vs. Above Shoot Meristem
  misc_feature: MA Experiment ID: 108543 Result: Up-regulated in Transcription
  misc_feature: MA Experiment ID: 108545 Result: Up-regulated in Transcription
  misc_feature: MA Experiment 108545 PARAMETER Experiment Name: Zm_Imbibed_Seeds_P Parameter: Age (day) Value: 3 vs. 2
  misc_feature: MA Experiment 108545 PARAMETER Experiment Name: Zm_Imbibed_Seeds_P Parameter: Organism Value: Zea mays
  misc_feature: MA Experiment 108545 PARAMETER Experiment Name: Zm_Imbibed_Seeds_P Parameter: Plant Line Value: 35A19
  misc_feature: MA Experiment 108545 PARAMETER Experiment Name: Zm_Imbibed_Seeds_P Parameter: Tissue Value: Aerial vs. Embryo
  misc_feature: MA Experiment ID: 108546 Result: Down-regulated in Transcription
  misc_feature: MA Experiment 108546 PARAMETER Experiment Name: Zm_Imbibed_Seeds_P Parameter: Age (day) Value: 3 vs. 2
  misc_feature: MA Experiment 108546 PARAMETER Experiment Name: Zm_Imbibed_Seeds_P Parameter: Organism Value: Zea mays
  misc_feature: MA Experiment 108546 PARAMETER Experiment Name: Zm_Imbibed_Seeds_P Parameter: Plant Line Value: 35A19
  misc_feature: MA Experiment 108546 PARAMETER Experiment Name: Zm_Imbibed_Seeds_P Parameter: Tissue Value: Roots vs. Embryo
  misc_feature: MA Experiment ID: 108547 Result: Up-regulated in Transcription
  misc_feature: MA Experiment 108547 PARAMETER Experiment Name: Zm_Imbibed_Seeds_P Parameter: Age (day) Value: 4 vs. 2
  misc_feature: MA Experiment 108547 PARAMETER Experiment Name: Zm_Imbibed_Seeds_P Parameter: Organism Value: Zea mays
  misc_feature: MA Experiment 108547 PARAMETER Experiment Name: Zm_Imbibed_Seeds_P Parameter: Plant Line Value: 35A19
  misc_feature: MA Experiment 108547 PARAMETER Experiment Name: Zm_Imbibed_Seeds_P Parameter: Tissue Value: Aerial vs. Embryo
  misc_feature: MA Experiment ID: 108688 Result: Down-regulated in Transcription
  misc_feature: MA Experiment 108688 PARAMETER Experiment Name: Zm_Embryos-Flowers__P Parameter: Tissue Value: Immature Flowers vs. Aerial+
  misc_feature: MA Experiment ID: 20001608 Result: Up-regulated in Transcription
  misc_feature: MA Experiment 20001608 PARAMETER Experiment Name: Zm_50ppm_KNO3_L-to-H_P Parameter: Age (day) Value: 21
  misc_feature: MA Experiment 20001608 PARAMETER Experiment Name: Zm_50ppm_KNO3_L-to-H_P Parameter: Organism Value: Zea mays
  misc_feature: MA Experiment 20001608 PARAMETER Experiment Name: Zm_50ppm_KNO3_L-to-H_P Parameter: Plant Line Value: 35A19
  misc_feature: MA Experiment 20001608 PARAMETER Experiment Name: Zm_50ppm_KNO3_L-to-H_P Parameter: Timepoint (hr) Value: 48
  misc_feature: MA Experiment 20001608 PARAMETER Experiment Name: Zm_50ppm_KNO3_L-to-H_P Parameter: Tissue Value: Shoots
  misc_feature: MA Experiment 20001608 PARAMETER Experiment Name: Zm_50ppm_KNO3_L-to-H_P Parameter: Treatment Value: 50ppm KNO3 vs. 50ppm KCl
aaaaaaacagttcttcaaacgaggaacaggggcggtccacatctggccgtacccttcccggctccctccgtctccgatatgcaccagcaccacgcctcccgctcccgctccccctgcccctcctcgtccgccgcggcgcgtcccaggaccgaggacttccccgtggacatcgtcagcgacgaggagatggcgctcatcgacgccgcgctcgccgccgccgcggcgggggcgcgcccgctcctctccgcagcggcccgccgcgccgccgtcccgctctcccgtgcggcgtgctcggccaccgacgggctcgccgccggcgacatcgaggacggggtgggcgtgatggcgaccaaggtggggatgatgacctacttcgatccggagacggggaagccggtgccggtgaccgtggtcgggttccgggagggcggcaacgtggtgacgcaggtgaagacggccgccacggacgggtacgacgccgtccaggtcgggtaccacggcgtgcgcgaggacaagctcacccgcccggagctgggccacctgggcaaggccggcgcccctccgttgcgccacctgcaggagttccggctcaccgccgtcgacgccttcgagcccggccagcccctcgacttcgccgacctcttcaaggagggcgacctcatcgacgtctccggcaactccatcggcaaggggttccaaggtggcatcaagaggcacaacttcaagcgcgggctgatgacgcacggttccaagagccaccggcagctgggttccatcggagccgggacgacgccgggccgcgtgtacaaggggaagaagatgcccgggaggatgggaggaaccaagaccaagatcaggaagctcaagatcgtcaagatcgacaacaacctccgggtgctcatgatcaagggggccgtgccagggaagcccgggaacctcctccgcataacgccggccaagatcgtcggcaagaacatccccaagaactagacttcttttttcaggggggtgaatgttgagtgtttgtgtttgttaccctgctacaaactggatgtaatcctttgccaatttccagtttttgaac

SEQ ID NO: 111186 - protein, 338 aa, Zea mays subsp. mays
  misc_feature (1)..(338): Ceres Seq. ID no. 15180246
  misc_feature (109)..(335): Pfam Name: High molecular weight glutenin subunit Pfam Description: High molecular weight glutenin subunit
  misc_feature (236)..(328): Homolog of NCBI NO: 2246532 NR Description: ORF 73, contains large complex repeat CR 73
  misc_feature (216)..(328): Homolog of NCBI NO: 5669894 NR Description: latent nuclear antigen [Human herpesvirus 8]
  misc_feature (208)..(330): Homolog of NCBI NO: 2246532 NR Description: ORF 73, contains large complex repeat CR 73
  misc_feature (224)..(328): Homolog of NCBI NO: 5669894 NR Description: latent nuclear antigen [Human herpesvirus 8]
  misc_feature (208)..(330): Homolog of NCBI NO: 2246532 NR Description: ORF 73, contains large complex repeat CR 73
  misc_feature (163)..(330): Homolog of NCBI NO: 2246532 NR Description: ORF 73, contains large complex repeat CR 73
  misc_feature (138)..(330): Homolog of NCBI NO: 5669894 NR Description: latent nuclear antigen [Human herpesvirus 8]
  misc_feature (158)..(328): Homolog of NCBI NO: 2246532 NR Description: ORF 73, contains large complex repeat CR 73
  misc_feature (15)..(272): Homolog of NCBI NO: 15790851 NR Description: Vng1983h [Halobacterium sp. NRC-1]
  misc_feature (28)..(232): Homolog of NCBI NO: 79833 NR Description: hypothetical 119.5K protein (uvrA region) -
KNSSSNEEQGRSTSGRTLPGSLRLRYAPAPRLPLPLPLPLLVRRGASQDRGLPRGHRQRRGDGAHRRRARRRRGGGAPAPLRSGPPRRRPALPCGVLGHRRARRRRHRGRGGRDGDQGGDDDLLRSGDGEAGAGDRGRVPGGRQRGDAGEDGRHGRVRRRPGRVPRRARGQAHPPGAGPPGQGRRPSVAPPAGVPAHRRRRLRARPAPRLRRPLQGGRPHRRLRQLHRQGVPRWHQEAQLQARADDARFQEPPAAGFHRSRDDAGPRVQGEEDAREDGRNQDQDQEAQDRQDRQQPPGAHDQGGRAREAREPPPHNAGQDRRQEHPQELDFFFQGGEC

SEQ ID NO: 111187 - protein, 329 aa, Zea mays subsp. mays
  misc_feature (1)..(329): Ceres Seq. ID no. 15180247
  misc_feature (118)..(316): Pfam Name: Ribosomal protein L3 Pfam Description: Ribosomal protein L3
  misc_feature (112)..(325): Homolog of NCBI NO: 32307490 NR Description: ribosomal protein rpL3 [Bigelowiella natans]
  misc_feature (112)..(324): Homolog of NCBI NO: 37519654 NR Description: 50S ribosomal protein L3 [Gloeobacter violaceus]
  misc_feature (112)..(323): Homolog of NCBI NO: 23124126 NR Description: hypothetical protein [Nostoc punctiforme]
  misc_feature (112)..(324): Homolog of NCBI NO: 17231707 NR Description: 50S ribosomal protein L3 [Nostoc sp. PCC 7120]
  misc_feature (112)..(324): Homolog of NCBI NO: 16329941 NR Description: 50S ribosomal protein L3 [Synechocystis sp. PCC
  misc_feature (112)..(324): Homolog of NCBI NO: 22297625 NR Description: 50S ribosomal protein L3 [Thermosynechococcus
  misc_feature (112)..(324): Homolog of NCBI NO: 3122742 NR Description: 50S ribosomal protein L3
  misc_feature (103)..(329): Homolog of NCBI NO: 21553426 NR Description: 50S ribosomal protein L3 [Arabidopsis thaliana]
  misc_feature (103)..(329): Homolog of NCBI NO: 15224205 NR Description: ribosomal protein L3p family [Arabidopsis
  misc_feature (105)..(329): Homolog of NCBI NO: 7440606 NR Description: ribosomal protein L3 precursor, chloroplast -
KKTVLQTRNRGGPHLAVPFPAPSVSDMHQHHASRSRSPCPSSSAAARPRTEDFPVDIVSDEEMALIDAALAAAAAGARPLLSAAARRAAVPLSRAACSATDGLAAGDIEDGVGVMATKVGMMTYFDPETGKPVPVTVVGFREGGNVVTQVKTAATDGYDAVQVGYHGVREDKLTRPELGHLGKAGAPPLRHLQEFRLTAVDAFEPGQPLDFADLFKEGDLIDVSGNSIGKGFQGGIKRHNFKRGLMTHGSKSHRQLGSIGAGTTPGRVYKGKKMPGRMGGTKTKIRKLKIVKIDNNLRVLMIKGAVPGKPGNLLRITPAKIVGKNIPKN

SEQ ID NO: 111188 - protein, 303 aa, Zea mays subsp. mays
  misc_feature (1)..(303): Ceres Seq. ID no. 15180248
  misc_feature (92)..(290): Pfam Name: Ribosomal protein L3 Pfam Description: Ribosomal protein L3
  misc_feature (86)..(299): Homolog of NCBI NO: 32307490 NR Description: ribosomal protein rpL3 [Bigelowiella natans]
  misc_feature (86)..(298): Homolog of NCBI NO: 37519654 NR Description: 50S ribosomal protein L3 [Gloeobacter violaceus]
  misc_feature (86)..(297): Homolog of NCBI NO: 23124126 NR Description: hypothetical protein [Nostoc punctiforme]
  misc_feature (86)..(298): Homolog of NCBI NO: 17231707 NR Description: 50S ribosomal protein L3 [Nostoc sp. PCC 7120]
  misc_feature (86)..(298): Homolog of NCBI NO: 16329941 NR Description: 50S ribosomal protein L3 [Synechocystis sp. PCC
  misc_feature (86)..(298): Homolog of NCBI NO: 22297625 NR Description: 50S ribosomal protein L3 [Thermosynechococcus
  misc_feature (86)..(298): Homolog of NCBI NO: 3122742 NR Description: 50S ribosomal protein L3
  misc_feature (77)..(303): Homolog of NCBI NO: 21553426 NR Description: 50S ribosomal protein L3 [Arabidopsis thaliana]
  misc_feature (77)..(303): Homolog of NCBI NO: 15224205 NR Description: ribosomal protein L3p family [Arabidopsis
  misc_feature (79)..(303): Homolog of NCBI NO: 7440606 NR Description: ribosomal protein L3 precursor, chloroplast -
MHQHHASRSRSPCPSSSAAARPRTEDFPVDIVSDEEMALIDAALAAAAAGARPLLSAAARRAAVPLSRAACSATDGLAAGDIEDGVGVMATKVGMMTYFDPETGKPVPVTVVGFREGGNVVTQVKTAATDGYDAVQVGYHGVREDKLTRPELGHLGKAGAPPLRHLQEFRLTAVDAFEPGQPLDFADLFKEGDLIDVSGNSIGKGFQGGIKRHNFKRGLMTHGSKSHRQLGSIGAGTTPGRVYKGKKMPGRMGGTKTKIRKLKIVKIDNNLRVLMIKGAVPGKPGNLLRITPAKIVGKNIPKN

SEQ ID NO: 111189 - DNA, 1038 bp, Zea mays subsp. mays
  misc_feature (1)..(1038): Ceres Seq. ID no. 13589401
acaccgcgcaggaacaaccaccaggcacagccaacaagcttgctagtgtgtggtttctctcatcaggtcaggaggagcatggccgaccataaggaggagcagtctgtgatggacaagatctccgagaagttccacggcggggactcctcgtcgtcgtctgactcggacgacgagaagaagaaggggtcttcttcggcgtcggcgacggaggccatgaaagccaagatctaccgtctcttcggccgcgagaggcccgtccactctgtcctcggcggcggcaagcccgccgatcttgtcctatggaggaacaagaagatctcaggcggggtactcgctggtgccacggccatctggctcctgttcgaggttatggagtaccatctcctcaccttggtgtgccactgtctcatcgtctcgctggccatcctgttcctgtggtccaacgcctccagtttcatcaacaagtccccaccaaacattcctgaggtgaaaatccctgaggatgtgtctgttaatgttgcactgacactgagatacgagatcaacaggggctttgctaccttgagggagattggacatggacacgatctaaagaaattcctaattgttatcgcaggtctctggctcttttcagttcttgggagctgttgcaacttcctgacactgttctatattgtctttgtggcactgtacactatacctgttctgtatgagaaatatgaggacaaggttgatgcttttggtgagaaggctatgatcgaactgaagaagtattatgccatcttcgatgagaagtgcctatcgaagattccaaagggcctcaaggataagaagcactagattggtagtaaggtacttgatatgaatcaacacccacgttaagtcacaccttccttgaaggatggtgcttggtcctggtctctagttgatagtatataatctgtatgggcaactctggtgtgactgacactttgatctgctgaaaattgttgatcttgtttttggtttcaactttcagcatacttgcctggaagcttg

SEQ ID NO: 111190 - protein, 279 aa, Zea mays subsp. mays
  misc_feature (1)..(279): Ceres Seq. ID no. 13589402
  misc_feature (33)..(271): Homolog of NCBI NO: 15234108 NR Description: hypothetical protein [Arabidopsis thaliana]
  misc_feature (38)..(273): Homolog of NCBI NO: 30681227 NR Description: expressed protein [Arabidopsis thaliana]
  misc_feature (38)..(273): Homolog of NCBI NO: 18398810 NR Description: expressed protein [Arabidopsis thaliana]
  misc_feature (33)..(277): Homolog of NCBI NO: 18406991 NR Description: expressed protein [Arabidopsis thaliana]
  misc_feature (29)..(273): Homolog of NCBI NO: 15222616 NR Description: expressed protein [Arabidopsis thaliana]
  misc_feature (34)..(279): Homolog of NCBI NO: 34904202 NR Description: P0492F05.25 [Oryza sativa (japonica
  misc_feature (29)..(278): Homolog of NCBI NO: 15238125 NR Description: expressed protein [Arabidopsis thaliana]
  misc_feature (32)..(278): Homolog of NCBI NO: 15237093 NR Description: expressed protein [Arabidopsis thaliana]
  misc_feature (32)..(278): Homolog of NCBI NO: 15236556 NR Description: expressed protein [Arabidopsis thaliana]
  misc_feature (27)..(279): Homolog of NCBI NO: 34909318 NR Description: OSJNBb0021A09.5 [Oryza sativa (japonica
TPRRNNHQAQPTSLLVCGFSHQVRRSMADHKEEQSVMDKISEKFHGGDSSSSSDSDDEKKKGSSSASATEAMKAKIYRLFGRERPVHSVLGGGKPADLVLWRNKKISGGVLAGATAIWLLFEVMEYHLLTLVCHCLIVSLAILFLWSNASSFINKSPPNIPEVKIPEDVSVNVALTLRYEINRGFATLREIGHGHDLKKFLIVIAGLWLFSVLGSCCNFLTLFYIVFVALYTIPVLYEKYEDKVDAFGEKAMIELKKYYAIFDEKCLSKIPKGLKDKKH

SEQ ID NO: 111191 - protein, 253 aa, Zea mays subsp. mays
  misc_feature (1)..(253): Ceres Seq. ID no. 13589403
  misc_feature (8)..(253): Homolog of NCBI NO: 34904202 NR Description: P0492F05.25 [Oryza sativa (japonica
  misc_feature (3)..(252): Homolog of NCBI NO: 15238125 NR Description: expressed protein [Arabidopsis thaliana]
  misc_feature (6)..(252): Homolog of NCBI NO: 15237093 NR Description: expressed protein [Arabidopsis thaliana]
  misc_feature (6)..(252): Homolog of NCBI NO: 15236556 NR Description: expressed protein [Arabidopsis thaliana]
  misc_feature (1)..(253): Homolog of NCBI NO: 34909318 NR Description: OSJNBb0021A09.5 [Oryza sativa (japonica
  misc_feature (7)..(245): Homolog of NCBI NO: 15234108 NR Description: hypothetical protein [Arabidopsis thaliana]
  misc_feature (12)..(247): Homolog of NCBI NO: 30681227 NR Description: expressed protein [Arabidopsis thaliana]
  misc_feature (12)..(247): Homolog of NCBI NO: 18398810 NR Description: expressed protein [Arabidopsis thaliana]
  misc_feature (7)..(251): Homolog of NCBI NO: 18406991 NR Description: expressed protein [Arabidopsis thaliana]
  misc_feature (3)..(247): Homolog of NCBI NO: 15222616 NR Description: expressed protein [Arabidopsis thaliana]
MADHKEEQSVMDKISEKFHGGDSSSSSDSDDEKKKGSSSASATEAMKAKIYRLFGRERPVHSVLGGGKPADLVLWRNKKISGGVLAGATAIWLLFEVMEYHLLTLVCHCLIVSLAILFLWSNASSFINKSPPNIPEVKIPEDVSVNVALTLRYEINRGFATLREIGHGHDLKKFLIVIAGLWLFSVLGSCCNFLTLFYIVFVALYTIPVLYEKYEDKVDAFGEKAMIELKKYYAIFDEKCLSKIPKGLKDKKH

SEQ ID NO: 111192 - protein, 243 aa, Zea mays subsp. mays
  misc_feature (1)..(243): Ceres Seq. ID no. 13589404
  misc_feature (1)..(235): Homolog of NCBI NO: 15234108 NR Description: hypothetical protein [Arabidopsis thaliana]
  misc_feature (2)..(237): Homolog of NCBI NO: 30681227 NR Description: expressed protein [Arabidopsis thaliana]
  misc_feature (2)..(237): Homolog of NCBI NO: 18398810 NR Description: expressed protein [Arabidopsis thaliana]
  misc_feature (1)..(241): Homolog of NCBI NO: 18406991 NR Description: expressed protein [Arabidopsis thaliana]
  misc_feature (1)..(237): Homolog of NCBI NO: 15222616 NR Description: expressed protein [Arabidopsis thaliana]
  misc_feature (1)..(243): Homolog of NCBI NO: 34904202 NR Description: P0492F05.25 [Oryza sativa (japonica
  misc_feature (1)..(242): Homolog of NCBI NO: 15238125 NR Description: expressed protein [Arabidopsis thaliana]
  misc_feature (1)..(242): Homolog of NCBI NO: 15237093 NR Description: expressed protein [Arabidopsis thaliana]
  misc_feature (1)..(242): Homolog of NCBI NO: 15236556 NR Description: expressed protein [Arabidopsis thaliana]
  misc_feature (1)..(243): Homolog of NCBI NO: 34909318 NR Description: OSJNBb0021A09.5 [Oryza sativa (japonica
MDKISEKFHGGDSSSSSDSDDEKKKGSSSASATEAMKAKIYRLFGRERPVHSVLGGGKPADLVLWRNKKISGGVLAGATAIWLLFEVMEYHLLTLVCHCLIVSLAILFLWSNASSFINKSPPNIPEVKIPEDVSVNVALTLRYEINRGFATLREIGHGHDLKKFLIVIAGLWLFSVLGSCCNFLTLFYIVFVALYTIPVLYEKYEDKVDAFGEKAMIELKKYYAIFDEKCLSKIPKGLKDKKH

SEQ ID NO: 111193 - DNA, 2196 bp, Zea mays subsp. mays
  misc_feature (1)..(2196): Ceres Seq. ID no. 15224550
sgaahagkatttatagcgagcgtcctggcctctcttctccctgctcgctcctagctggggtggggagggaagaagaggacaagcatgcagcacgccaacgcgcggcgcgagcataccgacagctccagcctccagggaacgactgaaggagtaggagaaagacaaagaacaagtgtgggaaacagacaacgagaagaccgacgagccgcgacaccgccaccgccaccccgctcctaagtcctagctcctcgtgctacaaaggaataaaccaaggccggcccatgtcttcatctagcggttgtaaccgcggccgagcagtcctcccagtcactgcctctctcgttcccttcctgctcctgctcctcctcctcctcgtcgtctcgtgcccggccgccctggtggtctccgcgacgcacacgcacgtgcacgggcacggcggcgccaccgccggcgccgcgcgggcgtccttccgtgccggggacgagcgggaggcgtacgcgaggatcatggcgcgcatggccaggatggacaaggactccaacatgacgatccaggttccttcccttccctgcagctgctcctgctcctctgccccagctgtgcgcgcgcgctgccggttccggcttccggccaagcaagcgtgcaaatccaccacctcgctgtcgtttacgtactctagctctttcgtcgtgtcgtgtcgtgcgtgtgtgtgcgcgcgcgtgtgcagagcgccgacggcgacgtcatccactgcgtgccggcgcacctgcagccggcgttcgaccaccccaggctgagagggcaggagcccgaggacgagcccgtggagaggcccatgtccaagggcgccgccggtgaggaggaggccggcgtgttcccgcaggcgtggagcgacggcggcagcaagcggtgcccggcggggacggtgccgatacggcggacgacggcgcgcgacgtgctgcgggccagctccgcgcgccggttcgggatgaaggcccgcggcagcagcagcagcaacgcccgccgcgactccaccagcagcggccacgagcacgcggtggggtacgtgacgggggagcagttctacggcgccaaggccagcctgaacgtgtggccggccaaggtggcgtcggcggcggagttcagcctgtcccagatctgggtcatctccggctccttcggcaacgacctcaacaccatcgaggccggatggcaggtgagccctgagctgtatggcgacagcagcccgaggttcttcacgtattggacgaccgatgcgtaccaggagactgggtgctacaacctgcactgctccggcttcgtccagacgaacagccggatcgccattggagccgccatctcgcctacctcggtctacaacggccggcagttcgacatcagcctgctcatatggaaggacccgcaccgggggaactggtggctgcagctggggtcgggcccgctggtggggtactggccgtcgctcctgttcacgcacctgggcggccacgccgacatggtgcagttcggcggcgaggtggtgaactcgcgcccgtcgggggcgcacaccccacgcagatgggcagcggcncacttcccccgsgagggctccaaccgcgccgcctacttccgcaacctgcaggtcgtcgacgccgacaacagcctcgtcgccgccgccgcgctccgcctcgtcgccgaccgcccgggctgctacgacatccagggcggctacaacaccgcctgggggaactacttctactacggagggcccggcaggaacgtgcactgcccgtgatctgtctctgtctctgttggtagccgacgcccgacgacgatcgaccatgaatatacgtgcacagatagacatacagagagtgaagaagaacgtacggatcaccgaccctgccggagttgcatcgtcgctcatcaaccggccggacatggatcgtataatagcaccactgctagtcatatataagctacatctagtccctcgtttagttactgcatgcatgctaattagtttttaagcagcccagctgcgtacaccgcggggacggtaacagagaggcaaaaggtttccaactttcgatacttgatgtatgtgggcttctttcgtttgcattggtttgattttttttttgtcttgagttatgtatatacatcaagaaatccacatatagtattttcttcgtc

SEQ ID NO: 111194 - protein, 319 aa, Zea mays subsp. mays
  misc_feature (1)..(319): Ceres Seq. ID no. 15224551
  misc_feature (83)..(278): Pfam Name: Arabidopsis proteins of unknown function Pfam Description: Arabidopsis proteins of unknown function
  misc_feature (1)..(319): Homolog of NCBI NO: 15220207 NR Description: expressed protein [Arabidopsis thaliana]
  misc_feature (1)..(319): Homolog of NCBI NO: 30688348 NR Description: expressed protein [Arabidopsis thaliana]
  misc_feature (1)..(319): Homolog of NCBI NO: 28416687 NR Description: At1g70550 [Arabidopsis thaliana]
  misc_feature (1)..(319): Homolog of NCBI NO: 25345697 NR Description: unknown protein F5A18.27 [imported] - Arabidopsis
  misc_feature (1)..(319): Homolog of NCBI NO: 30698726 NR Description: expressed protein [Arabidopsis thaliana]
  misc_feature (1)..(319): Homolog of NCBI NO: 15240622 NR Description: expressed protein [Arabidopsis thaliana]
  misc_feature (1)..(318): Homolog of NCBI NO: 34913794 NR Description: OSJNBa0026J14.25 [Oryza sativa (japonica
  misc_feature (1)..(319): Homolog of NCBI NO: 21389708 NR Description: putative carboxyl-terminal proteinase [Gossypium
  misc_feature (1)..(88): Homolog of NCBI NO: 15528706 NR Description: P0583G08.7 [Oryza sativa (japonica
  misc_feature (73)..(319): Homolog of NCBI NO: 15528706 NR Description: P0583G08.7 [Oryza sativa (japonica
MSKGAAGEEEAGVFPQAWSDGGSKRCPAGTVPIRRTTARDVLRASSARRFGMKARGSSSSNARRDSTSSGHEHAVGYVTGEQFYGAKASLNVWPAKVASAAEFSLSQIWVISGSFGNDLNTIEAGWQVSPELYGDSSPRFFTYWTTDAYQETGCYNLHCSGFVQTNSRIAIGAAISPTSVYNGRQFDISLLIWKDPHRGNWWLQLGSGPLVGYWPSLLFTHLGGHADMVQFGGEVVNSRPSGAHTPRRWAAXHFPXEGSNRAAYFRNLQVVDADNSLVAAAALRLVADRPGCYDIQGGYNTAWGNYFYYGGPGRNVHCP

SEQ ID NO: 111195 - protein, 268 aa, Zea mays subsp. mays
  misc_feature (1)..(268): Ceres Seq. ID no. 15224552
  misc_feature (32)..(227): Pfam Name: Arabidopsis proteins of unknown function Pfam Description: Arabidopsis proteins of unknown function
  misc_feature (1)..(268): Homolog of NCBI NO: 15220207 NR Description: expressed protein [Arabidopsis thaliana]
  misc_feature (1)..(268): Homolog of NCBI NO: 30688348 NR Description: expressed protein [Arabidopsis thaliana]
  misc_feature (1)..(268): Homolog of NCBI NO: 28416687 NR Description: At1g70550 [Arabidopsis thaliana]
  misc_feature (1)..(268): Homolog of NCBI NO: 25345697 NR Description: unknown protein F5A18.27 [imported] - Arabidopsis
  misc_feature (1)..(268): Homolog of NCBI NO: 30698726 NR Description: expressed protein [Arabidopsis thaliana]
  misc_feature (1)..(268): Homolog of NCBI NO: 15240622 NR Description: expressed protein [Arabidopsis thaliana]
  misc_feature (1)..(267): Homolog of NCBI NO: 34913794 NR Description: OSJNBa0026J14.25 [Oryza sativa (japonica
  misc_feature (1)..(268): Homolog of NCBI NO: 21389708 NR Description: putative carboxyl-terminal proteinase [Gossypium
  misc_feature (1)..(37): Homolog of NCBI NO: 15528706 NR Description: P0583G08.7 [Oryza sativa (japonica
  misc_feature (22)..(268): Homolog of NCBI NO: 15528706 NR Description: P0583G08.7 [Oryza sativa (japonica
MKARGSSSSNARRDSTSSGHEHAVGYVTGEQFYGAKASLNVWPAKVASAAEFSLSQIWVISGSFGNDLNTIEAGWQVSPELYGDSSPRFFTYWTTDAYQETGCYNLHCSGFVQTNSRIAIGAAISPTSVYNGRQFDISLLIWKDPHRGNWWLQLGSGPLVGYWPSLLFTHLGGHADMVQFGGEVVNSRPSGAHTPRRWAAXHFPXEGSNRAAYFRNLQVVDADNSLVAAAALRLVADRPGCYDIQGGYNTAWGNYFYYGGPGRNVHCP

SEQ ID NO: 111196 - protein, 171 aa, Zea mays subsp. mays
  misc_feature (1)..(171): Ceres Seq. ID no. 15224553
  misc_feature (102)..(171): Pfam Name: Equine herpesvirus glycoprotein gp2 Pfam Description: Equine herpesvirus glycoprotein gp2
  misc_feature (1)..(171): Homolog of NCBI NO: 15901602 NR Description: cell wall surface anchor family protein
  misc_feature (1)..(171): Homolog of NCBI NO: 15901602 NR Description: cell wall surface anchor family protein
  misc_feature (94)..(171): Homolog of NCBI NO: 13592175 NR Description: ppg3 [Leishmania major]
  misc_feature (1)..(171): Homolog of NCBI NO: 28574039 NR Description: Salivary gland secretion 1 CG3047-PA [Drosophila
  misc_feature (1)..(171): Homolog of NCBI NO: 28574039 NR Description: Salivary gland secretion 1 CG3047-PA [Drosophila
  misc_feature (37)..(171): Homolog of NCBI NO: 38077118 NR Description: similar to sublingual apomucin [Mus musculus]
  misc_feature (1)..(171): Homolog of NCBI NO: 38077118 NR Description: similar to sublingual apomucin [Mus musculus]
  misc_feature (1)..(171): Homolog of NCBI NO: 38077118 NR Description: similar to sublingual apomucin [Mus musculus]
  misc_feature (89)..(171): Homolog of NCBI NO: 11360494 NR Description: antifreeze glycopeptide AFGP polyprotein
  misc_feature (54)..(171): Homolog of NCBI NO: 11360494 NR Description: antifreeze glycopeptide AFGP polyprotein
MSSSSGCNRGRAVLPVTASLVPFLLLLLLLLVVSCPAALVVSATHTHVHGHGGATAGAARASFRAGDEREAYARIMARMARMDKDSNMTIQVPSLPCSCSCSSAPAVRARCRFRLPAKQACKSTTSLSFTYSSSFVVSCRACVCARVCRAPTATSSTACRRTCSRRSTTPG

SEQ ID NO: 111197 - DNA, 1438 bp, Zea mays subsp. mays
  misc_feature (1)..(1438): Ceres Seq. ID no. 13624551
  misc_feature: MA Experiment ID: 108544 Result: Down-regulated in Transcription
  misc_feature: MA Experiment ID: 108687 Result: Down-regulated in Transcription
  misc_feature: MA Experiment 108687 PARAMETER Experiment Name: Zm_Embryos-Flowers__P Parameter: Tissue Value: Embryo vs. Aerial+
  misc_feature: MA Experiment ID: 20000478 Result: Down-regulated in Transcription
  misc_feature: MA Experiment 20000478 PARAMETER Experiment Name: Zm_5mM_SA_P Parameter: Age (day) Value: 11
  misc_feature: MA Experiment 20000478 PARAMETER Experiment Name: Zm_5mM_SA_P Parameter: Organism Value: Zea mays
  misc_feature: MA Experiment 20000478 PARAMETER Experiment Name: Zm_5mM_SA_P Parameter: Plant Line Value: 35A19
  misc_feature: MA Experiment 20000478 PARAMETER Experiment Name: Zm_5mM_SA_P Parameter: Timepoint (hr) Value: 72
  misc_feature: MA Experiment 20000478 PARAMETER Experiment Name: Zm_5mM_SA_P Parameter: Tissue Value: Aerial
  misc_feature: MA Experiment 20000478 PARAMETER Experiment Name: Zm_5mM_SA_P Parameter: Treatment Value: 5mM SA vs. No Treatment
  misc_feature: MA Experiment ID: 20000479 Result: Down-regulated in Transcription
  misc_feature: MA Experiment 20000479 PARAMETER Experiment Name: Zm_Drought_P Parameter: Age (day) Value: 10
  misc_feature: MA Experiment 20000479 PARAMETER Experiment Name: Zm_Drought_P Parameter: Organism Value: Zea mays
  misc_feature: MA Experiment 20000479 PARAMETER Experiment Name: Zm_Drought_P Parameter: Plant Line Value: 35A19
  misc_feature: MA Experiment 20000479 PARAMETER Experiment Name: Zm_Drought_P Parameter: Timepoint (hr) Value: 48
  misc_feature: MA Experiment 20000479 PARAMETER Experiment Name: Zm_Drought_P Parameter: Tissue Value: Aerial
  misc_feature: MA Experiment 20000479 PARAMETER Experiment Name: Zm_Drought_P Parameter: Treatment Value: Drought vs. No Drought
  misc_feature: MA Experiment ID: 20000480 Result: Down-regulated in Transcription
  misc_feature: MA Experiment 20000480 PARAMETER Experiment Name: Zm_Drought_P Parameter: Age (day) Value: 11
  misc_feature: MA Experiment 20000480 PARAMETER Experiment Name: Zm_Drought_P Parameter: Organism Value: Zea mays
  misc_feature: MA Experiment 20000480 PARAMETER Experiment Name: Zm_Drought_P Parameter: Plant Line Value: 35A19
  misc_feature: MA Experiment 20000480 PARAMETER Experiment Name: Zm_Drought_P Parameter: Timepoint (hr) Value: 72
  misc_feature: MA Experiment 20000480 PARAMETER Experiment Name: Zm_Drought_P Parameter: Tissue Value: Aerial
  misc_feature: MA Experiment 20000480 PARAMETER Experiment Name: Zm_Drought_P Parameter: Treatment Value: Drought vs. No Drought
  misc_feature: MA Experiment ID: 20000629 Result: Up-regulated in Transcription
  misc_feature: MA Experiment 20000629 PARAMETER Experiment Name: Zm_Herbicide-Treatments_P Parameter: Timepoint (hr) Value: 12
  misc_feature: MA Experiment 20000629 PARAMETER Experiment Name: Zm_Herbicide-Treatments_P Parameter: Tissue Value: Aerial
  misc_feature: MA Experiment 20000629 PARAMETER Experiment Name: Zm_Herbicide-Treatments_P Parameter: Treatment Value: Trimec vs. No Treatment
  misc_feature: MA Experiment ID: 20000633 Result: Up-regulated in Transcription
  misc_feature: MA Experiment 20000633 PARAMETER Experiment Name: Zm_Herbicide-Treatments_P Parameter: Timepoint (hr) Value: 4
  misc_feature: MA Experiment 20000633 PARAMETER Experiment Name: Zm_Herbicide-Treatments_P Parameter: Tissue Value: Aerial
  misc_feature: MA Experiment 20000633 PARAMETER Experiment Name: Zm_Herbicide-Treatments_P Parameter: Treatment Value: Trimec vs. No Treatment
cagacggactcacagctcgcagcacctgcaccacttgacaaccagccagctagctaaccaaccggcggagccaagaacaagcaagagacaacttgccctgtccaggcagcatgtgcaactccaacgtcaagtccgcgggcgtcgcccagatcgacggccgcccggtgctgcagccggcgggcaaccgcgtggcggcgccggacgccgcccgcccgctcaagaagtccctgcacaagtccttctccatgccgccttcctacgacaacaatgccaccgtgcccgcccgtcccgcccctgccgagaacacccgtgcggcgccggcgccgccttctctgctgcctcctacgacgccggccccggccccggccgccgcgagggcgaccaaggcggcgggcgccgtgcccgcggagaagcccaggtccaaggccaggaagcccggcgccgtgctgccggtggcgacgttcgcggcgccagaggcgttcgagccggcggggagcatcgccgcggcgcggcgggagcatgccgcgcaggcgcaggcgcagcgcaagtcgcggatcgcgcactacggccgcaccgcgtccttctcccgggtggagggccgagtcggcgccaccgccacggccgagccggccgtcccagcctcccccaccaccgggctcgacgagaagcgctgtagcttcatcacgccctactctgaccccttgtatgtggcgtaccacgacgaggagtggggagtgcccgtgcacgacgacgagttgctgttcgagatgctcacactgtctggcgtgcaagtcggggccgattggacttccatcctcaagaaaagacacgtctacagggaggcgttctccggcttcgacgtggatgcggtcgccaagtacaccgagaagcagatggcgtcgctgagcgccgactacgggctggatttgggcaccgtcagaggaaccgtcaacaacgcctgccggattcttgaggtgcggagggacttttgctcgctggacaagtacgtgtgggcgttcgtgaacaacaagccgctgtcgccgagctacaagtacagccggaagatcccggtgaagacgtccaagtcggagtccatcagcaaggacatggtccggcgcggcttccgcttcgtcggccccactgtcatccactccttcatggaggcggtcgggctcaccaacgaccacctcgtctcgtgcccgcgcccacgcgtctgctccgccgccgcccgcgtaaataactgattctgctgacgaccaccaagcaaaacacaagagggaattatctaaggacaaccaagacgagagagagagagagaggtagcagtagtaatatacaaaagagagtgttggcggtttgcatgtgtgtatgatgacccagtgtgcttgtgtagattaattacggcctctgattagcgaattgtttaaacacaataaag

SEQ ID NO: 111198 - protein, 377 aa, Zea mays subsp. mays
  misc_feature (1)..(377): Ceres Seq. ID no. 13624552
  misc_feature (194)..(368): Pfam Name: Methyladenine glycosylase Pfam Description: Methyladenine glycosylase
  misc_feature (77)..(373): Homolog of NCBI NO: 15218379 NR Description: expressed protein [Arabidopsis thaliana]
  misc_feature (168)..(369): Homolog of NCBI NO: 15242914 NR Description: expressed protein [Arabidopsis thaliana]
  misc_feature (58)..(377): Homolog of NCBI NO: 38345034 NR Description: OSJNBa0029H02.18 [Oryza sativa (japonica
  misc_feature (28)..(283): Homolog of NCBI NO: 34908920 NR Description: P0691E06.10 [Oryza sativa (japonica
  misc_feature (57)..(373): Homolog of NCBI NO: 21592537 NR Description: unknown [Arabidopsis thaliana]
  misc_feature (57)..(373): Homolog of NCBI NO: 15241554 NR Description: expressed protein [Arabidopsis thaliana]
  misc_feature (90)..(373): Homolog of NCBI NO: 21536975 NR Description: unknown [Arabidopsis thaliana]
  misc_feature (90)..(373): Homolog of NCBI NO: 18399721 NR Description: expressed protein [Arabidopsis thaliana]
  misc_feature (194)..(373): Homolog of NCBI NO: 34908920 NR Description: P0691E06.10 [Oryza sativa (japonica
  misc_feature (1)..(196): Homolog of NCBI NO: 34908920 NR Description: P0691E06.10 [Oryza sativa (japonica
MCNSNVKSAGVAQIDGRPVLQPAGNRVAAPDAARPLKKSLHKSFSMPPSYDNNATVPARPAPAENTRAAPAPPSLLPPTTPAPAPAAARATKAAGAVPAEKPRSKARKPGAVLPVATFAAPEAFEPAGSIAAARREHAAQAQAQRKSRIAHYGRTASFSRVEGRVGATATAEPAVPASPTTGLDEKRCSFITPYSDPLYVAYHDEEWGVPVHDDELLFEMLTLSGVQVGADWTSILKKRHVYREAFSGFDVDAVAKYTEKQMASLSADYGLDLGTVRGTVNNACRILEVRRDFCSLDKYVWAFVNNKPLSPSYKYSRKIPVKTSKSESISKDMVRRGFRFVGPTVIHSFMEAVGLTNDHLVSCPRPRVCSAAARVNN

SEQ ID NO: 111199 - protein, 332 aa, Zea mays subsp. mays
  misc_feature (1)..(332): Ceres Seq. ID no. 13624553
  misc_feature (149)..(323): Pfam Name: Methyladenine glycosylase Pfam Description: Methyladenine glycosylase
  misc_feature (32)..(328): Homolog of NCBI NO: 15218379 NR Description: expressed protein [Arabidopsis thaliana]
  misc_feature (123)..(324): Homolog of NCBI NO: 15242914 NR Description: expressed protein [Arabidopsis thaliana]
  misc_feature (13)..(332): Homolog of NCBI NO: 38345034 NR Description: OSJNBa0029H02.18 [Oryza sativa (japonica
  misc_feature (1)..(238): Homolog of NCBI NO: 34908920 NR Description: P0691E06.10 [Oryza sativa (japonica
  misc_feature (12)..(328): Homolog of NCBI NO: 21592537 NR Description: unknown [Arabidopsis thaliana]
  misc_feature (12)..(328): Homolog of NCBI NO: 15241554 NR Description: expressed protein [Arabidopsis thaliana]
  misc_feature (45)..(328): Homolog of NCBI NO: 21536975 NR Description: unknown [Arabidopsis thaliana]
  misc_feature (45)..(328): Homolog of NCBI NO: 18399721 NR Description: expressed protein [Arabidopsis thaliana]
  misc_feature (149)..(328): Homolog of NCBI NO: 34908920 NR Description: P0691E06.10 [Oryza sativa (japonica
  misc_feature (1)..(151): Homolog of NCBI NO: 34908920 NR Description: P0691E06.10 [Oryza sativa (japonica
MPPSYDNNATVPARPAPAENTRAAPAPPSLLPPTTPAPAPAAARATKAAGAVPAEKPRSKARKPGAVLPVATFAAPEAFEPAGSIAAARREHAAQAQAQRKSRIAHYGRTASFSRVEGRVGATATAEPAVPASPTTGLDEKRCSFITPYSDPLYVAYHDEEWGVPVHDDELLFEMLTLSGVQVGADWTSILKKRHVYREAFSGFDVDAVAKYTEKQMASLSADYGLDLGTVRGTVNNACRILEVRRDFCSLDKYVWAFVNNKPLSPSYKYSRKIPVKTSKSESISKDMVRRGFRFVGPTVIHSFMEAVGLTNDHLVSCPRPRVCSAAARVNN

SEQ ID NO: 111200 - protein, 224 aa, Zea mays subsp. mays
  misc_feature (1)..(224): Ceres Seq. ID no. 13624554
RRTHSSQHLHHLTTSQLANQPAEPRTSKRQLALSRQHVQLQRQVRGRRPDRRPPGAAAGGQPRGGAGRRPPAQEVPAQVLLHAAFLRQQCHRARPSRPCREHPCGAGAAFSAASYDAGPGPGRREGDQGGGRRARGEAQVQGQEARRRAAGGDVRGARGVRAGGEHRRGAAGACRAGAGAAQVADRALRPHRVLLPGGGPSRRHRHGRAGRPSLPHHRARREAL

SEQ ID NO: 111201 - DNA, 1878 bp, Zea mays subsp. mays
  misc_feature (1)..(1878): Ceres Seq. ID no. 15177573
ctcctcttctccagcgtccgatccccgtttcccacgaatcccactctactcctccatctgcggcctcctccattctcctgcccccttctctctcctccttgcttccccgcgcgcacgtttttacaagggtttcggcggaggcgaccggtcgccgacgatggcggacgacagcggcagccacgagggcggcggcggcggcggcgacgacgyccgggagcaggacatgttcttgcctattaccaacatcacccggatcatgaagaaggccgtcccggccaatgccaagatcactaaggacgctaaggagataatgcagtactgcgtctccgagttcatattctttgtgacgagcgaggcgagggagaaaagcaaaaaggaggagcgtaagagaatcaacgtggacgatttgctctggtcagtggatacggcaggattcgagtacgtggagcttctcaggatttgcctacaaaagtacagagagacggggaagtgcacggtgtacacgacgtgatcaggttattaacctgtaacaccttagtgagaaaacattgagcacttggcaggtagtacgcaatcagtttaagaaactgcaaactgcaagctcctgggcaactagtgttgttgctgtgaacaaggtgatagtaaggtgtctacaaaggctggcgagggctctttaaataaggatgcagttagtacccatggtggcaccagtaactcaagcaaccagcatggagtttacaaccaagagatggtaccaccacagcatggagttaacaacaaagagatggacgatatgtcgccacagttggttcaccatggagtttacaaccttgagatggacaatatgctgtcacagttggatcaacatgaagtttacaaccaagggatggatgatatgccagcacatttggttcaacatggagtttataaccaagggatatgcgatatgacgccacagttggttcaacatggagtttacaaccaagggatgagcgatatgccaccaaagcatggagtttacaaccaagcgatgaatgatatgccgacacagttagttcaacatggagtttacaaccaagagatggatgatatgctgccacagttggttcaacatggagtttacaaccaagggatgagtgatatgtcgccacagttggttcaacatggaggttacaaccaagagatggatgatatgacgccacagttggttccgcacggagtttacaaccaagggatgagcgatatgctgccgcagttggttcaacatggagttcacaaccaagagatggacgatatgccgccacagttggttcaacatggagtttacaaccaagagatcaatgatatgcagccacagttggttcaacatggactttacaatggagaaatggatgatatgccgccacagttggttcaacatggagttgacaaccaagagatggacgatatgccaccacatttggtccaacatggagtttacaaccaagaggtggacaatatggtgccacatttggttcagcatggagtttacaaccaagggatgagcgatatgctgccacagttggttccacatggagtttacaaccaagagatggataatataacgccacagttggttcagcatggagtttacaaccaagggatggacgatatgccgccacagttggttcaacatggagtttgcaaccaagggatggtcaatatgcaactgcagtttgttcaacatggagtttgcaaccaagggatggacgatatacctccacagctaagagatgttaacctactagaagatactggggtaaataaccttggacccgcttttttaagagaatgtgagttgtgccattctatttaattatataattctttggtttaagc

SEQ ID NO: 111202 - protein, 368 aa, Zea mays subsp. mays
  misc_feature (1)..(368): Ceres Seq. ID no. 15177574
  misc_feature (106)..(356): Homolog of NCBI NO: 37545275 NR Description: similar to acidic repetitive protein arp1 -
  misc_feature (75)..(338): Homolog of NCBI NO: 37545275 NR Description: similar to acidic repetitive protein arp1 -
  misc_feature (89)..(356): Homolog of NCBI NO: 37545275 NR Description: similar to acidic repetitive protein arp1 -
MVPPQHGVNNKEMDDMSPQLVHHGVYNLEMDNMLSQLDQHEVYNQGMDDMPAHLVQHGVYNQGICDMTPQLVQHGVYNQGMSDMPPKHGVYNQAMNDMPTQLVQHGVYNQEMDDMLPQLVQHGVYNQGMSDMSPQLVQHGGYNQEMDDMTPQLVPHGVYNQGMSDMLPQLVQHGVHNQEMDDMPPQLVQHGVYNQEINDMQPQLVQHGLYNGEMDDMPPQLVQHGVDNQEMDDMPPHLVQHGVYNQEVDNMVPHLVQHGVYNQGMSDMLPQLVPHGVYNQEMDNITPQLVQHGVYNQGMDDMPPQLVQHGVCNQGMVNMQLQFVQHGVCNQGMDDIPPQLRDVNLLEDTGVNNLGPAFLRECELCHSI

SEQ ID NO: 111203 - protein, 356 aa, Zea mays subsp. mays
  misc_feature (1)..(356): Ceres Seq. ID no. 15177575
  misc_feature (94)..(344): Homolog of NCBI NO: 37545275 NR Description: similar to acidic repetitive protein arp1 -
  misc_feature (63)..(326): Homolog of NCBI NO: 37545275 NR Description: similar to acidic repetitive protein arp1 -
  misc_feature (77)..(344): Homolog of NCBI NO: 37545275 NR Description: similar to acidic repetitive protein arp1 -
MDDMSPQLVHHGVYNLEMDNMLSQLDQHEVYNQGMDDMPAHLVQHGVYNQGICDMTPQLVQHGVYNQGMSDMPPKHGVYNQAMNDMPTQLVQHGVYNQEMDDMLPQLVQHGVYNQGMSDMSPQLVQHGGYNQEMDDMTPQLVPHGVYNQGMSDMLPQLVQHGVHNQEMDDMPPQLVQHGVYNQEINDMQPQLVQHGLYNGEMDDMPPQLVQHGVDNQEMDDMPPHLVQHGVYNQEVDNMVPHLVQHGVYNQGMSDMLPQLVPHGVYNQEMDNITPQLVQHGVYNQGMDDMPPQLVQHGVCNQGMVNMQLQFVQHGVCNQGMDDIPPQLRDVNLLEDTGVNNLGPAFLRECELCHSI

SEQ ID NO: 111204 - protein, 353 aa, Zea mays subsp. mays
  misc_feature (1)..(353): Ceres Seq. ID no. 15177576
  misc_feature (91)..(341): Homolog of NCBI NO: 37545275 NR Description: similar to acidic repetitive protein arp1 -
  misc_feature (60)..(323): Homolog of NCBI NO: 37545275 NR Description: similar to acidic repetitive protein arp1 -
  misc_feature (74)..(341): Homolog of NCBI NO: 37545275 NR Description: similar to acidic repetitive protein arp1 -
MSPQLVHHGVYNLEMDNMLSQLDQHEVYNQGMDDMPAHLVQHGVYNQGICDMTPQLVQHGVYNQGMSDMPPKHGVYNQAMNDMPTQLVQHGVYNQEMDDMLPQLVQHGVYNQGMSDMSPQLVQHGGYNQEMDDMTPQLVPHGVYNQGMSDMLPQLVQHGVHNQEMDDMPPQLVQHGVYNQEINDMQPQLVQHGLYNGEMDDMPPQLVQHGVDNQEMDDMPPHLVQHGVYNQEVDNMVPHLVQHGVYNQGMSDMLPQLVPHGVYNQEMDNITPQLVQHGVYNQGMDDMPPQLVQHGVCNQGMVNMQLQFVQHGVCNQGMDDIPPQLRDVNLLEDTGVNNLGPAFLRECELCHSI

SEQ ID NO: 111205 - DNA, 863 bp, Zea mays subsp. mays
  misc_feature (1)..(863): Ceres Seq. ID no. 12589281
acaaccacactgattgaggcagttcgtgaacaagccgtcacacccactcgctgctgaaccaggagttccatccatcgccgctcactcccacgatcagcgtcgtcgcttatccgcaaatatctctcttcctctttgcagtcggcaccatgggttccgacttcaaatcgatccccttgatcgatatcggcccgcttgtcgaaaagattgatgatccaagcatggccaacgataaggatttactgcaggttgtccggttactggatgatgcttgcaaggaggccggattcttctatgtgaaaggccatggtattgatgagtcactgatgagggaagtcaggaatgtaacccgtgaattctttcagcttccttatgaggaaaaattaaaaattaagatgacaccgagtaccacggagtttctgccgtacagctggagagaaggctccacgagcttctccacgaaagaaaccgggaccggattgaggagctggaagccgcgttgcggcgtgcggagaagaagctcgttgagaaagaaatggaggtgtccctgtggaaggacacggctaagtttgcgttgagacaggaggacaaggagttgcaatgagcatcgaatttctcctgttctctttcagtcgtacaactcttgcgcacgatttcatcggctgttcatgatcaccgaccgccgaaggaggattttggtcaaacaaggtttgccatggcgaactgcggtttgtggaagatatagtcaacctgttcataccaaagtttagtgctagcatattagatctccagtgaacgttttgggctccggtaaaaatcagtagaatgctgtgtaacagttaagttagcctactggtgtacggatc

SEQ ID NO: 111206 - protein, 142 aa, Zea mays subsp. mays
  misc_feature (1)..(142): Ceres Seq. ID no. 12589282
  misc_feature (6)..(86): Homolog of NCBI NO: 15229181 NR Description: putative protein; protein id: At3g49630.1
  misc_feature (1)..(106): Homolog of NCBI NO: 19423910 NR Description: unknown protein [Arabidopsis thaliana]
  misc_feature (1)..(106): Homolog of NCBI NO: 22331716 NR Description: oxidoreductase (din11), putative; protein id:
  misc_feature (1)..(106): Homolog of NCBI NO: 11255891 NR Description: hypothetical protein T9C5.210 - Arabidopsis
  misc_feature (1)..(106): Homolog of NCBI NO: 10834554 NR Description: 2-oxoacid-dependent oxidase [Arabidopsis thaliana]
  misc_feature (1)..(86): Homolog of NCBI NO: 18409039 NR Description: flavonol synthase - like protein
  misc_feature (1)..(86): Homolog of NCBI NO: 21554579 NR Description: flavonol synthase-like protein [Arabidopsis
  misc_feature (1)..(86): Homolog of NCBI NO: 11255902 NR Description: flavonol synthase-like protein - Arabidopsis
  misc_feature (1)..(86): Homolog of NCBI NO: 6984228 NR Description: putative flavonol synthase-like protein
  misc_feature (1)..(118): Homolog of NCBI NO: 28829512 NR Description: similar to Pseudomonas aeruginosa. Probable
MGSDFKSIPLIDIGPLVEKIDDPSMANDKDLLQVVRLLDDACKEAGFFYVKGHGIDESLMREVRNVTREFFQLPYEEKLKIKMTPSTTEFLPYSWREGSTSFSTKETGTGLRSWKPRCGVRRRSSLRKKWRCPCGRTRLSLR

SEQ ID NO: 111207 - protein, 118 aa, Zea mays subsp. mays
  misc_feature (1)..(118): Ceres Seq. ID no. 12589283
  misc_feature (1)..(62): Homolog of NCBI NO: 6984228 NR Description: putative flavonol synthase-like protein
  misc_feature (1)..(94): Homolog of NCBI NO: 28829512 NR Description: similar to Pseudomonas aeruginosa. Probable
  misc_feature (1)..(62): Homolog of NCBI NO: 15229181 NR Description: putative protein; protein id: At3g49630.1
  misc_feature (1)..(82): Homolog of NCBI NO: 19423910 NR Description: unknown protein [Arabidopsis thaliana]
  misc_feature (1)..(82): Homolog of NCBI NO: 22331716 NR Description: oxidoreductase (din11), putative; protein id:
  misc_feature (1)..(82): Homolog of NCBI NO: 11255891 NR Description: hypothetical protein T9C5.210 - Arabidopsis
  misc_feature (1)..(82): Homolog of NCBI NO: 10834554 NR Description: 2-oxoacid-dependent oxidase [Arabidopsis thaliana]
  misc_feature (1)..(62): Homolog of NCBI NO: 18409039 NR Description: flavonol synthase - like protein
  misc_feature (1)..(62): Homolog of NCBI NO: 21554579 NR Description: flavonol synthase-like protein [Arabidopsis
  misc_feature (1)..(62): Homolog of NCBI NO: 11255902 NR Description: flavonol synthase-like protein - Arabidopsis
MANDKDLLQVVRLLDDACKEAGFFYVKGHGIDESLMREVRNVTREFFQLPYEEKLKIKMTPSTTEFLPYSWREGSTSFSTKETGTGLRSWKPRCGVRRRSSLRKKWRCPCGRTRLSLR

SEQ ID NO: 111208 - protein, 83 aa, Zea mays subsp. mays
  misc_feature (1)..(83): Ceres Seq. ID no. 12589284
  misc_feature (1)..(59): Homolog of NCBI NO: 28829512 NR Description: similar to Pseudomonas aeruginosa. Probable
  misc_feature (1)..(27): Homolog of NCBI NO: 15229181 NR Description: putative protein; protein id: At3g49630.1
  misc_feature (1)..(47): Homolog of NCBI NO: 22331716 NR Description: oxidoreductase (din11), putative; protein id:
  misc_feature (1)..(47): Homolog of NCBI NO: 19423910 NR Description: unknown protein [Arabidopsis thaliana]
  misc_feature (1)..(47): Homolog of NCBI NO: 11255891 NR Description: hypothetical protein T9C5.210 - Arabidopsis
  misc_feature (1)..(47): Homolog of NCBI NO: 10834554 NR Description: 2-oxoacid-dependent oxidase [Arabidopsis thaliana]
  misc_feature (1)..(27): Homolog of NCBI NO: 21554579 NR Description: flavonol synthase-like protein [Arabidopsis
  misc_feature (1)..(27): Homolog of NCBI NO: 18409039 NR Description: flavonol synthase - like protein
  misc_feature (1)..(27): Homolog of NCBI NO: 11255902 NR Description: flavonol synthase-like protein - Arabidopsis
  misc_feature (1)..(27): Homolog of NCBI NO: 6984228 NR Description: putative flavonol synthase-like protein
MREVRNVTREFFQLPYEEKLKIKMTPSTTEFLPYSWREGSTSFSTKETGTGLRSWKPRCGVRRRSSLRKKWRCPCGRTRLSLR

SEQ ID NO: 111209 - DNA, 1259 bp, Zea mays subsp. mays
  misc_feature (1)..(1259): Ceres Seq. ID no. 15175746
acaaccaagaggtaagagccaaccgagcaacgaacgcccaggcacacacgagacacgacacgaaccaggcaaccagttgccgagggaggaaccctagcggaacactgtgcaggtgacggcggcgcgctaccggtgacgggggatacggaggcatcgcccccctcggcccctcctccatccccggcgcggcggcgccagcagccggcctgcaggtttccacgtcgtccatggcgctcgtcgtgatgtgtgggcagccgtgcagcggtaaaacatcagccgccgcttgccttgctgtggcgctgcactcctcctcgcctgaccttactgtccgaatcatcgatgagtcatccctccatctcaggcgcaacgatagctacaaagatatggttgtggagaaaaacttgagagggcttcttagatcagaagttgacaggtctgtgtcacgcgacagcataattattgtcgactcgttgaataatattaaggggtaccgctatgagttgtggtgtcttgcgcgtgcatctggtgtaagatattgtgtgcttttttgtgatacagaagtggaccattgtaaggaatggaacaacaaccgccaggagaaaggggaaccagcatatgatactaatatatttgaagatcttgtaagtagatttgagaagccagatagacgcaatcgttgggattcccctctttttgaattgttcccatctagagatgaattagtggaaacagctcctgatattgctgaagctgtgtcatatttgacaaaaaaagtggattccaaaacaagagatgtaaaagttctccagcctacaatagccactcagacggtgcgaacaacagaggctaattccctctatgagatggacaaggcaacgcaggaggtggtcaatgcaattgttgaagcacagtcatgcggtcttgggcttgctgtgaataagatctccattggacccaacttgccaactatcaagcttgagagatctgttggcctacctgagctcagaagcctgcggagaactttcatcaagctggcagggcagtacagtctgagtgggccaccaccaccgacagatgctgacagcgcaaagaggatgtttgtcgactacttaaaccgtgaacttggtgcatgataattttcattcgcctgcgttgcatgaacactatgtagcatgtggttaactttggggaatagataattgaagacaacttgattgtacttgttccttgttttgtggaaatgtttatatgactatctt

SEQ ID NO: 111210 - protein, 301 aa, Zea mays subsp. mays
  misc_feature (1)..(301): Ceres Seq. ID no. 15175747
  misc_feature (1)..(108): Homolog of NCBI NO: 19923939 NR Description: hypothetical protein BC012173 [Homo sapiens]
  misc_feature (130)..(267): Homolog of NCBI NO: 19923939 NR Description: hypothetical protein BC012173 [Homo sapiens]
  misc_feature (1)..(299): Homolog of NCBI NO: 6322739 NR Description: Protein involved in resistance to K. lactis
  misc_feature (1)..(108): Homolog of NCBI NO: 20270210 NR Description: RIKEN cDNA 1110001A12 [Mus musculus]
  misc_feature (123)..(267): Homolog of NCBI NO: 20270210 NR Description: RIKEN cDNA 1110001A12 [Mus musculus]
  misc_feature (1)..(299): Homolog of NCBI NO: 39583457 NR Description: Hypothetical protein CBG21524 [Caenorhabditis
  misc_feature (1)..(299): Homolog of NCBI NO: 33300521 NR Description: Hypothetical protein Y57G11C.43 [Caenorhabditis
  misc_feature (1)..(233): Homolog of NCBI NO: 28850452 NR Description: similar to similarity to S. cerevisiae kti12
  misc_feature (1)..(300): Homolog of NCBI NO: 23504265 NR Description: DRL1 protein [Arabidopsis thaliana]
  misc_feature (1)..(300): Homolog of NCBI NO: 15222972 NR Description: expressed protein [Arabidopsis thaliana]
MALVVMCGQPCSGKTSAAACLAVALHSSSPDLTVRIIDESSLHLRRNDSYKDMVVEKNLRGLLRSEVDRSVSRDSIIIVDSLNNIKGYRYELWCLARASGVRYCVLFCDTEVDHCKEWNNNRQEKGEPAYDTNIFEDLVSRFEKPDRRNRWDSPLFELFPSRDELVETAPDIAEAVSYLTKKVDSKTRDVKVLQPTIATQTVRTTEANSLYEMDKATQEVVNAIVEAQSCGLGLAVNKISIGPNLPTIKLERSVGLPELRSLRRTFIKLAGQYSLSGPPPPTDADSAKRMFVDYLNRELGA

SEQ ID NO: 111211 - protein, 296 aa, Zea mays subsp. mays
  misc_feature (1)..(296): Ceres Seq. ID no. 15175748
  misc_feature (1)..(103): Homolog of NCBI NO: 19923939 NR Description: hypothetical protein BC012173 [Homo sapiens]
  misc_feature (125)..(262): Homolog of NCBI NO: 19923939 NR Description: hypothetical protein BC012173 [Homo sapiens]
  misc_feature (1)..(294): Homolog of NCBI NO: 6322739 NR Description: Protein involved in resistance to K. lactis
  misc_feature (1)..(103): Homolog of NCBI NO: 20270210 NR Description: RIKEN cDNA 1110001A12 [Mus musculus]
  misc_feature (118)..(262): Homolog of NCBI NO: 20270210 NR Description: RIKEN cDNA 1110001A12 [Mus musculus]
  misc_feature (1)..(294): Homolog of NCBI NO: 39583457 NR Description: Hypothetical protein CBG21524 [Caenorhabditis
  misc_feature (1)..(294): Homolog of NCBI NO: 33300521 NR Description: Hypothetical protein Y57G11C.43 [Caenorhabditis
  misc_feature (1)..(228): Homolog of NCBI NO: 28850452 NR Description: similar to similarity to S. cerevisiae kti12
  misc_feature (1)..(295): Homolog of NCBI NO: 23504265 NR Description: DRL1 protein [Arabidopsis thaliana]
  misc_feature (1)..(295): Homolog of NCBI NO: 15222972 NR Description: expressed protein [Arabidopsis thaliana]
MCGQPCSGKTSAAACLAVALHSSSPDLTVRIIDESSLHLRRNDSYKDMVVEKNLRGLLRSEVDRSVSRDSIIIVDSLNNIKGYRYELWCLARASGVRYCVLFCDTEVDHCKEWNNNRQEKGEPAYDTNIFEDLVSRFEKPDRRNRWDSPLFELFPSRDELVETAPDIAEAVSYLTKKVDSKTRDVKVLQPTIATQTVRTTEANSLYEMDKATQEVVNAIVEAQSCGLGLAVNKISIGPNLPTIKLERSVGLPELRSLRRTFIKLAGQYSLSGPPPPTDADSAKRMFVDYLNRELGA

SEQ ID NO: 111212 - protein, 249 aa, Zea mays subsp. mays; identical to SEQ ID NO: 111157
  misc_feature (1)..(249): Ceres Seq. ID no. 15175749
  misc_feature (1)..(56): Homolog of NCBI NO: 19923939 NR Description: hypothetical protein BC012173 [Homo sapiens]
  misc_feature (78)..(215): Homolog of NCBI NO: 19923939 NR Description: hypothetical protein BC012173 [Homo sapiens]
  misc_feature (1)..(247): Homolog of NCBI NO: 6322739 NR Description: Protein involved in resistance to K. lactis
  misc_feature (1)..(56): Homolog of NCBI NO: 20270210 NR Description: RIKEN cDNA 1110001A12 [Mus musculus]
  misc_feature (71)..(215): Homolog of NCBI NO: 20270210 NR Description: RIKEN cDNA 1110001A12 [Mus musculus]
  misc_feature (1)..(247): Homolog of NCBI NO: 39583457 NR Description: Hypothetical protein CBG21524 [Caenorhabditis
  misc_feature (1)..(247): Homolog of NCBI NO: 33300521 NR Description: Hypothetical protein Y57G11C.43 [Caenorhabditis
  misc_feature (1)..(181): Homolog of NCBI NO: 28850452 NR Description: similar to similarity to S. cerevisiae kti12
  misc_feature (1)..(248): Homolog of NCBI NO: 23504265 NR Description: DRL1 protein [Arabidopsis thaliana]
  misc_feature (1)..(248): Homolog of NCBI NO: 15222972 NR Description: expressed protein [Arabidopsis thaliana]

SEQ ID NO: 111213 - DNA, 2542 bp, Zea mays subsp. mays
  misc_feature (1)..(2542): Ceres Seq. ID no. 15180024
attacctagaacatcctaatcaaaaaaaaaaaacaatttctttccttttttttctctctctcttatctgcaaaaaaaattcgttctgctaatttcggagctcaagacgctcgccccatctctcctctcgtcgtctttctcatcgatcctgccaaacaaaaaaacgaaaaaaaatactcttgctgttgatagagcgagtgaaaaaaaagaatagtctcagaaccatctagagacagcggcccgtggagcggacagcggagcgagcaagcctgcgccgccgccggcgtcctcccgaagtagaagctgttctgatccacagctctcgattccggaaggagttggtcaagaactggggatcctgagttgaatatgatatcaaatccggtggactggtatagtttcggacccggatagaattggtagggatgccagattggagggtgcgtgagtttgaaggtaaattcactgatgagtttgcccacagtaacaacaacaaacatgaaagtggagttgaggctcctggtgtcactagtagtaagaagttgaagcatgcagttgccggtgagaaaattcaaggtgtcatccctggaataaatagctcagatccacagaaatgtaattcagagaacatccaacatgagaacaggatagtatcccagaatataaacagtgctggtgactgcattggagactgcaaagacagctccaacgccttctcttcaagggaagaaaatacaatcgctgaaaccagatgtccaacggatgactggaactcctgtcagtttgcactgagcaatggttcatccattctcaataaccacattgctccacaggatagcctcacttatggagataatgatctaaactacattgattggcctggcattgacaattttgaggatgttgacacattattcaggagatctgatttcacatatgatccgcagcagctggagaatacagatgggttatcttggcttccttcttcagatgctgtttactcttctgatgttgctttgcagcaagggtttgactcgtcttattccgattatgatattctggatgatctctcagcattccaatgtgcagaagataaatcactaccctcagttggtccttcatcggatttatgtgataatcaattcaatgatacctatctgttcagtgagcagaagaatgcgaatgcatatggtgaacagatataccaagaggatgtgatggagttgttgcccactgaccagatatgcagtggacatgaaaacattgatatgttgcagggtggaaaccagtattcatctgaacatacaattcaaggtattgaagacaagaaattttctatagcatcaacttctcagctgagctcctctcagaatttactgaagcaaaggcaccacttagattccaattcaccaagcaacattacttatgaggcctatgaagaaaagttcggtccatctagtggttcttttgcacaaaggaattcaaaagtgcagaagaaaactatgaacatgcaaccaacacagccgacaaatgataatgtcatgaacagacatcctcaaacattgacaagaagtgcttcttatccttgtgagaacaatgaatctgaaagaagaggattagggaaaagaactctgggggatcctaagttacaatgggtacttcaatggtagtggatggctcatttgtatcatccatgtcctctgatatctctgttgaagaaagtagctttcgacaactgcagaatgctgttagtcagctggatgtgcaaaccaaattgtgcattagagatggtttataccgattggcacgaagtgcgcagcacaggcaagttattccaaatatgatgagcagcaatgaagacaacccggatataaaggatctgcagaatgcagaaactttgcgcaagttcgtcgatcctcggagcatcgagacacagacaaacccgatcgaccggtctatcgctctgctacttttccaccagtcatcggaccatgcggctgtggctgtcgacgatgcctcatcacttaaaccccctgctggtagcaaacaacaccagggccctgctgctaaccaaaaccaaggcctgatgcctgattcatcggtgtattcccctggagatggggcccccaaggatgtacagtccctggacaagttctgaatttatgtccctgctctccatgacctagttaagggcatgttcggttccccgggaatgggcatgttcggttccccgggaatggtcgttctggaatgaatcctggtcggatttcttcactaatttatataagctttgatcagttggaacgattctcgggaggaatttcaggataaacgaacagggcctaaggcgtctccatgacctggttaaggcggcataatacggcgtccacatgatgcttctaggcatatatgtaaaaaacaagcatattgtgtacccaatagtctgtagcctgttccaatcacattggttttgacatgcttgtatcctattggtaggcggccgttgtgctctctagtggcgttgactcacatatgtgtaatct

SEQ ID NO: 111214 - protein, 414 aa, Zea mays subsp. mays
  misc_feature (1)..(414): Ceres Seq. ID no. 15180025
  misc_feature (105)..(371): Homolog of NCBI NO: 15237638 NR Description: expressed protein [Arabidopsis thaliana]
MPDWRVREFEGKFTDEFAHSNNNKHESGVEAPGVTSSKKLKHAVAGEKIQGVIPGINSSDPQKCNSENIQHENRIVSQNINSAGDCIGDCKDSSNAFSSREENTIAETRCPTDDWNSCQFALSNGSSILNNHIAPQDSLTYGDNDLNYIDWPGIDNFEDVDTLFRRSDFTYDPQQLENTDGLSWLPSSDAVYSSDVALQQGFDSSYSDYDILDDLSAFQCAEDKSLPSVGPSSDLCDNQFNDTYLFSEQKNANAYGEQIYQEDVMELLPTDQICSGHENIDMLQGGNQYSSEHTIQGIEDKKFSIASTSQLSSSQNLLKQRHHLDSNSPSNITYEAYEEKFGPSSGSFAQRNSKVQKKTMNMQPTQPTNDNVMNRHPQTLTRSASYPCENNESERRGLGKRTLGDPKLQWVLQW

SEQ ID NO: 111215 - DNA, 808 bp, Zea mays subsp. mays
  misc_feature (1)..(808): Ceres Seq. ID no. 12634455
accaccacactgtgcagcagcctcctttcgtctcgtagttggctggggttgccaacgcgacacctcgtcggaatccggtcgcgcgacctccccttctcgccggccggagcgggtgcgccatcaccatggacccggaagcggtacggaaaagcctggagcccaccgcaactgtcgaaaaaatcaccggctccacccctgcgcggctccacttctacgaccccttcgtcctcagcggagtcagcatcgaagccgccgagcacggtcgcctcctctgctcctttgtcgtcacccctcgccttgcgagtcccgcggggtacctccgcagcggtgtcacagcgacgctcgccgaccagctgggatcggccgtgtttttctgcagcgggctccccagcagcggggtatccctcgaaatcagcgtctcctttgttgacgcggctgccgtcggggaggaaatagaggtcgagggaaagctgttgcgtgccggcaagtcagtcggtgtcgtctctgtcgatttcaggaagaaaaagacaggaaaactgatggcgcaggcccgtcacaccaagtatcttgtggcatcaagcagattgtgaggctgcccccttctgttaacaagatgtcaacataattgcgcccgaactgtccattactgatgccattattaataggcagcaacgatacaacgcttgtagtatatcctttatgtcaaattttttttgtgctgtatatttatttacatatgaaatccaagtatcagtggtgcctctgtgacagccaatcaagcgtgatcagataaggtcttgttagcgtg

SEQ ID NO: 111216 - protein, 154 aa, Zea mays subsp. mays
  misc_feature (1)..(154): Ceres Seq. ID no. 12634456
  misc_feature (34)..(149): Homolog of NCBI NO: 33146522 NR Description: unknown protein [Oryza sativa (japonica
  misc_feature (29)..(154): Homolog of NCBI NO: 25408036 NR Description: hypothetical protein At2g29590 [imported] -
  misc_feature (29)..(154): Homolog of NCBI NO: 18402093 NR Description: expressed protein
  misc_feature (34)..(148): Homolog of NCBI NO: 27685797 NR Description: similar to RIKEN cDNA 0610006O17
  misc_feature (17)..(148): Homolog of NCBI NO: 8923812 NR Description: uncharacterized hypothalamus protein HT012 [Homo
  misc_feature (34)..(148): Homolog of NCBI NO: 13385260 NR Description: RIKEN cDNA 0610006O17 [Mus musculus]
  misc_feature (65)..(154): Homolog of NCBI NO: 20161439 NR Description: B1065E10.13 [Oryza sativa (japonica
  misc_feature (1)..(152): Homolog of NCBI NO: 13605902 NR Description: At1g04290/F19P19_27 [Arabidopsis thaliana]
  misc_feature (1)..(154): Homolog of NCBI NO: 18379308 NR Description: expressed protein
  misc_feature (1)..(154): Homolog of NCBI NO: 21740488 NR Description: OSJNBa0006B20.3 [Oryza sativa (japonica
MDPEAVRKSLEPTATVEKITGSTPARLHFYDPFVLSGVSIEAAEHGRLLCSFVVTPRLASPAGYLRSGVTATLADQLGSAVFFCSGLPSSGVSLEISVSFVDAAAVGEEIEVEGKLLRAGKSVGVVSVDFRKKKTGKLMAQARHTKYLVASSRL

SEQ ID NO: 111217 - protein, 151 aa, Zea mays subsp. mays
  misc_feature (1)..(151): Ceres Seq. ID no. 12634457
TTTLCSSLLSSRSWLGLPTRHLVGIRSRDLPFSPAGAGAPSPWTRKRYGKAWSPPQLSKKSPAPPLRGSTSTTPSSSAESASKPPSTVASSAPLSSPLALRVPRGTSAAVSQRRSPTSWDRPCFSAAGSPAAGYPSKSASPLLTRLPSGRK

SEQ ID NO: 111218 - protein, 142 aa, Zea mays subsp. mays
  misc_feature (1)..(142): Ceres Seq. ID no. 12634458
PPHCAAASFRLVVGWGCQRDTSSESGRATSPSRRPERVRHHHGPGSGTEKPGAHRNCRKNHRLHPCAAPLLRPLRPQRSQHRSRRARSPPLLLCRHPSPCESRGVPPQRCHSDARRPAGIGRVFLQRAPQQRGIPRNQRLLC

SEQ ID NO: 111219 - DNA, 968 bp, Zea mays subsp. mays
  misc_feature (1)..(968): Ceres Seq. ID no. 12635196
acaaaaaccctcttctcctctgtccgagattcatacaaaaatgcttctcaaatccgcttctactttctcgctcgtgaacatccatggaggagtcaagaaggacatctctcccctctcctcctcctcctcctcctcattgagtcttcccgtttcttcgggaaaatcaagaaacctctccttctctgtttctgcctccacgcaaaccctgagcggcgtcgttttcgagccgtttgaggaggtgaagaaggaactcgatctcgtcccttcgagtccgcagctctcgctcgctcgccacatgtactctcccgagtgcgaagccgccgtcaacgagcagatcaatgtggagtacaacgtgtcttatgtgtatcacgccttgtacgcttacttcgatcgtgataacgttgctctcaaaggtcttgccaagtttttcaaggactcgagtgtggaagagcgtgaccatgctgagatgttgatggagtatcagaacaaacgtggtgggagggttaagttacagcctatggtgatgcctcaaactgagtttgatcacgctgagaaaggagatgctctctatgccatggagctggctctgtcattggagaagctggtcaatgagaagctccttaacgtgcacagtgtggcttccaagaacgatgatgtgcagttggcagatttcattgagagcgagtttttgaacgaacaggttgaagcaattaagaaaatctctgaatatgtagctcagctcagaagactcggcaaaggacatggaacatggcatttcgatcaagggcttctggaagctgctgctgcttaaatctagttttgggtgtagtcttcttcttatgaacttctgctgctgcttaaatctattttgtttgtaatctcttataaactcttgttgcttgatttgttttggttctggattattaagcctttagtttttgttcacatttctgattcacaaacctttg

SEQ ID NO: 111220 - protein, 269 aa, Zea mays subsp. mays
  misc_feature (1)..(269): Ceres Seq. ID no. 12635197
  misc_feature (105)..(250): Pfam Name: Ferritin-like domain Pfam Description: Ferritin-like domain
  misc_feature (14)..(265): Homolog of NCBI NO: 15225679 NR Description: putative ferritin
  misc_feature (14)..(268): Homolog of NCBI NO: 15228818 NR Description: putative protein
QKPSSPLSEIHTKMLLKSASTFSLVNIHGGVKKDISPLSSSSSSSLSLPVSSGKSRNLSFSVSASTQTLSGVVFEPFEEVKKELDLVPSSPQLSLARHMYSPECEAAVNEQINVEYNVSYVYHALYAYFDRDNVALKGLAKFFKDSSVEERDHAEMLMEYQNKRGGRVKLQPMVMPQTEFDHAEKGDALYAMELALSLEKLVNEKLLNVHSVASKNDDVQLADFIESEFLNEQVEAIKKISEYVAQLRRLGKGHGTWHFDQGLLEAAAA

SEQ ID NO: 111221 - protein, 256 aa, Zea mays subsp. mays
  misc_feature (1)..(256): Ceres Seq. ID no. 12635198
  misc_feature (92)..(237): Pfam Name: Ferritin-like domain Pfam Description: Ferritin-like domain
  misc_feature (1)..(252): Homolog of NCBI NO: 15225679 NR Description: putative ferritin
  misc_feature (1)..(255): Homolog of NCBI NO: 15228818 NR Description: putative protein
MLLKSASTFSLVNIHGGVKKDISPLSSSSSSSLSLPVSSGKSRNLSFSVSASTQTLSGVVFEPFEEVKKELDLVPSSPQLSLARHMYSPECEAAVNEQINVEYNVSYVYHALYAYFDRDNVALKGLAKFFKDSSVEERDHAEMLMEYQNKRGGRVKLQPMVMPQTEFDHAEKGDALYAMELALSLEKLVNEKLLNVHSVASKNDDVQLADFIESEFLNEQVEAIKKISEYVAQLRRLGKGHGTWHFDQGLLEAAAA

SEQ ID NO: 111222 - protein, 171 aa, Zea mays subsp. mays
  misc_feature (1)..(171): Ceres Seq. ID no. 12635199
  misc_feature (7)..(152): Pfam Name: Ferritin-like domain Pfam Description: Ferritin-like domain
  misc_feature (1)..(167): Homolog of NCBI NO: 15225679 NR Description: putative ferritin
  misc_feature (1)..(170): Homolog of NCBI NO: 15228818 NR Description: putative protein
MYSPECEAAVNEQINVEYNVSYVYHALYAYFDRDNVALKGLAKFFKDSSVEERDHAEMLMEYQNKRGGRVKLQPMVMPQTEFDHAEKGDALYAMELALSLEKLVNEKLLNVHSVASKNDDVQLADFIESEFLNEQVEAIKKISEYVAQLRRLGKGHGTWHFDQGLLEAAAA

SEQ ID NO: 111223 - DNA, 1048 bp, Zea mays subsp. mays
  misc_feature (1)..(1048): Ceres Seq. ID no. 13599424
actttcgccgctgctctccgctttcatagggtttatctctttcctcttcccctctcgcgcacggcagccggattccctaccgcaggcgagccaccacgccggccggagctcggagataaggtagttgtttagcaagcaatcgagaatgtcgtcggtgcagctctccggtgccggtgttgccacggtggccttcaacaacactggtctgcgcccctctcaggcgtcagcagtcagagtgtgctcatcgaggcgctcatctcgtagcctcgttgtcagggctgccactgtcgtcaccccgaagtatacatcactcaagcctctgggagacagagtgcttgtgaagcttagcgcagctgaggagaagaccattggtggaattttgcttccatcctccgcgcagtccaagcctcagggaggcgagattgttgctgttggagggggtagaaccattggggataagaaggtggaggtcagcataccgactggatctcaagttgtatattcaaagtatgctggtactgaggttgaatacaacaactccaagcatcttattatgaaagaggatgacatcataggtattcttgaatctgatgatgtcaaagacatgaagcctctcaatgaccggattctcatcaaggttgcagaggcttcagacaagactgaagctggtcttatcctcaccgagacaaccaaggagaagccatccattggaacagtcgtagctgttggtccgggctctcttgacgaggaaggcaagaggcagccattgccagtgtcaccaggcagcaccgtgctgtactccaagtacgcaggcggcgagttcaagggagctgatggcacgaactacattgtgttgagagtgtctgatgtgatggctgagctctcttaagtgtgtggtttattactttgtttcagttttgagttcacgatataggctagcatgagtggtaagattgctatgtgataaccacttgatgctgtttcggatgattacggaattgtacgagcaaacctgttgtctgggataaaaacatttactgaatttgtt

SEQ ID NO: 111224 - protein, 247 aa, Zea mays subsp. mays; identical to SEQ ID NO: 56619
  misc_feature (1)..(247): Ceres Seq. ID no. 13599425
  misc_feature (152)..(247): Pfam Name: Chaperonin 10 Kd subunit Pfam Description: Chaperonin 10 Kd subunit
  misc_feature (56)..(147): Homolog of NCBI NO: 15895961 NR Description: Co-chaperonin GroES, HSP10 family [Clostridium
  misc_feature (55)..(147): Homolog of NCBI NO: 23474135 NR Description: hypothetical protein [Desulfovibrio desulfuricans
  misc_feature (151)..(244): Homolog of NCBI NO: 22297730 NR Description: 10kD chaperonin [Thermosynechococcus elongatus
  misc_feature (56)..(147): Homolog of NCBI NO: 20807075 NR Description: Co-chaperonin GroES (HSP10) [Thermoanaerobacter
  misc_feature (56)..(147): Homolog of NCBI NO: 2493659 NR Description: 10 kDa chaperonin (Protein Cpn10) (groES protein)
  misc_feature (19)..(247): Homolog of NCBI NO: 399241 NR Description: 20 kDa chaperonin, chloroplast precursor (Protein (Chloroplast protein Cpn10) (Chloroplast chaperonin 10)
  misc_feature (1)..(247): Homolog of NCBI NO: 21780187 NR Description: cp10-like protein [Gossypium hirsutum]
  misc_feature (1)..(247): Homolog of NCBI NO: 7331143 NR Description: chaperonin 21 precursor [Lycopersicon esculentum]
  misc_feature (1)..(247): Homolog of NCBI NO: 25453528 NR Description: chaperonin 10 [imported] - Arabidopsis thaliana
  misc_feature (1)..(247): Homolog of NCBI NO: 15242045 NR Description: chloroplast Cpn21 protein [Arabidopsis thaliana]

SEQ ID NO: 111225 - DNA, 1406 bp, Zea mays subsp. mays
  misc_feature (1)..(1406): Ceres Seq. ID no. 15227046
accttcccagttcccacgtcccaacaacaaccaccccaggatatgagaatactatgatccccatccctcccctcccctcccctgactctactactcctcccccactgccttgccttcgtcgtcacatgcgcacaagaaagaacccgcgccgcccctgaccctggcccctcctctcctccagcgcgcagccaagacgtcgccgcgcccgcttccatgaccctcgtccccacctcgcgatgagcgacattgcgccgtggtggcgcctgccttttcgttcttgaccgcccgtcgagctgctacgagaaagggagggaggccgggcgatggccgccgcgaggaggctctcggagctgctgcaggagcagcaggagccgttcctcgtcgaggccgccagggcgaggcggccccgacgcgtccgtggcgcgagcggggcggcggcggaggaagcgggaggaggaggtgggctgggctgctgccccaccgcggcgtgccggcggctgctcaggctctgcagccacgggttcaagaagaggagcgccggcgccctcaggtcggcgctgaccaaggtgctgtgcagcagggccatgcgccgggtgctgcgctgggacggcctcggcggagactgcctctcgggcgccggcgcatgcggcgccagcgagttccgccgcctgcgccgctcactgggggacagcggcgagtgtgaccctcgcgccatggtgtttcccggcgatggtggggacgaggagcgggtggggtggaaggccgacatggacgtcgactcgtcgcggcagctcagcccggtctccgtcctggacctgcactccgacgatgacgacgacgagtcgctggcgcattcttactggggcgacgagaagccgtccacctccgggagctcacctccgtccgagcctttcctcgggccgacctctccgtgcttcagctactacagccacagccacatcctgcacgacaagttccgcgagatggaggtggacgagggcgaggaggagacggcccggaccggcaggtccgtcgaggagcagatctcgtcgtgggagaagatcgcgggtgacatctccaggatccccgcgatggtggagctggacctggcgcggtccgcgcggcagtggcgggagccgaggctggaggccagggaggtcggcgccaggatagagaccctcatcttcgatgacatcaggagggagaccgtgtgcgacatgctcgcctcgcattgtagatcggcggcggcggcggcggcagcagcaacgtcttgttgatcgaggtagtaggaggaggaggggttgttgtgttggtcagaagctatgcagcggatacgggtacatttatcgacagttttcaaaaataaaatggagaataaatagcgtatatatgttgaaaaggttaac

SEQ ID NO: 111226 - protein, 317 aa, Zea mays subsp. mays
  misc_feature (1)..(317): Ceres Seq. ID no. 15227047
  misc_feature (1)..(317): Homolog of NCBI NO: 12039271 NR Description: hypothetical protein [Oryza sativa]
MAAARRLSELLQEQQEPFLVEAARARRPRRVRGASGAAAEEAGGGGGLGCCPTAACRRLLRLCSHGFKKRSAGALRSALTKVLCSRAMRRVLRWDGLGGDCLSGAGACGASEFRRLRRSLGDSGECDPRAMVFPGDGGDEERVGWKADMDVDSSRQLSPVSVLDLHSDDDDDESLAHSYWGDEKPSTSGSSPPSEPFLGPTSPCFSYYSHSHILHDKFREMEVDEGEEETARTGRSVEEQISSWEKIAGDISRIPAMVELDLARSARQWREPRLEAREVGARIETLIFDDIRRETVCDMLASHCRSAAAAAAAATSC

SEQ ID NO: 111227 - protein, 230 aa, Zea mays subsp. mays
  misc_feature (1)..(230): Ceres Seq. ID no. 15227048
  misc_feature (1)..(230): Homolog of NCBI NO: 12039271 NR Description: hypothetical protein [Oryza sativa]
MRRVLRWDGLGGDCLSGAGACGASEFRRLRRSLGDSGECDPRAMVFPGDGGDEERVGWKADMDVDSSRQLSPVSVLDLHSDDDDDESLAHSYWGDEKPSTSGSSPPSEPFLGPTSPCFSYYSHSHILHDKFREMEVDEGEEETARTGRSVEEQISSWEKIAGDISRIPAMVELDLARSARQWREPRLEAREVGARIETLIFDDIRRETVCDMLASHCRSAAAAAAAATSC

SEQ ID NO: 111228 - protein, 187 aa, Zea mays subsp. mays
  misc_feature (1)..(187): Ceres Seq. ID no. 15227049
  misc_feature (1)..(187): Homolog of NCBI NO: 12039271 NR Description: hypothetical protein [Oryza sativa]
MVFPGDGGDEERVGWKADMDVDSSRQLSPVSVLDLHSDDDDDESLAHSYWGDEKPSTSGSSPPSEPFLGPTSPCFSYYSHSHILHDKFREMEVDEGEEETARTGRSVEEQISSWEKIAGDISRIPAMVELDLARSARQWREPRLEAREVGARIETLIFDDIRRETVCDMLASHCRSAAAAAAAATSC

SEQ ID NO: 111229 - DNA, 683 bp, Zea mays subsp. mays
  misc_feature (1)..(683): Ceres Seq. ID no. 13599649
aaatcacaccaaaaccctaatctctcccaaagcttctctcccaaacacaaaatggttaaccctaaagtttacttcgacatgaccgtcggcgacaaagccgccggacgcatcgtcatggagctttacgccgacacagtccccgagacggccgagaacttccgtgccctctgcaccggcgagaaaggaatcggcaaatccgggaagccgctccactacaagggctcggctttccaccgcgtgatccccaagttcatgtgccagggaggagatttcaccgccgggaacggaaccggaggagagtcgatctacggcatgaagttcaaagacgagaactttgtcaagaagcacaccggtccgggtattctctccatggccaacgctggttcgaacacgaacggatctcagtttttcatttgcactgagaagacatcgtggctcgacgggaagcatgttgtgttcggtcaagttgtcgaagggatggatgtcgttagagacattgagaaggttggatctgacagtggaaggacttctaagaaggttgtgatcgctgactgtggtcagctttagatctgatgagggagaaaagagagaggttgttgatccaatggtagctttgtgttcttttctgttgtgttttttttttgttctggttttctccgtgttctatggctaccatgaataat

SEQ ID NO: 111230 - protein, 188 aa, Zea mays subsp. mays
  misc_feature (1)..(188): Ceres Seq. ID no. 13599650
  misc_feature (22)..(188): Pfam Name: Cyclophilin type peptidyl-prolyl cis-trans isomerase Pfam Description: Cyclophilin type peptidyl-prolyl cis-trans
  misc_feature (18)..(188): Homolog of NCBI NO: 11270316 NR Description: peptidylprolyl isomerase (EC 5.2.1.8)
  misc_feature (20)..(188): Homolog of NCBI NO: 15227259 NR Description: cytosolic cyclophilin (ROC3) [Arabidopsis
  misc_feature (21)..(188): Homolog of NCBI NO: 167138 NR Description: cyclophilin
  misc_feature (18)..(188): Homolog of NCBI NO: 68407 NR Description: peptidylprolyl isomerase (EC 5.2.1.8) - rape
  misc_feature (18)..(188): Homolog of NCBI NO: 1345921 NR Description: PEPTIDYL-PROLYL CIS-TRANS ISOMERASE (PPIASE)
KSHQNPNLSQSFSPKHKMVNPKVYFDMTVGDKAAGRIVMELYADTVPETAENFRALCTGEKGIGKSGKPLHYKGSAFHRVIPKFMCQGGDFTAGNGTGGESIYGMKFKDENFVKKHTGPGILSMANAGSNTNGSQFFICTEKTSWLDGKHVVFGQVVEGMDVVRDIEKVGSDSGRTSKKVVIADCGQL

SEQ ID NO: 111231 - protein, 171 aa, Zea mays subsp. mays
  misc_feature (1)..(171): Ceres Seq. ID no. 13599651
  misc_feature (5)..(171): Pfam Name: Cyclophilin type peptidyl-prolyl cis-trans isomerase Pfam Description: Cyclophilin type peptidyl-prolyl cis-trans
  misc_feature (1)..(171): Homolog of NCBI NO: 11270316 NR Description: peptidylprolyl isomerase (EC 5.2.1.8)
  misc_feature (3)..(171): Homolog of NCBI NO: 15227259 NR Description: cytosolic cyclophilin (ROC3) [Arabidopsis
  misc_feature (4)..(171): Homolog of NCBI NO: 167138 NR Description: cyclophilin
  misc_feature (1)..(171): Homolog of NCBI NO: 68407 NR Description: peptidylprolyl isomerase (EC 5.2.1.8) - rape
  misc_feature (1)..(171): Homolog of NCBI NO: 1345921 NR Description: PEPTIDYL-PROLYL CIS-TRANS ISOMERASE (PPIASE)
MVNPKVYFDMTVGDKAAGRIVMELYADTVPETAENFRALCTGEKGIGKSGKPLHYKGSAFHRVIPKFMCQGGDFTAGNGTGGESIYGMKFKDENFVKKHTGPGILSMANAGSNTNGSQFFICTEKTSWLDGKHVVFGQVVEGMDVVRDIEKVGSDSGRTSKKVVIADCGQL

SEQ ID NO: 111232 - protein, 162 aa, Zea mays subsp. mays
  misc_feature (1)..(162): Ceres Seq. ID no. 13599652
  misc_feature (1)..(162): Pfam Name: Cyclophilin type peptidyl-prolyl cis-trans isomerase Pfam Description: Cyclophilin type peptidyl-prolyl cis-trans
  misc_feature (1)..(162): Homolog of NCBI NO: 11270316 NR Description: peptidylprolyl isomerase (EC 5.2.1.8)
  misc_feature (1)..(162): Homolog of NCBI NO: 15227259 NR Description: cytosolic cyclophilin (ROC3) [Arabidopsis
  misc_feature (1)..(162): Homolog of NCBI NO: 167138 NR Description: cyclophilin
  misc_feature (1)..(162): Homolog of NCBI NO: 68407 NR Description: peptidylprolyl isomerase (EC 5.2.1.8) - rape
  misc_feature (1)..(162): Homolog of NCBI NO: 1345921 NR Description: PEPTIDYL-PROLYL CIS-TRANS ISOMERASE (PPIASE)
MTVGDKAAGRIVMELYADTVPETAENFRALCTGEKGIGKSGKPLHYKGSAFHRVIPKFMCQGGDFTAGNGTGGESIYGMKFKDENFVKKHTGPGILSMANAGSNTNGSQFFICTEKTSWLDGKHVVFGQVVEGMDVVRDIEKVGSDSGRTSKKVVIADCGQL

SEQ ID NO: 111233 - DNA, 907 bp, Zea mays subsp. mays
  misc_feature (1)..(907): Ceres Seq. ID no. 12635952
aataacaatctaactgttgtgtcttgtaagagaaagagagacagaaaaaaagatggtgctaaaggtgtacggacctcactttgcttcaccaaagcgagctttggtaacgcttatcgagaagggcgttcccttcgagaccgtccccgtcgatctcatgaaaggagagcacaagcagcctgcttatctcgccttacagcctttcggcaccgttcctgctgttgtcgacggtgactacaagatcttcgagtcacgtgcggtgatgaggtacgtagctgagaagtacaggtcacaaggacctgaccttttgggcaaaaccgtcgaagacagaggtcaagttgagcaatggctcgacgttgaggccaccactttccacccacctctccttaacctcacactccacatcatgttcgcatcagtcatgggattcccttccgatgagaagctgatcaaggagagcgaggagaagctctcagctgtgctcgatgtctacgaggcacatctcgccaagagcaagtacttggctggtgatttcgtcagcttggctgatttggctcacctccctttcactgattacttggttggacccatcggtaaggcttacatgatcaaagacaggaagcacgtgagcgcgtggtgggatgatattagcagccgtcctgcttggaaggagacccttgagaagtactcattccctgcttaaagatgatgatcatgttcttgatctttgtttgtgtttcggagtttctaagcaatgcctgtgtttaatgtgaggtttttaataaagagtggaactgtatgcctcctcttatcttatgtatgccacctctcttttctcttttgtttcatattgtaactccaattctgtgtgattgagttgaggtttgaatctagaggaacttaattatct

SEQ ID NO: 111234 - protein, 215 aa, Zea mays subsp. mays
  misc_feature (1)..(215): Ceres Seq. ID no. 12635953
  misc_feature (1)..(214): Homolog of NCBI NO: 15224582 NR Description: glutathione transferase, putative
  misc_feature (1)..(215): Homolog of NCBI NO: 2462929 NR Description: glutathione transferase [Arabidopsis thaliana]
  misc_feature (1)..(215): Homolog of NCBI NO: 15224581 NR Description: glutathione transferase, putative
MVLKVYGPHFASPKRALVTLIEKGVPFETVPVDLMKGEHKQPAYLALQPFGTVPAVVDGDYKIFESRAVMRYVAEKYRSQGPDLLGKTVEDRGQVEQWLDVEATTFHPPLLNLTLHIMFASVMGFPSDEKLIKESEEKLSAVLDVYEAHLAKSKYLAGDFVSLADLAHLPFTDYLVGPIGKAYMIKDRKHVSAWWDDISSRPAWKETLEKYSFPA

SEQ ID NO: 111235 - protein, 181 aa, Zea mays subsp. mays
  misc_feature (1)..(181): Ceres Seq. ID no. 12635954
  misc_feature (1)..(180): Homolog of NCBI NO: 15224582 NR Description: glutathione transferase, putative
  misc_feature (1)..(181): Homolog of NCBI NO: 2462929 NR Description: glutathione transferase [Arabidopsis thaliana]
  misc_feature (1)..(181): Homolog of NCBI NO: 15224581 NR Description: glutathione transferase, putative
MKGEHKQPAYLALQPFGTVPAVVDGDYKIFESRAVMRYVAEKYRSQGPDLLGKTVEDRGQVEQWLDVEATTFHPPLLNLTLHIMFASVMGFPSDEKLIKESEEKLSAVLDVYEAHLAKSKYLAGDFVSLADLAHLPFTDYLVGPIGKAYMIKDRKHVSAWWDDISSRPAWKETLEKYSFPA

SEQ ID NO: 111236 - protein, 146 aa, Zea mays subsp. mays
  misc_feature (1)..(146): Ceres Seq. ID no. 12635955
  misc_feature (1)..(145): Homolog of NCBI NO: 15224582 NR Description: glutathione transferase, putative
  misc_feature (1)..(146): Homolog of NCBI NO: 2462929 NR Description: glutathione transferase [Arabidopsis thaliana]
  misc_feature (1)..(146): Homolog of NCBI NO: 15224581 NR Description: glutathione transferase, putative
MRYVAEKYRSQGPDLLGKTVEDRGQVEQWLDVEATTFHPPLLNLTLHIMFASVMGFPSDEKLIKESEEKLSAVLDVYEAHLAKSKYLAGDFVSLADLAHLPFTDYLVGPIGKAYMIKDRKHVSAWWDDISSRPAWKETLEKYSFPA

SEQ ID NO: 111237 - DNA, 736 bp, Zea mays subsp. mays
  misc_feature (1)..(736): Ceres Seq. ID no. 12635268
atagattaggtcgagtgtgctctcacagacacggataacgcaaaacctctctgtcttcccaaatccaccacctcacaacgacgactacgatggctctttctactggaatcttctccaccttcctctgcgtcaaaacggtgacgttacgcagctcaccgttcctccgtgtttcccctcctcatccggctaacctgcggatggtgcgagccgtgacctccgcgacggcggcgtcctccgagccgtcagccaccaagactcgggagccacgtggcatcatgaagcctcgcccagtgtcccccgagatgcaggacgtggtgggtgagccggtgattcctcgcacgcaggctcttaagcgcatttgggcctacatcaaggaacacgaccttcaggatccacaagacaagaaggttataatctgcgacgagaagctgaagaagatattcgcaggcaaagaccgtgtcgggttcttggagattgcaaagctcatcggtcctcacttcctctgaatgagaagacaatcgatcactagcgtatgtttacatattagtaacgttaggtttaagaagttttatgcaacaaagtagtagtcaagccctttgggacgatatcttttgcgtttgttggttatgtgtctctttgcttcagattgcagtttaaaatttgctatgttttgtcttaggacttgagcaactcttcgatgcatcgtttcttcatattatcaacaggcctgccatct

SEQ ID NO: 111238 - protein, 138 aa, Zea mays subsp. mays; identical to SEQ ID NO: 61663
  misc_feature (1)..(138): Ceres Seq. ID no. 12635269
  misc_feature (62)..(138): Pfam Name: SWIB/MDM2 domain Pfam Description: SWIB/MDM2 domain
  misc_feature (36)..(137): Homolog of NCBI NO: 33667910 NR Description: SWIb domain-containing protein [Solanum chacoense]
  misc_feature (28)..(138): Homolog of NCBI NO: 21593643 NR Description: unknown [Arabidopsis thaliana]
  misc_feature (28)..(138): Homolog of NCBI NO: 18396594 NR Description: expressed protein
  misc_feature (9)..(138): Homolog of NCBI NO: 14488372 NR Description: hypothetical protein [Oryza sativa (japonica
  misc_feature (1)..(138): Homolog of NCBI NO: 21593713 NR Description: unknown [Arabidopsis thaliana]
  misc_feature (1)..(138): Homolog of NCBI NO: 19698859 NR Description: unknown protein [Arabidopsis thaliana]
  misc_feature (1)..(138): Homolog of NCBI NO: 18397658 NR Description: expressed protein
  misc_feature (1)..(138): Homolog of NCBI NO: 21553903 NR Description: unknown [Arabidopsis thaliana]
  misc_feature (1)..(138): Homolog of NCBI NO: 15235320 NR Description: putative protein
  misc_feature (1)..(138): Homolog of NCBI NO: 14423526 NR Description: putative protein [Arabidopsis thaliana]

SEQ ID NO: 111239 - protein, 102 aa, Zea mays subsp. mays; identical to SEQ ID NO: 61664
  misc_feature (1)..(102): Ceres Seq. ID no. 12635270
  misc_feature (26)..(102): Pfam Name: SWIB/MDM2 domain Pfam Description: SWIB/MDM2 domain
  misc_feature (1)..(101): Homolog of NCBI NO: 33667910 NR Description: SWIb domain-containing protein [Solanum chacoense]
  misc_feature (1)..(102): Homolog of NCBI NO: 21593643 NR Description: unknown [Arabidopsis thaliana]
  misc_feature (1)..(102): Homolog of NCBI NO: 18396594 NR Description: expressed protein
  misc_feature (1)..(102): Homolog of NCBI NO: 14488372 NR Description: hypothetical protein [Oryza sativa (japonica
  misc_feature (1)..(102): Homolog of NCBI NO: 21593713 NR Description: unknown [Arabidopsis thaliana]
  misc_feature (1)..(102): Homolog of NCBI NO: 19698859 NR Description: unknown protein [Arabidopsis thaliana]
  misc_feature (1)..(102): Homolog of NCBI NO: 18397658 NR Description: expressed protein
  misc_feature (1)..(102): Homolog of NCBI NO: 21553903 NR Description: unknown [Arabidopsis thaliana]
  misc_feature (1)..(102): Homolog of NCBI NO: 15235320 NR Description: putative protein
  misc_feature (1)..(102): Homolog of NCBI NO: 14423526 NR Description: putative protein [Arabidopsis thaliana]

SEQ ID NO: 111240 - protein, 76 aa, Zea mays subsp. mays; identical to SEQ ID NO: 61665
  misc_feature (1)..(76): Ceres Seq. ID no. 12635271
  misc_feature (1)..(76): Pfam Name: SWIB/MDM2 domain Pfam Description: SWIB/MDM2 domain
  misc_feature (1)..(75): Homolog of NCBI NO: 33667910 NR Description: SWIb domain-containing protein [Solanum chacoense]
  misc_feature (1)..(76): Homolog of NCBI NO: 21593643 NR Description: unknown [Arabidopsis thaliana]
  misc_feature (1)..(76): Homolog of NCBI NO: 18396594 NR Description: expressed protein
  misc_feature (1)..(76): Homolog of NCBI NO: 14488372 NR Description: hypothetical protein [Oryza sativa (japonica
  misc_feature (1)..(76): Homolog of NCBI NO: 21593713 NR Description: unknown [Arabidopsis thaliana]
  misc_feature (1)..(76): Homolog of NCBI NO: 19698859 NR Description: unknown protein [Arabidopsis thaliana]
  misc_feature (1)..(76): Homolog of NCBI NO: 18397658 NR Description: expressed protein
  misc_feature (1)..(76): Homolog of NCBI NO: 21553903 NR Description: unknown [Arabidopsis thaliana]
  misc_feature (1)..(76): Homolog of NCBI NO: 15235320 NR Description: putative protein
  misc_feature (1)..(76): Homolog of NCBI NO: 14423526 NR Description: putative protein [Arabidopsis thaliana]

SEQ ID NO: 111241 - DNA, 976 bp, Zea mays subsp. mays
  misc_feature (1)..(976): Ceres Seq. ID no. 12635446
aacctcattcctcagccaccacaccgatctagggtttcctgctagggttttagtccttcgtttccagcggcggcgcaagatgggtgagagagtgaagggaaccgtgaagtggttcaacgtcaccaaggggttcggattcatctccccggaggacggcagcgaggacctcttcgtccaccagtccgccatcaaggccgacggctaccgcagcctcaacgagaacgacgtcgtcgagtttgaggtcatcaccggcgacgacggccgaaccaaggccgccgacgtcaccgcaccaggagggggtgcgctcgccggcggctcccgccctggcgacggcggtggtgaccgcgggggtcgcggcgggggtggctacggtggaggcggctacggcggcggcggcggcggcggctacggtggtggtggcggcggctacggcagcggtggcggcagctacgacggcggtggcggctatggaggtggtggcggcggcggccgctacggaggagggcggcggcggcgtccgtgagtgctacaagtgcggcgaggagggccacatctccagggactgcccccagggcggcggcggcggtggcggtggctacggaggtggtggcggccgtggcggtggtggtggcggtggcggctgcttctcctgcggcgagtccggccacttctcgcgcgagtgccccaacaagaccaactagacggctttgcccgtcagatctgagtgccccgttccccttcgctccttttcctaccgcctgactctgcagcaagtcatacctatacctatcagtattagtatatgtcgccgtagtgttccccgtgcttctcgtaggaagaagaatcgacgatgcgagcttggttccagaagtattgttggtggcgtgttgttcgtttgaagttatcttgtgtcgtctgatggggacagaccttatatctttatgtattggattgaatggactaagttatgcaagtc

SEQ ID NO: 111242 - protein, 173 aa, Zea mays subsp. mays
  misc_feature (1)..(173): Ceres Seq. ID no. 12635447
  misc_feature (30)..(97): Pfam Name: 'Cold-shock' DNA-binding domain Pfam Description: 'Cold-shock' DNA-binding domain
  misc_feature (28)..(169): Homolog of NCBI NO: 15226451 NR Description: glycine-rich protein (AtGRP2)
  misc_feature (82)..(166): Homolog of NCBI NO: 121631 NR Description: Glycine-rich protein 2
  misc_feature (33)..(163): Homolog of NCBI NO: 18398546 NR Description: putative glycine-rich, zinc-finger DNA-binding
  misc_feature (33)..(163): Homolog of NCBI NO: 7442089 NR Description: glycine-rich protein T13L16.11 - Arabidopsis
  misc_feature (28)..(170): Homolog of NCBI NO: 15234010 NR Description: glycine-rich protein 2 (GRP2)
  misc_feature (97)..(164): Homolog of NCBI NO: 21322752 NR Description: cold shock protein-1 [Triticum aestivum]
  misc_feature (28)..(168): Homolog of NCBI NO: 121631 NR Description: Glycine-rich protein 2
  misc_feature (29)..(163): Homolog of NCBI NO: 29467522 NR Description: P0582D05.12 [Oryza sativa (japonica
  misc_feature (27)..(168): Homolog of NCBI NO: 21322752 NR Description: cold shock protein-1 [Triticum aestivum]
  misc_feature (27)..(168): Homolog of NCBI NO: 40363759 NR Description: putative glycine-rich protein [Triticum aestivum]
TSFLSHHTDLGFPARVLVLRFQRRRKMGERVKGTVKWFNVTKGFGFISPEDGSEDLFVHQSAIKADGYRSLNENDVVEFEVITGDDGRTKAADVTAPGGGALAGGSRPGDGGGDRGGRGGGGYGGGGYGGGGGGGYGGGGGGYGSGGGSYDGGGGYGGGGGGGRYGGGRRRRP

SEQ ID NO: 111243 - protein, 147 aa, Zea mays subsp. mays
  misc_feature (1)..(147): Ceres Seq. ID no. 12635448
  misc_feature (4)..(71): Pfam Name: 'Cold-shock' DNA-binding domain Pfam Description: 'Cold-shock' DNA-binding domain
  misc_feature (2)..(143): Homolog of NCBI NO: 15226451 NR Description: glycine-rich protein (AtGRP2)
  misc_feature (56)..(140): Homolog of NCBI NO: 121631 NR Description: Glycine-rich protein 2
  misc_feature (7)..(137): Homolog of NCBI NO: 18398546 NR Description: putative glycine-rich, zinc-finger DNA-binding
  misc_feature (7)..(137): Homolog of NCBI NO: 7442089 NR Description: glycine-rich protein T13L16.11 - Arabidopsis
  misc_feature (2)..(144): Homolog of NCBI NO: 15234010 NR Description: glycine-rich protein 2 (GRP2)
  misc_feature (71)..(138): Homolog of NCBI NO: 21322752 NR Description: cold shock protein-1 [Triticum aestivum]
  misc_feature (2)..(142): Homolog of NCBI NO: 121631 NR Description: Glycine-rich protein 2
  misc_feature (3)..(137): Homolog of NCBI NO: 29467522 NR Description: P0582D05.12 [Oryza sativa (japonica
  misc_feature (1)..(142): Homolog of NCBI NO: 21322752 NR Description: cold shock protein-1 [Triticum aestivum]
  misc_feature (1)..(142): Homolog of NCBI NO: 40363759 NR Description: putative glycine-rich protein [Triticum aestivum]
MGERVKGTVKWFNVTKGFGFISPEDGSEDLFVHQSAIKADGYRSLNENDVVEFEVITGDDGRTKAADVTAPGGGALAGGSRPGDGGGDRGGRGGGGYGGGGYGGGGGGGYGGGGGGYGSGGGSYDGGGGYGGGGGGGRYGGGRRRRP

SEQ ID NO: 111244 - DNA, 943 bp, Zea mays subsp. mays
  misc_feature (1)..(943): Ceres Seq. ID no. 13599646
aaaaaccactttcatcgcaactcagccagccagagcttaggcgagagagacagagacagaagatggcgtacagcgcgtgtttcctacatcagagcgcactggcctcctccgccgctcgatcatcatcttcctcctcatcccagcgctacgtttcactctccaaacccgtccaggtagtgtgtaaagctcaacagtctcatgaagacgataatcccgccgtctctcgccgtctcgccctcacactcctcgtcggcgccgccgccgttggttccaaagtgtctcctgccgatgccgcctatggtgaagctgcaaatgtgtttgggaagccaaagaaaaacacagacttcacgccatacaatggagatggattccaagtgcaggttccagctaaatggaacccaagcagagaggtagagtatccaggacaagtccttaggtacgaagacaactttgatgctactagcaatctcaatgtcatggtcactcctaccgacaagaagtccatcactgattacggctctcctgaagagttcctctctcaggtcaactaccttcttgggaaacaagcttacttcggtgagactgcctccgagggaggctttgacaacaatgcagtggcaacagcaaacattctggagacaaatgttcaggacgttggtgggaaaccatactactacttgtccgtgttgacaagaacggccgatggagatgaaggtggtaagcatcagctgatcacagccaccgtgaacggaggcaagctttacatctgcaaagcacaagctggagacaagaggtggttcaagggagccaacaaatttgtcgagaaagcagccacttctttcagtgttgcttgaatcaaagcaacacaaacagaacaatgctctgctttctttttttttcatttgtctcttgtaaaaaaatggaaaatgaaactaagcttttg

SEQ ID NO: 111245 - protein, 283 aa, Zea mays subsp. mays
  misc_feature (1)..(283): Ceres Seq. ID no. 13599647
  misc_feature (81)..(283): Pfam Name: PsbP Pfam Description: PsbP
  misc_feature (21)..(283): Homolog of NCBI NO: 417604 NR Description: 23 kDa polypeptide of water-oxidizing complex of
  misc_feature (28)..(283): Homolog of NCBI NO: 19898 NR Description: photosystem II 23 kDa polypeptide [Nicotiana
  misc_feature (26)..(283): Homolog of NCBI NO: 1345550 NR Description: 23-kDa ploypeptide of photosystem II
  misc_feature (67)..(283): Homolog of NCBI NO: 11134091 NR Description: Oxygen-evolving enhancer protein 2, chloroplast (OEE2) (23 kDa subunit of oxygen evolving system of photosystem (OEC 23 kDa subunit) (23 kDa thylakoid membrane protein) of
  misc_feature (21)..(283): Homolog of NCBI NO: 15224572 NR Description: photosystem II oxygen-evolving complex 23 (OEC23)
  misc_feature (21)..(283): Homolog of NCBI NO: 7443216 NR Description: photosystem II oxygen-evolving complex protein 2
  misc_feature (21)..(283): Homolog of NCBI NO: 11133887 NR Description: OXYGEN-EVOLVING ENHANCER PROTEIN 2-2, CHLOROPLAST (OEE2) (23 KDA SUBUNIT OF OXYGEN EVOLVING SYSTEM OF PHOTOSYSTEM
  misc_feature (33)..(283): Homolog of NCBI NO: 81723 NR Description: photosystem II oxygen-evolving complex protein 2
  misc_feature (21)..(283): Homolog of NCBI NO: 131391 NR Description: Oxygen-evolving enhancer protein 2, chloroplast (OEE2) (23 kDa subunit of oxygen evolving system of photosystem
  misc_feature (21)..(283): Homolog of NCBI NO: 15222166 NR Description: photosystem II oxygen-evolving complex 23 (OEC23)
KPLSSQLSQPELRRERQRQKMAYSACFLHQSALASSAARSSSSSSSQRYVSLSKPVQVVCKAQQSHEDDNPAVSRRLALTLLVGAAAVGSKVSPADAAYGEAANVFGKPKKNTDFTPYNGDGFQVQVPAKWNPSREVEYPGQVLRYEDNFDATSNLNVMVTPTDKKSITDYGSPEEFLSQVNYLLGKQAYFGETASEGGFDNNAVATANILETNVQDVGGKPYYYLSVLTRTADGDEGGKHQLITATVNGGKLYICKAQAGDKRWFKGANKFVEKAATSFSVA

SEQ ID NO: 111246 - protein, 263 aa, Zea mays subsp. mays
  misc_feature (1)..(263): Ceres Seq. ID no. 13599648
  misc_feature (61)..(263): Pfam Name: PsbP Pfam Description: PsbP
  misc_feature (1)..(263): Homolog of NCBI NO: 131391 NR Description: Oxygen-evolving enhancer protein 2, chloroplast (OEE2) (23 kDa subunit of oxygen evolving system of photosystem
  misc_feature (1)..(263): Homolog of NCBI NO: 417604 NR Description: 23 kDa polypeptide of water-oxidizing complex of
  misc_feature (6)..(263): Homolog of NCBI NO: 1345550 NR Description: 23-kDa ploypeptide of photosystem II
  misc_feature (1)..(263): Homolog of NCBI NO: 15224572 NR Description: photosystem II oxygen-evolving complex 23 (OEC23)
  misc_feature (1)..(263): Homolog of NCBI NO: 11133887 NR Description: OXYGEN-EVOLVING ENHANCER PROTEIN 2-2, CHLOROPLAST (OEE2) (23 KDA SUBUNIT OF OXYGEN EVOLVING SYSTEM OF PHOTOSYSTEM
  misc_feature (13)..(263): Homolog of NCBI NO: 81723 NR Description: photosystem II oxygen-evolving complex protein 2
  misc_feature (1)..(263): Homolog of NCBI NO: 7443216 NR Description: photosystem II oxygen-evolving complex protein 2
  misc_feature (47)..(263): Homolog of NCBI NO: 11134091 NR Description: Oxygen-evolving enhancer protein 2, chloroplast (OEE2) (23 kDa subunit of oxygen evolving system of photosystem (OEC 23 kDa subunit) (23 kDa thylakoid membrane protein) of
  misc_feature (8)..(263): Homolog of NCBI NO: 19898 NR Description: photosystem II 23 kDa polypeptide [Nicotiana
  misc_feature (1)..(263): Homolog of NCBI NO: 15222166 NR Description: photosystem II oxygen-evolving complex 23 (OEC23)
MAYSACFLHQSALASSAARSSSSSSSQRYVSLSKPVQVVCKAQQSHEDDNPAVSRRLALTLLVGAAAVGSKVSPADAAYGEAANVFGKPKKNTDFTPYNGDGFQVQVPAKWNPSREVEYPGQVLRYEDNFDATSNLNVMVTPTDKKSITDYGSPEEFLSQVNYLLGKQAYFGETASEGGFDNNAVATANILETNVQDVGGKPYYYLSVLTRTADGDEGGKHQLITATVNGGKLYICKAQAGDKRWFKGANKFVEKAATSFSVA

SEQ ID NO: 111247 - DNA, 1314 bp, Zea mays subsp. mays
  misc_feature (1)..(1314): Ceres Seq. ID no. 13599438
accaggatcagcaaagagacatccaagaactccaatggctgatgagtcatggaggctgccgagttcagtgcagcaactggctgccagcatacaggagccaccaaggcagtacttgctcagagagcaagaaccgcttggtgggaacctggctggtacggagatgccggaccccattccaacaatcgatctcggcctgctgtctgcatccaacgacgcggaggaagccgccaagctgcggtcggcactgcagacctggggattcttcaaggtttctaaccatggaatggagacctctctgatggattctgtgatgaccgcatcaagggatttcttccgcctaccgcttgaagagaagagaaagtacagtaacataataggtgggaaacatttccagatggaagggtatggaactgaccaggtgaaaactcaagaccaaaggctggactggtccgatcgactgcatcttaaagtggagccagaggacgagagaaaccttgccctttggcccatacatccaaaatctttcagggatgacctgcatgagtacacattgaggagcaagagaattaaagacgacatccttcgggcaatggccaagctactggagctcgatgaagattgcctagttaaccagtttagcgacagggctctcacttatgctagattcaattactatcctccatgtccaaggcctgatcttgtcttgggcatcaagcctcactctgatgtctacgctcttacggttcttctaatggacaaagatgtcgctgggctgcagtttctcagagatggaacgtggtacaatgtcccatctgcgtctaactacaccttgctgatcaacgttggtgttacaatggagataatgaccaacgggatatttaaagggccagtacatagggttgtgactaattctgagaaagagaggatgtcagtggccgtgttctatggcctggatcctgaaagagagattggaccgatagctcagatgttgactgaggaccaaccggcgcgatacaggaaaatgaaggtcaaggatttcctggtcgcgcaccttgagcatttctctcgaggagaaagagtcgtcgattcgttaaggatatgatcaaggtgagtttgctttggtgctgcaatacccatggaataaagaatttgtgacttgcctattcgttaaggatataaacgaggcgactttacttctataaggcgatgaatctggtgaaaataaataatttcatcgtatttatgttgcattttgggtttgttctgtggtagatgtggctctatggacacctttgtattctcttacctcaagtg

SEQ ID NO: 111248 - protein, 366 aa, Zea mays subsp. mays
  misc_feature (1)..(366): Ceres Seq. ID no. 13599439
  misc_feature (216)..(317): Pfam Name: 2OG-Fe(II) oxygenase superfamily Pfam Description: 2OG-Fe(II) oxygenase superfamily
  misc_feature (12)..(134): Homolog of NCBI NO: 24413983 NR Description: ethylene-forming-enzyme-like dioxygenase-like
  misc_feature (170)..(366): Homolog of NCBI NO: 24413983 NR Description: ethylene-forming-enzyme-like dioxygenase-like
  misc_feature (12)..(366): Homolog of NCBI NO: 34898472 NR Description: Similar to Prunus armeniaca
  misc_feature (287)..(366): Homolog of NCBI NO: 24413981 NR Description: contains EST
  misc_feature (23)..(274): Homolog of NCBI NO: 24413981 NR Description: contains EST
  misc_feature (23)..(366): Homolog of NCBI NO: 34898468 NR Description: Similar to Prunus armeniaca
  misc_feature (12)..(340): Homolog of NCBI NO: 34898470 NR Description: ESTs D47168(S12332),D46350(S10967) correspond to region of the predicted gene.~Similar to Prunus armeniaca
  misc_feature (23)..(366): Homolog of NCBI NO: 33115140 NR Description: iron/ascorbate-dependent oxidoreductase [Hordeum
  misc_feature (12)..(366): Homolog of NCBI NO: 24413982 NR Description: ethylene-forming-enzyme-like dioxygenase-like
  misc_feature (12)..(366): Homolog of NCBI NO: 24413984 NR Description: ethylene-forming-enzyme-like dioxygenase-like
PGSAKRHPRTPMADESWRLPSSVQQLAASIQEPPRQYLLREQEPLGGNLAGTEMPDPIPTIDLGLLSASNDAEEAAKLRSALQTWGFFKVSNHGMETSLMDSVMTASRDFFRLPLEEKRKYSNIIGGKHFQMEGYGTDQVKTQDQRLDWSDRLHLKVEPEDERNLALWPIHPKSFRDDLHEYTLRSKRIKDDILRAMAKLLELDEDCLVNQFSDRALTYARFNYYPPCPRPDLVLGIKPHSDVYALTVLLMDKDVAGLQFLRDGTWYNVPSASNYTLLINVGVTMEIMTNGIFKGPVHRVVTNSEKERMSVAVFYGLDPEREIGPIAQMLTEDQPARYRKMKVKDFLVAHLEHFSRGERVVDSLRI

SEQ ID NO: 111249 - protein, 355 aa, Zea mays subsp. mays
  misc_feature (1)..(355): Ceres Seq. ID no. 13599440
  misc_feature (205)..(306): Pfam Name: 2OG-Fe(II) oxygenase superfamily Pfam Description: 2OG-Fe(II) oxygenase superfamily
  misc_feature (1)..(123): Homolog of NCBI NO: 24413983 NR Description: ethylene-forming-enzyme-like dioxygenase-like
  misc_feature (159)..(355): Homolog of NCBI NO: 24413983 NR Description: ethylene-forming-enzyme-like dioxygenase-like
  misc_feature (1)..(355): Homolog of NCBI NO: 34898472 NR Description: Similar to Prunus armeniaca
  misc_feature (276)..(355): Homolog of NCBI NO: 24413981 NR Description: contains EST
  misc_feature (12)..(263): Homolog of NCBI NO: 24413981 NR Description: contains EST
  misc_feature (12)..(355): Homolog of NCBI NO: 34898468 NR Description: Similar to Prunus armeniaca
  misc_feature (1)..(329): Homolog of NCBI NO: 34898470 NR Description: ESTs D47168(S12332),D46350(S10967) correspond to region of the predicted gene.~Similar to Prunus armeniaca
  misc_feature (12)..(355): Homolog of NCBI NO: 33115140 NR Description: iron/ascorbate-dependent oxidoreductase [Hordeum
  misc_feature (1)..(355): Homolog of NCBI NO: 24413982 NR Description: ethylene-forming-enzyme-like dioxygenase-like
  misc_feature (1)..(355): Homolog of NCBI NO: 24413984 NR Description: ethylene-forming-enzyme-like dioxygenase-like
MADESWRLPSSVQQLAASIQEPPRQYLLREQEPLGGNLAGTEMPDPIPTIDLGLLSASNDAEEAAKLRSALQTWGFFKVSNHGMETSLMDSVMTASRDFFRLPLEEKRKYSNIIGGKHFQMEGYGTDQVKTQDQRLDWSDRLHLKVEPEDERNLALWPIHPKSFRDDLHEYTLRSKRIKDDILRAMAKLLELDEDCLVNQFSDRALTYARFNYYPPCPRPDLVLGIKPHSDVYALTVLLMDKDVAGLQFLRDGTWYNVPSASNYTLLINVGVTMEIMTNGIFKGPVHRVVTNSEKERMSVAVFYGLDPEREIGPIAQMLTEDQPARYRKMKVKDFLVAHLEHFSRGERVVDSLRI

SEQ ID NO: 111250 - protein, 313 aa, Zea mays subsp. mays
  misc_feature (1)..(313): Ceres Seq. ID no. 13599441
  misc_feature (163)..(264): Pfam Name: 2OG-Fe(II) oxygenase superfamily Pfam Description: 2OG-Fe(II) oxygenase superfamily
  misc_feature (1)..(81): Homolog of NCBI NO: 24413983 NR Description: ethylene-forming-enzyme-like dioxygenase-like
  misc_feature (117)..(313): Homolog of NCBI NO: 24413983 NR Description: ethylene-forming-enzyme-like dioxygenase-like
  misc_feature (1)..(313): Homolog of NCBI NO: 34898472 NR Description: Similar to Prunus armeniaca
  misc_feature (234)..(313): Homolog of NCBI NO: 24413981 NR Description: contains EST
  misc_feature (1)..(221): Homolog of NCBI NO: 24413981 NR Description: contains EST
  misc_feature (1)..(313): Homolog of NCBI NO: 34898468 NR Description: Similar to Prunus armeniaca
  misc_feature (1)..(287): Homolog of NCBI NO: 34898470 NR Description: ESTs D47168(S12332),D46350(S10967) correspond to region of the predicted gene.~Similar to Prunus armeniaca
  misc_feature (1)..(313): Homolog of NCBI NO: 33115140 NR Description: iron/ascorbate-dependent oxidoreductase [Hordeum
  misc_feature (1)..(313): Homolog of NCBI NO: 24413982 NR Description: ethylene-forming-enzyme-like dioxygenase-like
  misc_feature (1)..(313): Homolog of NCBI NO: 24413984 NR Description: ethylene-forming-enzyme-like dioxygenase-like
MPDPIPTIDLGLLSASNDAEEAAKLRSALQTWGFFKVSNHGMETSLMDSVMTASRDFFRLPLEEKRKYSNIIGGKHFQMEGYGTDQVKTQDQRLDWSDRLHLKVEPEDERNLALWPIHPKSFRDDLHEYTLRSKRIKDDILRAMAKLLELDEDCLVNQFSDRALTYARFNYYPPCPRPDLVLGIKPHSDVYALTVLLMDKDVAGLQFLRDGTWYNVPSASNYTLLINVGVTMEIMTNGIFKGPVHRVVTNSEKERMSVAVFYGLDPEREIGPIAQMLTEDQPARYRKMKVKDFLVAHLEHFSRGERVVDSLRI

SEQ ID NO: 111251 - DNA, 1110 bp, Zea mays subsp. mays
  misc_feature (1)..(1110): Ceres Seq. ID no. 13599342
acctcctccctcctgttccttcagccaccgtgagcaatggcgcccaagcggaagggtggcaacggccggaagaagaccgtcctcctctcgatcgtcaaggaggacgcccgccatgtatgcttctcaaagcgcaagcggggcctgttcagcaagaccagcgcgctgtccctgctcacgggcgcccaggtggccgccgtcatcttctcgcccggcggcaaggtcttctccttcggccacccctccgtcgacgccgtcgtcaaccgcttcatggcgggggacgccgcggtggtccaggccgccgccgacgacaacgggttgcagacgctgcagctgcagcacggcgacatgcgcaccgagctggcggaccagaagaagcggaagaagcgcgctgaggaggccctggacaaggagcgcgctgggggggaccagattgcctcgtggctccaccccgacgtgcgcgacatggggcatgacgacatggcggccttcgccgccgcgctcttgcaggtccaggccgccgtctccggacgcgccaaccaggttctcgtcgaggcctttcgcgtcgacatcagccgtatgctccaggtgcccccgccgccgccgcctccgctccagctcttcggtgccagcaccattgagttcggtagtagcagcagcagcgccaacgccgggatggagatgcaacagatgcagatggttatggagatgccaccgccgcctgacttccccgcagtgatggggatgcagcagttggttatggagatgccaccacagccaaggttcgaggcagcgatggagatgacgccgctgcaggagttcgtcgccgggatgcagaaggtgcagcggcaggggctcgggccgaacgccgacttcccctactgaggagaagaaagacaccagacagagtccgaccgagtccgagtctcagttactatattctaaataaatcgttcagatccatgtaagatccatctacgtgggtccaagatctatgcattagttggttcaattatcttagtagcaattaaatttatggcattgtaatcttttttgtatcggtagtacaatggctggaaattcgtgaatgaaatactattaagccttttcaag

SEQ ID NO: 111252 - protein, 281 aa, Zea mays subsp. mays; identical to SEQ ID NO: 63352
  misc_feature (1)..(281): Ceres Seq. ID no. 13599343
  misc_feature (19)..(67): Pfam Name: SRF-type transcription factor (DNA-binding and Pfam Description: SRF-type transcription factor (DNA-binding and
  misc_feature (10)..(142): Homolog of NCBI NO: 15230767 NR Description: MADS-box protein [Arabidopsis thaliana]
  misc_feature (1)..(142): Homolog of NCBI NO: 15218684 NR Description: MADS-box protein [Arabidopsis thaliana]
  misc_feature (10)..(127): Homolog of NCBI NO: 15218647 NR Description: MADS-box protein [Arabidopsis thaliana]
  misc_feature (10)..(180): Homolog of NCBI NO: 15226309 NR Description: MADS-box protein [Arabidopsis thaliana]
  misc_feature (6)..(168): Homolog of NCBI NO: 32402436 NR Description: MADS-box protein AGL62 [Arabidopsis thaliana]
  misc_feature (6)..(168): Homolog of NCBI NO: 15239333 NR Description: MADS-box protein [Arabidopsis thaliana]
  misc_feature (4)..(186): Homolog of NCBI NO: 25412255 NR Description: probable MADS-box protein [imported] -
  misc_feature (1)..(186): Homolog of NCBI NO: 30682571 NR Description: MADS-box protein [Arabidopsis thaliana]
  misc_feature (10)..(159): Homolog of NCBI NO: 15234456 NR Description: MADS-box protein [Arabidopsis thaliana]
  misc_feature (2)..(176): Homolog of NCBI NO: 34906076 NR Description: P0459B04.16 [Oryza sativa (japonica

SEQ ID NO: 111253 - protein, 244 aa, Zea mays subsp. mays
  misc_feature (1)..(244): Ceres Seq. ID no. 13599344
  misc_feature (69)..(201): Homolog of NCBI NO: 7248459 NR Description: arabinogalactan protein [Zea mays]
  misc_feature (2)..(220): Homolog of NCBI NO: 13592175 NR Description: ppg3 [Leishmania major]
  misc_feature (3)..(220): Homolog of NCBI NO: 13592175 NR Description: ppg3 [Leishmania major]
  misc_feature (3)..(220): Homolog of NCBI NO: 5420387 NR Description: proteophosphoglycan [Leishmania major]
  misc_feature (3)..(220): Homolog of NCBI NO: 13592175 NR Description: ppg3 [Leishmania major]
  misc_feature (3)..(220): Homolog of NCBI NO: 13592175 NR Description: ppg3 [Leishmania major]
  misc_feature (3)..(220): Homolog of NCBI NO: 13592175 NR Description: ppg3 [Leishmania major]
  misc_feature (3)..(220): Homolog of NCBI NO: 13592175 NR Description: ppg3 [Leishmania major]
  misc_feature (3)..(220): Homolog of NCBI NO: 13592175 NR Description: ppg3 [Leishmania major]
  misc_feature (3)..(222): Homolog of NCBI NO: 11359723 NR Description: proteophosphoglycan, membrane-associated
PPPSCSFSHREQWRPSGRVATAGRRPSSSRSSRRTPAMYASQSASGACSARPARCPCSRAPRWPPSSSRPAARSSPSATPPSTPSSTASWRGTPRWSRPPPTTTGCRRCSCSTATCAPSWRTRRSGRSALRRPWTRSALGGTRLPRGSTPTCATWGMTTWRPSPPRSCRSRPPSPDAPTRFSSRPFASTSAVCSRCPRRRRLRSSSSVPAPLSSVVAAAAPTPGWRCNRCRWLWRCHRRLTSPQ

SEQ ID NO: 111254 - protein, 207 aa, Zea mays subsp. mays; identical to SEQ ID NO: 63354
  misc_feature (1)..(207): Ceres Seq. ID no. 13599345
  misc_feature (32)..(164): Homolog of NCBI NO: 7248459 NR Description: arabinogalactan protein [Zea mays]
  misc_feature (1)..(183): Homolog of NCBI NO: 13592175 NR Description: ppg3 [Leishmania major]
  misc_feature (1)..(183): Homolog of NCBI NO: 13592175 NR Description: ppg3 [Leishmania major]
  misc_feature (1)..(183): Homolog of NCBI NO: 5420387 NR Description: proteophosphoglycan [Leishmania major]
  misc_feature (1)..(183): Homolog of NCBI NO: 13592175 NR Description: ppg3 [Leishmania major]
  misc_feature (1)..(183): Homolog of NCBI NO: 13592175 NR Description: ppg3 [Leishmania major]
  misc_feature (1)..(183): Homolog of NCBI NO: 13592175 NR Description: ppg3 [Leishmania major]
  misc_feature (1)..(183): Homolog of NCBI NO: 13592175 NR Description: ppg3 [Leishmania major]
  misc_feature (1)..(183): Homolog of NCBI NO: 13592175 NR Description: ppg3 [Leishmania major]
  misc_feature (1)..(185): Homolog of NCBI NO: 11359723 NR Description: proteophosphoglycan, membrane-associated

SEQ ID NO: 111255 - DNA, 750 bp, Zea mays subsp. mays
  misc_feature (1)..(750): Ceres Seq. ID no. 13599645
  misc_feature: MA Experiment ID: 108522 Result: Up-regulated in Transcription
  misc_feature: MA Experiment 108522 PARAMETER Experiment Name: Zm_42deg_Heat_P Parameter: Age (day) Value: 8
  misc_feature: MA Experiment 108522 PARAMETER Experiment Name: Zm_42deg_Heat_P Parameter: Organism Value: Zea mays
  misc_feature: MA Experiment 108522 PARAMETER Experiment Name: Zm_42deg_Heat_P Parameter: Plant Line Value: 35A19
  misc_feature: MA Experiment 108522 PARAMETER Experiment Name: Zm_42deg_Heat_P Parameter: Temperature (deg C) Value: 42 vs. 22
  misc_feature: MA Experiment 108522 PARAMETER Experiment Name: Zm_42deg_Heat_P Parameter: Timepoint (hr) Value: 1
  misc_feature: MA Experiment 108522 PARAMETER Experiment Name: Zm_42deg_Heat_P Parameter: Tissue Value: Aerial
atcacgttcaacaagctcatctaccaatccagcaaactagctaaaacccacttctccaaaatggcgtcccagcttgtcgagagccaccgccccggtgccgaggtccacaaggggaacgatatctgcaagaagaagacggttgagcttctcgaagagctcggcctcccgaaaggcctctttcctatggatgacatcgaggaggtcgggcacaactgtgagagtgggttcgtgtggatacttcagaagaagaagctagagcacacgttcaacaagctcaaccagaccgtctcctacgacactgaggtgaccgcttttgtggaaaagggcaagatgaagaaggtcaccggggtcaagatcgaggacatgtctttggtcgaggtctatgtggatgagtcttctgctgataaggttaccatcaagaccaacaccggtctgtctgacacccatgatgcggccgtgttcgctctcggagaatagggagctactatttacaaaggccagaagaataaagtcagaatggttcggcactgcagttcaaatgttatgcagaagtatatgtttccgttttctttgtaatctaataaaggctgttgcatgaatgttgcttcctttcagcccatgttatgcagaaatttatgtttccgttttctttgtaatgtaataaaggatgttgcacgaatgttgcttcctttcagcccgtaagcgtactccaaatgtaatgaataacacttataccgcctcctatatccc

SEQ ID NO: 111256 - protein, 158 aa, Zea mays subsp. mays
  misc_feature (1)..(158): Ceres Seq. ID no. 15218873
  misc_feature (24)..(157): Pfam Name: Protein of unknown function, DUF538 Pfam Description: Protein of unknown function, DUF538
  misc_feature (21)..(155): Homolog of NCBI NO: 34903866 NR Description: unnamed protein product [Oryza sativa (japonica
  misc_feature (21)..(158): Homolog of NCBI NO: 34915378 NR Description: hypothetical protein~similar to Oryza sativa
  misc_feature (21)..(158): Homolog of NCBI NO: 34915416 NR Description: hypothetical protein~similar to Arabidopsis
  misc_feature (21)..(158): Homolog of NCBI NO: 34915430 NR Description: hypothetical protein~similar to Arabidopsis
  misc_feature (21)..(158): Homolog of NCBI NO: 34915376 NR Description: hypothetical protein~similar to Oryza sativa
  misc_feature (21)..(158): Homolog of NCBI NO: 34915426 NR Description: hypothetical protein~similar to Arabidopsis
  misc_feature (21)..(158): Homolog of NCBI NO: 34915422 NR Description: hypothetical protein~similar to Arabidopsis
  misc_feature (21)..(158): Homolog of NCBI NO: 33146557 NR Description: unknown protein [Oryza sativa (japonica
  misc_feature (21)..(158): Homolog of NCBI NO: 34915418 NR Description: hypothetical protein~similar to Arabidopsis
  misc_feature (21)..(158): Homolog of NCBI NO: 34915410 NR Description: hypothetical protein~similar to Arabidopsis
ITFNKLIYQSSKLAKTHFSKMASQLVESHRPGAEVHKGNDICKKKTVELLEELGLPKGLFPMDDIEEVGHNCESGFVWILQKKKLEHTFNKLNQTVSYDTEVTAFVEKGKMKKVTGVKIEDMSLVEVYVDESSADKVTIKTNTGLSDTHDAAVFALGE

SEQ ID NO: 111257 - protein, 138 aa, Zea mays subsp. mays
  misc_feature (1)..(138): Ceres Seq. ID no. 15218874
  misc_feature (4)..(137): Pfam Name: Protein of unknown function, DUF538 Pfam Description: Protein of unknown function, DUF538
  misc_feature (1)..(138): Homolog of NCBI NO: 34915416 NR Description: hypothetical protein~similar to Arabidopsis
  misc_feature (1)..(138): Homolog of NCBI NO: 34915430 NR Description: hypothetical protein~similar to Arabidopsis
  misc_feature (1)..(138): Homolog of NCBI NO: 34915376 NR Description: hypothetical protein~similar to Oryza sativa
  misc_feature (1)..(138): Homolog of NCBI NO: 34915426 NR Description: hypothetical protein~similar to Arabidopsis
  misc_feature (1)..(135): Homolog of NCBI NO: 34903866 NR Description: unnamed protein product [Oryza sativa (japonica
  misc_feature (1)..(138): Homolog of NCBI NO: 34915378 NR Description: hypothetical protein~similar to Oryza sativa
  misc_feature (1)..(138): Homolog of NCBI NO: 34915422 NR Description: hypothetical protein~similar to Arabidopsis
  misc_feature (1)..(138): Homolog of NCBI NO: 33146557 NR Description: unknown protein [Oryza sativa (japonica
  misc_feature (1)..(138): Homolog of NCBI NO: 34915418 NR Description: hypothetical protein~similar to Arabidopsis
  misc_feature (1)..(138): Homolog of NCBI NO: 34915410 NR Description: hypothetical protein~similar to Arabidopsis
MASQLVESHRPGAEVHKGNDICKKKTVELLEELGLPKGLFPMDDIEEVGHNCESGFVWILQKKKLEHTFNKLNQTVSYDTEVTAFVEKGKMKKVTGVKIEDMSLVEVYVDESSADKVTIKTNTGLSDTHDAAVFALGE

SEQ ID NO: 111258 - protein, 97 aa, Zea mays subsp. mays
  misc_feature (1)..(97): Ceres Seq. ID no. 15218875
  misc_feature (1)..(96): Pfam Name: Protein of unknown function, DUF538 Pfam Description: Protein of unknown function, DUF538
  misc_feature (1)..(94): Homolog of NCBI NO: 34903866 NR Description: unnamed protein product [Oryza sativa (japonica
  misc_feature (1)..(97): Homolog of NCBI NO: 34915378 NR Description: hypothetical protein~similar to Oryza sativa
  misc_feature (1)..(97): Homolog of NCBI NO: 34915416 NR Description: hypothetical protein~similar to Arabidopsis
  misc_feature (1)..(97): Homolog of NCBI NO: 34915430 NR Description: hypothetical protein~similar to Arabidopsis
  misc_feature (1)..(97): Homolog of NCBI NO: 34915376 NR Description: hypothetical protein~similar to Oryza sativa
  misc_feature (1)..(97): Homolog of NCBI NO: 34915426 NR Description: hypothetical protein~similar to Arabidopsis
  misc_feature (1)..(97): Homolog of NCBI NO: 34915422 NR Description: hypothetical protein~similar to Arabidopsis
  misc_feature (1)..(97): Homolog of NCBI NO: 33146557 NR Description: unknown protein [Oryza sativa (japonica
  misc_feature (1)..(97): Homolog of NCBI NO: 34915418 NR Description: hypothetical protein~similar to Arabidopsis
  misc_feature (1)..(97): Homolog of NCBI NO: 34915410 NR Description: hypothetical protein~similar to Arabidopsis
MDDIEEVGHNCESGFVWILQKKKLEHTFNKLNQTVSYDTEVTAFVEKGKMKKVTGVKIEDMSLVEVYVDESSADKVTIKTNTGLSDTHDAAVFALGE

SEQ ID NO: 111259 - DNA, 915 bp, Zea mays subsp. mays
  misc_feature (1)..(915): Ceres Seq. ID no. 12589876
accataagtaatttaatacttaattaccgcatttgagaaaatctcacattcacacatttaaagatgacaaggaccattatgctcctatctattgccgtcgccgtcttggccatcaccgccgtcttcgccgctgatcctccaacaccagccggagcgcctaaagccaacgccaacaaaagctcacccactgcttctcccaccgcagcagcatcccccaaacaaccctccggagcagcatccccaaaaccaaccgccgcaggatccccaaaaccacccgccgcagggtccccaaaacaaaccgcttccgccccaacctcgccgcctacggcctctgctcccaccaccaccaagaagaactcctccgccactccaagcgcttccccatcttcaggtggtggctcccccgcaaacgctccaaaatcttcgtcagccaaaactccggctccaagccccgactcaagctccggaggtcctaccagctcatccgaaggtcctacaagctcatcggaaggtcctacaagctcgtccgaaggccctacaagctcgtctgaaggtcctactagctcgtccgactcaccatccgcatcgtctccgccgtctccgacaccagacatgtctccgtcgtcgtcccctgatgaaggacccaccagtgaaggccccgaagcttcagctccgacgggaagagcctcgtcgcttgagatctctatctctggatctgttctcatcgcagctgcatggttattcttcatatgatgaaatgttactcttgtgttttttattacacttataaagggctcgtttcatttaatattttttggttccttaaaaaaggtttgcactcaggttcagttgaattcgtgcatagtatggaggttaggatttgatatatgttgtaataaatgtttcgcttgggtt

SEQ ID NO: 111260 - protein, 229 aa, Zea mays subsp. mays
  misc_feature (1)..(229): Ceres Seq. ID no. 12589877
  misc_feature (35)..(205): Pfam Name: Glycoprotein GG/GX Pfam Description: Glycoprotein GG/GX
  misc_feature (16)..(218): Homolog of NCBI NO: 13592175 NR Description: ppg3 [Leishmania major]
  misc_feature (16)..(224): Homolog of NCBI NO: 13592175 NR Description: ppg3 [Leishmania major]
  misc_feature (22)..(224): Homolog of NCBI NO: 5420387 NR Description: proteophosphoglycan [Leishmania major]
  misc_feature (16)..(218): Homolog of NCBI NO: 11359723 NR Description: proteophosphoglycan, membrane-associated
  misc_feature (2)..(204): Homolog of NCBI NO: 32699068 NR Description: hypothetical protein FLJ35107 [Homo sapiens]
  misc_feature (16)..(224): Homolog of NCBI NO: 13592175 NR Description: ppg3 [Leishmania major]
  misc_feature (29)..(218): Homolog of NCBI NO: 11359723 NR Description: proteophosphoglycan, membrane-associated
  misc_feature (10)..(224): Homolog of NCBI NO: 5420387 NR Description: proteophosphoglycan [Leishmania major]
  misc_feature (16)..(224): Homolog of NCBI NO: 13592175 NR Description: ppg3 [Leishmania major]
  misc_feature (16)..(224): Homolog of NCBI NO: 13592175 NR Description: ppg3 [Leishmania major]
MTRTIMLLSIAVAVLAITAVFAADPPTPAGAPKANANKSSPTASPTAAASPKQPSGAASPKPTAAGSPKPPAAGSPKQTASAPTSPPTASAPTTTKKNSSATPSASPSSGGGSPANAPKSSSAKTPAPSPDSSSGGPTSSSEGPTSSSEGPTSSSEGPTSSSEGPTSSSDSPSASSPPSPTPDMSPSSSPDEGPTSEGPEASAPTGRASSLEISISGSVLIAAAWLFFI

SEQ ID NO: 111261 - protein, 224 aa, Zea mays subsp. mays
  misc_feature (1)..(224): Ceres Seq. ID no. 12589878
  misc_feature (30)..(200): Pfam Name: Glycoprotein GG/GX Pfam Description: Glycoprotein GG/GX
  misc_feature (11)..(213): Homolog of NCBI NO: 13592175 NR Description: ppg3 [Leishmania major]
  misc_feature (11)..(219): Homolog of NCBI NO: 13592175 NR Description: ppg3 [Leishmania major]
  misc_feature (17)..(219): Homolog of NCBI NO: 5420387 NR Description: proteophosphoglycan [Leishmania major]
  misc_feature (11)..(213): Homolog of NCBI NO: 11359723 NR Description: proteophosphoglycan, membrane-associated
  misc_feature (1)..(199): Homolog of NCBI NO: 32699068 NR Description: hypothetical protein FLJ35107 [Homo sapiens]
  misc_feature (11)..(219): Homolog of NCBI NO: 13592175 NR Description: ppg3 [Leishmania major]
  misc_feature (24)..(213): Homolog of NCBI NO: 11359723 NR Description: proteophosphoglycan, membrane-associated
  misc_feature (5)..(219): Homolog of NCBI NO: 5420387 NR Description: proteophosphoglycan [Leishmania major]
  misc_feature (11)..(219): Homolog of NCBI NO: 13592175 NR Description: ppg3 [Leishmania major]
  misc_feature (11)..(219): Homolog of NCBI NO: 13592175 NR Description: ppg3 [Leishmania major]
MLLSIAVAVLAITAVFAADPPTPAGAPKANANKSSPTASPTAAASPKQPSGAASPKPTAAGSPKPPAAGSPKQTASAPTSPPTASAPTTTKKNSSATPSASPSSGGGSPANAPKSSSAKTPAPSPDSSSGGPTSSSEGPTSSSEGPTSSSEGPTSSSEGPTSSSDSPSASSPPSPTPDMSPSSSPDEGPTSEGPEASAPTGRASSLEISISGSVLIAAAWLFFI

SEQ ID NO: 111262 - DNA, 1209 bp, Zea mays subsp. mays
  misc_feature (1)..(1209): Ceres Seq. ID no. 13623029
ctcttccgcccgcggcggctcaaacttaaaccctagagccgctcccctcctcgcctccgaagcgctcgccacccgattcgcgagtcccctcctcccagggaggcgcttccgcgaaggtccgctgctgcggtcatggctcgcgtctacgtggggaatctggatccgcgcgccactgcgcgcgagatcgaggacgagttccgcgtgtttggggttctcaagagtgtgtgggttgctagaaagccaccaggatttgctttcattgactttgatgagaccagggacgcaaaggatgcaattcgtgaattggatggcaagaatgggtggagagttgagctgtcaaccaaatctggtagtggccgtggccgagaacgtgaacgctctggaggttctgatatgaagtgctatgagtgtggtgaaagtggccactttgcacgagagtgtcgcctacggattggttctgggggcctgggtagcggaagacgccgcagccggagcccgaggcaccgcagccgtagccgtagcccaagataccgcaggagcccaagctatggcagaaggagctacagcccacgggatcggtctcccaggaagcgaagttacagcagatcaccaccgcctccccgggcgcggagtatcagcaggtctccaccacctgcccgtgcgcgaagcatcagcaggtctccaccgccggcccgtgggcgaagcatcagcaggtcaccgccgcctgcccgtgcgcgaaacatcagcaggtcaccaccgcctcctcgcgccagaagcatcagtaagtcaccaccgccagcccgtgaacggagctatagcaggtccccagcacagccaccccagcgtgaggagtccccttatgctgataacgcgtgagcacttggttccacaatgctggaagtgttggggggcgggggcctccacttgtttccttgaatgtttcggtatgactattgaatggccaggcggccgagtattgttcttcgctggcatttgtgttcttttgctgctgatacaattgcggaagcgggatttctcttgactgtatgactctagcgtatgtagttggtcttgagacaagatatgttttctttttctgtaacatttgtactgttggattattcggatgctgtgcatggatttttatgtgctgatgaaactgtttcttgaatattaatgtgtcaccgtcttgttacgtttctgttctcc

SEQ ID NO: 111263 - protein, 247 aa, Zea mays subsp. mays
  misc_feature (1)..(247): Ceres Seq. ID no. 13623030
  misc_feature (4)..(61): Pfam Name: RNA recognition motif. (a.k.a. RRM, RBD, or RNP domain) Pfam Description: RNA recognition motif. (a.k.a. RRM, RBD, or RNP
  misc_feature (3)..(220): Homolog of NCBI NO: 26337671 NR Description: unnamed protein product [Mus musculus]
  misc_feature (3)..(220): Homolog of NCBI NO: 22122585 NR Description: RIKEN cDNA 9430065L19 [Mus musculus]
  misc_feature (3)..(220): Homolog of NCBI NO: 34862002 NR Description: similar to 9430065L19Rik protein [Rattus
  misc_feature (2)..(207): Homolog of NCBI NO: 31222328 NR Description: ENSANGP00000018287 [Anopheles gambiae]
  misc_feature (1)..(189): Homolog of NCBI NO: 25294319 NR Description: splicing factor RSZp21 [imported] - Arabidopsis
  misc_feature (1)..(189): Homolog of NCBI NO: 25294317 NR Description: protein T23E23.2 [imported] - Arabidopsis
  misc_feature (1)..(199): Homolog of NCBI NO: 18395314 NR Description: splicing factor SRZ_21 [Arabidopsis thaliana]
  misc_feature (1)..(192): Homolog of NCBI NO: 15224171 NR Description: RSZp22 splicing factor -related [Arabidopsis
  misc_feature (1)..(190): Homolog of NCBI NO: 25294318 NR Description: splicing factor RSZp22 [validated] - Arabidopsis
  misc_feature (1)..(190): Homolog of NCBI NO: 15236000 NR Description: splicing factor SRZ_22 [Arabidopsis thaliana]
MARVYVGNLDPRATAREIEDEFRVFGVLKSVWVARKPPGFAFIDFDETRDAKDAIRELDGKNGWRVELSTKSGSGRGRERERSGGSDMKCYECGESGHFARECRLRIGSGGLGSGRRRSRSPRHRSRSRSPRYRRSPSYGRRSYSPRDRSPRKRSYSRSPPPPRARSISRSPPPARARSISRSPPPARGRSISRSPPPARARNISRSPPPPRARSISKSPPPARERSYSRSPAQPPQREESPYADNA

SEQ ID NO: 111264 - protein, 212 aa, Zea mays subsp. mays
  misc_feature (1)..(212): Ceres Seq. ID no. 13623031
MSVVKVATLHESVAYGLVLGAWVAEDAAAGARGTAAVAVAQDTAGAQAMAEGATAHGIGLPGSEVTADHHRLPGRGVSAGLHHLPVREASAGLHRRPVGEASAGHRRLPVRETSAGHHRLLAPEASVSHHRQPVNGAIAGPQHSHPSVRSPLMLITREHLVPQCWKCWGAGASTCFLECFGMTIEWPGGRVLFFAGICVLLLLIQLRKRDFS

SEQ ID NO: 111265 - protein, 164 aa, Zea mays subsp. mays
  misc_feature (1)..(164): Ceres Seq. ID no. 13623032
MAEGATAHGIGLPGSEVTADHHRLPGRGVSAGLHHLPVREASAGLHRRPVGEASAGHRRLPVRETSAGHHRLLAPEASVSHHRQPVNGAIAGPQHSHPSVRSPLMLITREHLVPQCWKCWGAGASTCFLECFGMTIEWPGGRVLFFAGICVLLLLIQLRKRDFS

SEQ ID NO: 111266 - DNA, 832 bp, Zea mays subsp. mays
  misc_feature (1)..(832): Ceres Seq. ID no. 12589963
attctctgccccaaacgcacaagccctagccgccgaccaccatggcggcggcgccacctccggacccgacggttctaattgaagacctcgtcgaggagttcctcctccgcattcccccggatgaccccgccagcctcgctcgcgccgccctcgtcagtaggcactggcaccgcgtgatcaccggccccgtcttccgccgtagattccagtagaacctgacgcccaaattaacggcatggccactgtgcttattgccacagaggacggcaggctaggagttgccaaaacaagcaattcaacgcttggttgttcaacacttcacctgtggataagggaccatgaaagatgggaagaaagaaggcccattgagcttcgtatgctgctcccagatgatgccctacgcgatcctcaattcccgcctgaattttttccagacaagccttggctggctggctttgcagggacaagagctggtgtcattttctttaagacacgtcttgggtattttgttgttgatctgaattcagggacgagcaagaacataggcgagtgcttaggttggggttgcattattccctatgtgagcttctggcactccagcgccaggagcaatatccacagatgagggaccagaagctggtctcgagggctaggatctggcttgtgaagtgaataagaagctctaaatcaagaaggatatttactagaccagaagcatggtttgggtgggacggatatctctacatgattttgttgctgttctgaccttgtttgtgctcctgaacttgagtttgcatattgcaatcaaattatgataatggtattggctccc

SEQ ID NO: 111267 - protein, 129 aa, Zea mays subsp. mays
  misc_feature (1)..(129): Ceres Seq. ID no. 12589964
  misc_feature (5)..(119): Homolog of NCBI NO: 34015373 NR Description: hypothetical protein OSJNBa0070J19.13
  misc_feature (5)..(124): Homolog of NCBI NO: 35215058 NR Description: hypothetical protein [Oryza sativa (japonica
  misc_feature (71)..(127): Homolog of NCBI NO: 34915428 NR Description: hypothetical protein~similar to Oryza sativa
  misc_feature (1)..(121): Homolog of NCBI NO: 34915420 NR Description: contains EST C98814(E3124)~similar to Oryza
MATVLIATEDGRLGVAKTSNSTLGCSTLHLWIRDHERWEERRPIELRMLLPDDALRDPQFPPEFFPDKPWLAGFAGTRAGVIFFKTRLGYFVVDLNSGTSKNIGECLGWGCIIPYVSFWHSSARSNIHR

SEQ ID NO: 111268 - protein, 82 aa, Zea mays subsp. mays
  misc_feature (1)..(82): Ceres Seq. ID no. 12589965
  misc_feature (1)..(72): Homolog of NCBI NO: 34015373 NR Description: hypothetical protein OSJNBa0070J19.13
  misc_feature (1)..(77): Homolog of NCBI NO: 35215058 NR Description: hypothetical protein [Oryza sativa (japonica
  misc_feature (24)..(80): Homolog of NCBI NO: 34915428 NR Description: hypothetical protein~similar to Oryza sativa
  misc_feature (1)..(74): Homolog of NCBI NO: 34915420 NR Description: contains EST C98814(E3124)~similar to Oryza
MLLPDDALRDPQFPPEFFPDKPWLAGFAGTRAGVIFFKTRLGYFVVDLNSGTSKNIGECLGWGCIIPYVSFWHSSARSNIHR

SEQ ID NO: 111269 - DNA, 1317 bp, Zea mays subsp. mays
  misc_feature (1)..(1317): Ceres Seq. ID no. 13599348
ggacgatcaggatgtctgattgaccaatcagagcccggttaatcgggctggtcgtcaactaatcgtgattagtcagctgatcgcccctctggcgatcaggagcgatcagccgatctgaaaacattgcttctggggctaggggccgagctgccgcagacaacaccaactgcacattgctgcataggaggtcaggagaaggcgctccagcgcagcacggcagcagggatttctggacggctctgattgaataaaccgtgaaggagatgccctggaatagattcatgcccttcctttcaaaatgttgtacttctaccgttcagacatcttcatcatattcatctttttcctcgtccttctccccgatacaaccatggttatttgtgggtcttggcaaccctggtgagaagtatcaatccaccaggcacaacgtgggttttgatatgatagatgcatttgcgcattcccagggtatacccctgactacacattacttcaaagcactctttggtgaagggatggttgatggagtccctgttcttcttgccaagccccagacttatatgaatctcagtggagaatctgtcggcccacttgctgcctattataaactgccacttaatcgtgtcctagtggcgtttgatgacatggacttgccatgtggagttctccgtctacagccaaaaggaggttctggacgacacaatggatcgattcagccgtgagagagggtgtcgatattctgaagatggtggctgcgaggggtttgacagaggcggcaaaactgacaaatgcggaccagaagtataagcatctgagatcacatggtatccagactaacgatgactagacaaagcttactagggggactactcttttcagcacatctcccgatattcagactaaagacgaaactcgttttatggcctgttgtctagagcatggtaggcttgagaaacaggcgctcgatgagcccctttagaccgtcgctgaacgtgaacgcgtccttgttgtcaccgtacatcaacggcatgctggcggttatgtcggcaactcgctgcactgctggaagtagtttgctgttctcaaagcgtgctccgtttatagttttccatgcatcttcaatcagggagcttatctgtgcaaaggcaacctcagctgtgacgccatgctcactgatgtagcattcgaccgagctgtccacgtcgtttttgttctttccacgctgcgaaagaacacatccatttatttattatttattactgggcaacaatccaaaggacaagaatacttaatggtcttattaaagaattaatcaag

SEQ ID NO: 111270 - protein, 152 aa, Zea mays subsp. mays
  misc_feature (1)..(152): Ceres Seq. ID no. 13599349
  misc_feature (5)..(148): Homolog of NCBI NO: 34911418 NR Description: putative CRS2 [Oryza sativa (japonica
  misc_feature (36)..(148): Homolog of NCBI NO: 15240875 NR Description: CRS2 -related protein [Arabidopsis thaliana]
  misc_feature (36)..(148): Homolog of NCBI NO: 40889730 NR Description: Chain A, Crystal Structure Of The Chloroplast
  misc_feature (33)..(148): Homolog of NCBI NO: 6752919 NR Description: CRS2 [Zea mays]
  misc_feature (36)..(148): Homolog of NCBI NO: 40889731 NR Description: Chain A, Structure Of The Group Ii Intron
  misc_feature (36)..(148): Homolog of NCBI NO: 40889732 NR Description: Chain A, Structure Of The Chloroplast Group Ii
  misc_feature (12)..(148): Homolog of NCBI NO: 15237280 NR Description: CRS2-related protein [Arabidopsis thaliana]
  misc_feature (33)..(148): Homolog of NCBI NO: 26453108 NR Description: unknown protein [Arabidopsis thaliana]
  misc_feature (33)..(148): Homolog of NCBI NO: 30685853 NR Description: expressed protein [Arabidopsis thaliana]
  misc_feature (35)..(148): Homolog of NCBI NO: 30687503 NR Description: expressed protein [Arabidopsis thaliana]
MPWNRFMPFLSKCCTSTVQTSSSYSSFSSSFSPIQPWLFVGLGNPGEKYQSTRHNVGFDMIDAFAHSQGIPLTTHYFKALFGEGMVDGVPVLLAKPQTYMNLSGESVGPLAAYYKLPLNRVLVAFDDMDLPCGVLRLQPKGGSGRHNGSIQP

SEQ ID NO: 111271 - protein, 146 aa, Zea mays subsp. mays
  misc_feature (1)..(146): Ceres Seq. ID no. 13599350
  misc_feature (1)..(142): Homolog of NCBI NO: 34911418 NR Description: putative CRS2 [Oryza sativa (japonica
  misc_feature (30)..(142): Homolog of NCBI NO: 15240875 NR Description: CRS2 -related protein [Arabidopsis thaliana]
  misc_feature (30)..(142): Homolog of NCBI NO: 40889730 NR Description: Chain A, Crystal Structure Of The Chloroplast
  misc_feature (27)..(142): Homolog of NCBI NO: 6752919 NR Description: CRS2 [Zea mays]
  misc_feature (30)..(142): Homolog of NCBI NO: 40889731 NR Description: Chain A, Structure Of The Group Ii Intron
  misc_feature (30)..(142): Homolog of NCBI NO: 40889732 NR Description: Chain A, Structure Of The Chloroplast Group Ii
  misc_feature (6)..(142): Homolog of NCBI NO: 15237280 NR Description: CRS2-related protein [Arabidopsis thaliana]
  misc_feature (27)..(142): Homolog of NCBI NO: 26453108 NR Description: unknown protein [Arabidopsis thaliana]
  misc_feature (27)..(142): Homolog of NCBI NO: 30685853 NR Description: expressed protein [Arabidopsis thaliana]
  misc_feature (29)..(142): Homolog of NCBI NO: 30687503 NR Description: expressed protein [Arabidopsis thaliana]
MPFLSKCCTSTVQTSSSYSSFSSSFSPIQPWLFVGLGNPGEKYQSTRHNVGFDMIDAFAHSQGIPLTTHYFKALFGEGMVDGVPVLLAKPQTYMNLSGESVGPLAAYYKLPLNRVLVAFDDMDLPCGVLRLQPKGGSGRHNGSIQP

SEQ ID NO: 111272 - protein, 93 aa, Zea mays subsp. mays
  misc_feature (1)..(93): Ceres Seq. ID no. 13599351
  misc_feature (1)..(89): Homolog of NCBI NO: 34911418 NR Description: putative CRS2 [Oryza sativa (japonica
  misc_feature (1)..(89): Homolog of NCBI NO: 15240875 NR Description: CRS2 -related protein [Arabidopsis thaliana]
  misc_feature (1)..(89): Homolog of NCBI NO: 40889730 NR Description: Chain A, Crystal Structure Of The Chloroplast
  misc_feature (1)..(89): Homolog of NCBI NO: 6752919 NR Description: CRS2 [Zea mays]
  misc_feature (1)..(89): Homolog of NCBI NO: 40889731 NR Description: Chain A, Structure Of The Group Ii Intron
  misc_feature (1)..(89): Homolog of NCBI NO: 40889732 NR Description: Chain A, Structure Of The Chloroplast Group Ii
  misc_feature (1)..(89): Homolog of NCBI NO: 15237280 NR Description: CRS2-related protein [Arabidopsis thaliana]
  misc_feature (1)..(89): Homolog of NCBI NO: 26453108 NR Description: unknown protein [Arabidopsis thaliana]
  misc_feature (1)..(89): Homolog of NCBI NO: 30685853 NR Description: expressed protein [Arabidopsis thaliana]
  misc_feature (1)..(89): Homolog of NCBI NO: 30687503 NR Description: expressed protein [Arabidopsis thaliana]
MIDAFAHSQGIPLTTHYFKALFGEGMVDGVPVLLAKPQTYMNLSGESVGPLAAYYKLPLNRVLVAFDDMDLPCGVLRLQPKGGSGRHNGSIQP

SEQ ID NO: 111273 - DNA, 707 bp, Zea mays subsp. mays
  misc_feature (1)..(707): Ceres Seq. ID no. 12590171
tacatctatgcaccatacctccacatacaatgcttctctatgcaaactgatggaatactgcttgaccccagccataactgtgcttgaggaccgtgtgaaagaaaacgaacttcggttagctatgctagtggaggaggctaaacaactggaggccgagcagagcacgaaaactggctctcctcgccgtgcgatgcccggagggactaccagtggcatcacttcgccaaggggccaggacaagtacccttccggcagacaagggggccctataagccctagcagcagcggccggaggaaggctccttgaatccgaccttgctcgccattctgtgatgatggatagtccgattctcggccctgcctgatgctttctggaaccccaaacctgtcccttcgcgcgaggggtgaagtcgcaatgcaaatgtacatacccatctcctttcagcgcctggcccgccgtccttctgtggaagtaaccaaccaacagtggttcccttttgctttgtgttgtccttgcgccaaatccttttgcctggttgcgctgagcttgtaatgtgtactcactggcgcgacgagtctcgggcagtggttgcgctgagcttgtaatgtgtactcactggcgcgacgagtctcgggcaggctttctagttggaaaaaactcttgtaccaatcctgttgtcgaaatgttcagggaagcctcgcttgcc

SEQ ID NO: 111274 - protein, 101 aa, Zea mays subsp. mays
  misc_feature (1)..(101): Ceres Seq. ID no. 12590172
  misc_feature (3)..(70): Homolog of NCBI NO: 20147355 NR Description: At1g80210/F18B13_28 [Arabidopsis thaliana]
  misc_feature (3)..(77): Homolog of NCBI NO: 30680023 NR Description: expressed protein [Arabidopsis thaliana]
  misc_feature (3)..(77): Homolog of NCBI NO: 19715647 NR Description: AT3g06820/F3E22_4 [Arabidopsis thaliana]
TSMHHTSTYNASLCKLMEYCLTPAITVLEDRVKENELRLAMLVEEAKQLEAEQSTKTGSPRRAMPGGTTSGITSPRGQDKYPSGRQGGPISPSSSGRRKAP

SEQ ID NO: 111275 - protein, 99 aa, Zea mays subsp. mays
  misc_feature (1)..(99): Ceres Seq. ID no. 12590173
  misc_feature (1)..(68): Homolog of NCBI NO: 20147355 NR Description: At1g80210/F18B13_28 [Arabidopsis thaliana]
  misc_feature (1)..(75): Homolog of NCBI NO: 30680023 NR Description: expressed protein [Arabidopsis thaliana]
  misc_feature (1)..(75): Homolog of NCBI NO: 19715647 NR Description: AT3g06820/F3E22_4 [Arabidopsis thaliana]
MHHTSTYNASLCKLMEYCLTPAITVLEDRVKENELRLAMLVEEAKQLEAEQSTKTGSPRRAMPGGTTSGITSPRGQDKYPSGRQGGPISPSSSGRRKAP

SEQ ID NO: 111276 - protein, 85 aa, Zea mays subsp. mays
  misc_feature (1)..(85): Ceres Seq. ID no. 12590174
  misc_feature (1)..(54): Homolog of NCBI NO: 20147355 NR Description: At1g80210/F18B13_28 [Arabidopsis thaliana]
  misc_feature (1)..(61): Homolog of NCBI NO: 30680023 NR Description: expressed protein [Arabidopsis thaliana]
  misc_feature (1)..(61): Homolog of NCBI NO: 19715647 NR Description: AT3g06820/F3E22_4 [Arabidopsis thaliana]
MEYCLTPAITVLEDRVKENELRLAMLVEEAKQLEAEQSTKTGSPRRAMPGGTTSGITSPRGQDKYPSGRQGGPISPSSSGRRKAP

SEQ ID NO: 111277 - DNA, 469 bp, Zea mays subsp. mays
  misc_feature (1)..(469): Ceres Seq. ID no. 13599357
ccacaaaccccgctgcgccaatagctcttccccagaacaatagactagtcaatgaaggggaggtttattaagcagagcagaagaatatagttaatggttcctggatgagaagtggaaatgctactggctgtggaaggaggaggttttttctcatcgtcagcttcaggatacagtcatggcctcgctcttttgctgcttggacggaaagaagaagagaagcctgtcaaggtatcaccatggagtcagtaccgactagtcgatggggaagctgagcatgtttgtcatctggcttccacgaaaaaccaagctccccgtaaatgtgctcccttcatctgcttcggtagcactgctttggagctcgaaggggcgtctcctccgaaactgagttcaagcaacactttggactctttggaggagccatcccgttcaacaaagaagaaggttaccactaatggttccataactggag

SEQ ID NO: 111278 - protein, 117 aa, Zea mays subsp. mays
  misc_feature (1)..(117): Ceres Seq. ID no. 13599358
  misc_feature (21)..(89): Homolog of NCBI NO: 7452500 NR Description: hypothetical protein T22J18.4 - Arabidopsis
  misc_feature (1)..(89): Homolog of NCBI NO: 18395162 NR Description: expressed protein [Arabidopsis thaliana]
  misc_feature (1)..(89): Homolog of NCBI NO: 2505872 NR Description: hypothetical protein [Arabidopsis thaliana]
  misc_feature (1)..(116): Homolog of NCBI NO: 30692973 NR Description: expressed protein [Arabidopsis thaliana]
  misc_feature (1)..(116): Homolog of NCBI NO: 10092447 NR Description: unknown protein; 15226-14726 [Arabidopsis
  misc_feature (1)..(116): Homolog of NCBI NO: 25334118 NR Description: F12G12.17 protein - Arabidopsis thaliana
  misc_feature (1)..(116): Homolog of NCBI NO: 34912224 NR Description: P0415C01.14 [Oryza sativa (japonica
MLLAVEGGGFFSSSASGYSHGLALLLLGRKEEEKPVKVSPWSQYRLVDGEAEHVCHLASTKNQAPRKCAPFICFGSTALELEGASPPKLSSSNTLDSLEEPSRSTKKKVTTNGSITG

SEQ ID NO: 111279 - DNA, 984 bp, Zea mays subsp. mays
  misc_feature (1)..(984): Ceres Seq. ID no. 13599364
cctaatcgaaaatcataaacccttctttacctttgtgctcatcttccttcctcgttatcaacagtctcaatcgaaaccgattcattgagaatgacggagatggtaacgcctggagacgtgctcggtaatgcggctgagttaaaacccgggaaaggagcttacgtcaacgacaacaccatctacgcttccctcacaggatctcgccggattgtttctcctcttcccgaatctcttgaccagagagctactgtggaagttactggtcacaaggcgcatggacttatccccgagcctggctctcttgtcttagctagggttactaaagttatggctcgtatggcttctgttgatatcttgtgtgttggttcaaaggccgttcgtgaaaaatttgctggcgtaatcaggcaacaagatgttagagaaacagagattgacaaagttgagattcatcagtctttccgtcctggtgacattgttagagctgtggttctgtctcttggtgactcacgggcttactatctgtcaactgctaagaatgagcttggtgtggtctctgctgagagcgctgcaggtgaaacaatggttccgattagttggacagagatgcaatgtcctttgtctggccaaaccgagcagaggaaagttgccaaggtggcctaatttgaatgacactacagataatctggcttctatcatagatgtgtgtctctacaacaagaaaagacatgtttgattattacagttttgagctcttttgacatgctttaacttaaaagaccatgttttgtcaagtgcaaaagcaacttgcctttgttcctaaactcagaagacatttcaatgaaagggttaagagagaatgaatttgaatgtgagcccttttaattcttttacactgcattgataatggcgacgaagattgccttggttagcaccattttattttggatgctaagcttgaaatttctatgtactatcgtttctgct

SEQ ID NO: 111280 - protein, 189 aa, Zea mays subsp. mays; identical to SEQ ID NO: 61002
  misc_feature (1)..(189): Ceres Seq. ID no. 15222568
  misc_feature (2)..(136): Homolog of NCBI NO: 9758066 NR Description: gene_id:K15E6.10~ref|NP_057130.1~similar to
  misc_feature (2)..(188): Homolog of NCBI NO: 18421805 NR Description: expressed protein [Arabidopsis thaliana]
  misc_feature (2)..(188): Homolog of NCBI NO: 24583644 NR Description: CG6249-PA [Drosophila melanogaster]
  misc_feature (40)..(94): Homolog of NCBI NO: 6324097 NR Description: Represses the replication of double-stranded RNA protecting the host from the otherwise lethal effects of the
  misc_feature (93)..(187): Homolog of NCBI NO: 6324097 NR Description: Represses the replication of double-stranded RNA protecting the host from the otherwise lethal effects of the
  misc_feature (39)..(187): Homolog of NCBI NO: 38104559 NR Description: hypothetical protein MG08628.4 [Magnaporthe
  misc_feature (4)..(187): Homolog of NCBI NO: 19076010 NR Description: hypothetical protein [Schizosaccharomyces pombe]
  misc_feature (4)..(187): Homolog of NCBI NO: 7491999 NR Description: hypothetical protein SPCC965.01 - fission yeast
  misc_feature (7)..(188): Homolog of NCBI NO: 22267446 NR Description: RIKEN cDNA 2610104C07 [Mus musculus]
  misc_feature (7)..(188): Homolog of NCBI NO: 7705612 NR Description: exosomal core protein CSL4

SEQ ID NO: 111281 - protein, 186 aa, Zea mays subsp. mays; identical to SEQ ID NO: 61003
  misc_feature (1)..(186): Ceres Seq. ID no. 15222569
  misc_feature (1)..(185): Homolog of NCBI NO: 24583644 NR Description: CG6249-PA [Drosophila melanogaster]
  misc_feature (37)..(91): Homolog of NCBI NO: 6324097 NR Description: Represses the replication of double-stranded RNA protecting the host from the otherwise lethal effects of the
  misc_feature (90)..(184): Homolog of NCBI NO: 6324097 NR Description: Represses the replication of double-stranded RNA protecting the host from the otherwise lethal effects of the
  misc_feature (36)..(184): Homolog of NCBI NO: 38104559 NR Description: hypothetical protein MG08628.4 [Magnaporthe
  misc_feature (1)..(184): Homolog of NCBI NO: 19076010 NR Description: hypothetical protein [Schizosaccharomyces pombe]
  misc_feature (1)..(184): Homolog of NCBI NO: 7491999 NR Description: hypothetical protein SPCC965.01 - fission yeast
  misc_feature (4)..(185): Homolog of NCBI NO: 22267446 NR Description: RIKEN cDNA 2610104C07 [Mus musculus]
  misc_feature (4)..(185): Homolog of NCBI NO: 7705612 NR Description: exosomal core protein CSL4
  misc_feature (1)..(133): Homolog of NCBI NO: 9758066 NR Description: gene_id:K15E6.10~ref|NP_057130.1~similar to
  misc_feature (1)..(185): Homolog of NCBI NO: 18421805 NR Description: expressed protein [Arabidopsis thaliana]

SEQ ID NO: 111282 - protein, 110 aa, Zea mays subsp. mays; identical to SEQ ID NO: 61004
  misc_feature (1)..(110): Ceres Seq. ID no. 15222570
  misc_feature (1)..(109): Homolog of NCBI NO: 24583644 NR Description: CG6249-PA [Drosophila melanogaster]
  misc_feature (1)..(15): Homolog of NCBI NO: 6324097 NR Description: Represses the replication of double-stranded RNA protecting the host from the otherwise lethal effects of the
  misc_feature (14)..(108): Homolog of NCBI NO: 6324097 NR Description: Represses the replication of double-stranded RNA protecting the host from the otherwise lethal effects of the
  misc_feature (1)..(108): Homolog of NCBI NO: 38104559 NR Description: hypothetical protein MG08628.4 [Magnaporthe
  misc_feature (1)..(108): Homolog of NCBI NO: 19076010 NR Description: hypothetical protein [Schizosaccharomyces pombe]
  misc_feature (1)..(108): Homolog of NCBI NO: 7491999 NR Description: hypothetical protein SPCC965.01 - fission yeast
  misc_feature (1)..(109): Homolog of NCBI NO: 22267446 NR Description: RIKEN cDNA 2610104C07 [Mus musculus]
  misc_feature (1)..(109): Homolog of NCBI NO: 7705612 NR Description: exosomal core protein CSL4
  misc_feature (1)..(57): Homolog of NCBI NO: 9758066 NR Description: gene_id:K15E6.10~ref|NP_057130.1~similar to
  misc_feature (1)..(109): Homolog of NCBI NO: 18421805 NR Description: expressed protein [Arabidopsis thaliana]

SEQ ID NO: 111283 - DNA, 1022 bp, Zea mays subsp. mays
  misc_feature (1)..(1022): Ceres Seq. ID no. 13599365
agatttgatcccaacgaaaacgcgtcttcatcttcctcctcctcctttcttttctctcgattttggctgaaagcagctttgtcttttttactacaaccaaatatggatgactgggaggatgaacaaattgcaccacttccagcaaaagttgtgcttaaaagcaactgggatgatgaagatgtagatgagaatgagattaaggactcatgggaggatgatgatgacgaacaacctgctcctccgcctccggtaaagcctgctcctccgaagaaagctgttgagaaaaagggcaaagcggctgaggctccaaaagaagaacctttagatcctctctctgagaaacttcgcatgcagaggcttgttgaagaagcggactacagggcaactgccgaactctttggaacgaagggtgaagagaaaagccttgacatgttcatccccaagtctgaatctgattttttggaatatgctgaaatgatttctcataggcttacaccatatgagaaaagttatcactatatcgcattgctgaaagctgtcatgagactttcggtgaccaacatgaaggcagcagatgttaaagatgttgcttcgtccgttacagcaattgcaaatgaaaagcttaaggctgagaaagaagctgctgctggtagaaagaagacgggtggcaagaagaaacagcttattgtagataaggccgatgacgatctagtagctggtccttatgatgccatggacgattttgacttcatgtagattacaagagctttgtgattgtgagggaatacagtttcgattgcctggcgtctgtttcatcattatctctcgggaagaagagcaaaagtttcttagttctgggatatatatagttggaacaaagaagtcttgctttatgggttttggtctgtttggtctggagacattctctaaagagtcatgttttgtttcttttctgttggttaaaaagctaatactttaatcaattctcgtgtaatggtaatacaaatgtcttatctttgctc

SEQ ID NO: 111284 - protein, 251 aa, Zea mays subsp. mays
  misc_feature (1)..(251): Ceres Seq. ID no. 13599366
  misc_feature (52)..(251): Homolog of NCBI NO: 23503065 NR Description: Eukaryotic translation initiation factor 3
  misc_feature (52)..(251): Homolog of NCBI NO: 10435304 NR Description: unnamed protein product [Homo sapiens]
  misc_feature (52)..(251): Homolog of NCBI NO: 4503511 NR Description: eukaryotic translation initiation factor 3,
  misc_feature (52)..(251): Homolog of NCBI NO: 34856798 NR Description: similar to Eukaryotic translation initiation
  misc_feature (52)..(251): Homolog of NCBI NO: 26349519 NR Description: unnamed protein product [Mus musculus]
  misc_feature (36)..(251): Homolog of NCBI NO: 19921950 NR Description: CG12131-PA [Drosophila melanogaster]
  misc_feature (36)..(251): Homolog of NCBI NO: 27374365 NR Description: Adam-PA [Drosophila willistoni]
  misc_feature (36)..(251): Homolog of NCBI NO: 27374242 NR Description: CG12131-PA [Drosophila erecta]
  misc_feature (35)..(251): Homolog of NCBI NO: 30693092 NR Description: expressed protein [Arabidopsis thaliana]
  misc_feature (35)..(251): Homolog of NCBI NO: 18408426 NR Description: expressed protein [Arabidopsis thaliana]
RFDPNENASSSSSSSFLFSRFWLKAALSFLLQPNMDDWEDEQIAPLPAKVVLKSNWDDEDVDENEIKDSWEDDDDEQPAPPPPVKPAPPKKAVEKKGKAAEAPKEEPLDPLSEKLRMQRLVEEADYRATAELFGTKGEEKSLDMFIPKSESDFLEYAEMISHRLTPYEKSYHYIALLKAVMRLSVTNMKAADVKDVASSVTAIANEKLKAEKEAAAGRKKTGGKKKQLIVDKADDDLVAGPYDAMDDFDFM

SEQ ID NO: 111285 - protein, 217 aa, Zea mays subsp. mays
  misc_feature (1)..(217): Ceres Seq. ID no. 13599367
  misc_feature (18)..(217): Homolog of NCBI NO: 10435304 NR Description: unnamed protein product [Homo sapiens]
  misc_feature (18)..(217): Homolog of NCBI NO: 23503065 NR Description: Eukaryotic translation initiation factor 3
  misc_feature (18)..(217): Homolog of NCBI NO: 4503511 NR Description: eukaryotic translation initiation factor 3,
  misc_feature (18)..(217): Homolog of NCBI NO: 34856798 NR Description: similar to Eukaryotic translation initiation
  misc_feature (18)..(217): Homolog of NCBI NO: 26349519 NR Description: unnamed protein product [Mus musculus]
  misc_feature (2)..(217): Homolog of NCBI NO: 19921950 NR Description: CG12131-PA [Drosophila melanogaster]
  misc_feature (2)..(217): Homolog of NCBI NO: 27374365 NR Description: Adam-PA [Drosophila willistoni]
  misc_feature (2)..(217): Homolog of NCBI NO: 27374242 NR Description: CG12131-PA [Drosophila erecta]
  misc_feature (1)..(217): Homolog of NCBI NO: 30693092 NR Description: expressed protein [Arabidopsis thaliana]
  misc_feature (1)..(217): Homolog of NCBI NO: 18408426 NR Description: expressed protein [Arabidopsis thaliana]
MDDWEDEQIAPLPAKVVLKSNWDDEDVDENEIKDSWEDDDDEQPAPPPPVKPAPPKKAVEKKGKAAEAPKEEPLDPLSEKLRMQRLVEEADYRATAELFGTKGEEKSLDMFIPKSESDFLEYAEMISHRLTPYEKSYHYIALLKAVMRLSVTNMKAADVKDVASSVTAIANEKLKAEKEAAAGRKKTGGKKKQLIVDKADDDLVAGPYDAMDDFDFM

SEQ ID NO: 111286 - protein, 135 aa, Zea mays subsp. mays
  misc_feature (1)..(135): Ceres Seq. ID no. 13599368
  misc_feature (1)..(135): Homolog of NCBI NO: 23503065 NR Description: Eukaryotic translation initiation factor 3
  misc_feature (1)..(135): Homolog of NCBI NO: 10435304 NR Description: unnamed protein product [Homo sapiens]
  misc_feature (1)..(135): Homolog of NCBI NO: 4503511 NR Description: eukaryotic translation initiation factor 3,
  misc_feature (1)..(135): Homolog of NCBI NO: 34856798 NR Description: similar to Eukaryotic translation initiation
  misc_feature (1)..(135): Homolog of NCBI NO: 26349519 NR Description: unnamed protein product [Mus musculus]
  misc_feature (1)..(135): Homolog of NCBI NO: 19921950 NR Description: CG12131-PA [Drosophila melanogaster]
  misc_feature (1)..(135): Homolog of NCBI NO: 27374365 NR Description: Adam-PA [Drosophila willistoni]
  misc_feature (1)..(135): Homolog of NCBI NO: 27374242 NR Description: CG12131-PA [Drosophila erecta]
  misc_feature (1)..(135): Homolog of NCBI NO: 30693092 NR Description: expressed protein [Arabidopsis thaliana]
  misc_feature (1)..(135): Homolog of NCBI NO: 18408426 NR Description: expressed protein [Arabidopsis thaliana]
MQRLVEEADYRATAELFGTKGEEKSLDMFIPKSESDFLEYAEMISHRLTPYEKSYHYIALLKAVMRLSVTNMKAADVKDVASSVTAIANEKLKAEKEAAAGRKKTGGKKKQLIVDKADDDLVAGPYDAMDDFDFM

SEQ ID NO: 111287 - DNA, 888 bp, Zea mays subsp. mays
  misc_feature (1)..(888): Ceres Seq. ID no. 12635696
  misc_feature: MA Experiment ID: 20000534 Result: Up-regulated in Transcription
  misc_feature: MA Experiment 20000534 PARAMETER Experiment Name: Zm_Hybrid_Pollen_P Parameter: Age (day) Value: 8
  misc_feature: MA Experiment 20000534 PARAMETER Experiment Name: Zm_Hybrid_Pollen_P Parameter: Organism Value: Zea mays
  misc_feature: MA Experiment 20000534 PARAMETER Experiment Name: Zm_Hybrid_Pollen_P Parameter: Plant Line Value: 35A19
  misc_feature: MA Experiment 20000534 PARAMETER Experiment Name: Zm_Hybrid_Pollen_P Parameter: Tissue Value: Pollen vs. Aerial
gagctacgaagatggctaactcggctcttgtctatttctgtgcgagcagccggagatcggtggagaagcgggttgtgtcggtgccgctggccgagtgcggggaccggcccagaggggccagcggggaggggccgccgccgtcggactcgtgggcgtggcgcaagtatgggcagaagcccatcaagggctccccctacccacggggttactaccgctgcagcagctccaaggggtgcccagcgaggaagcaggtggagcgcagccacgcggaccccaccgcgctgctcgtcacctacaccttcgagcacaatcacgaggcgccgcagcccaagaccagcggcggcagctgctgccaccagcaaggcaagccgtccgcgcggccgccggcgccgaagcctgagccgtccgtggtcctggtccagcgggatgagctcggcccggagcacgagctggtagaaacagaggtgccggagcaggagcaggagacggagccagaagaggagcacgagccggcggaagagggcgtcccatgtctggccggtccggaagcggcagcatccttaacggtggcgccggcggccgaggaggacgaaagcttcgactttgggtggttcgaccagtacccgacgtggcaccggtcggcgctgtacgcccctctgctgcctccggaggagtgggagcgggagctgcagggggaggacgccctgtttgcggggctcggcgagctgcccgagtgcgccgtcgtcttcggccgccgccgcgagctcagcctggccgccaccgcgccgtgctcctgatggtccttcgactctttgtacgtttgtttttatttttttttcttttccttttgggcccctctttaagttttacacggaacgatttggaggc

SEQ ID NO: 111288 - protein, 264 aa, Zea mays subsp. mays
  misc_feature (1)..(264): Ceres Seq. ID no. 12635697
  misc_feature (46)..(104): Pfam Name: WRKY DNA -binding domain Pfam Description: WRKY DNA -binding domain
  misc_feature (17)..(115): Homolog of NCBI NO: 37537178 NR Description: putative DNA-binding protein
  misc_feature (17)..(150): Homolog of NCBI NO: 25518142 NR Description: T5I8.10 protein - Arabidopsis thaliana
  misc_feature (17)..(150): Homolog of NCBI NO: 18397606 NR Description: WRKY family transcription factor
  misc_feature (17)..(229): Homolog of NCBI NO: 15226838 NR Description: WRKY family transcription factor
  misc_feature (17)..(150): Homolog of NCBI NO: 21553615 NR Description: putative DNA-binding protein [Arabidopsis
  misc_feature (17)..(120): Homolog of NCBI NO: 22331854 NR Description: WRKY family transcription factor
  misc_feature (16)..(120): Homolog of NCBI NO: 30694863 NR Description: WRKY family transcription factor [Arabidopsis
  misc_feature (16)..(202): Homolog of NCBI NO: 22329838 NR Description: WRKY family transcription factor
  misc_feature (1)..(252): Homolog of NCBI NO: 34910854 NR Description: P0435H01.23 [Oryza sativa (japonica
  misc_feature (16)..(264): Homolog of NCBI NO: 34909540 NR Description: P0481E12.40 [Oryza sativa (japonica
ATKMANSALVYFCASSRRSVEKRVVSVPLAECGDRPRGASGEGPPPSDSWAWRKYGQKPIKGSPYPRGYYRCSSSKGCPARKQVERSHADPTALLVTYTFEHNHEAPQPKTSGGSCCHQQGKPSARPPAPKPEPSVVLVQRDELGPEHELVETEVPEQEQETEPEEEHEPAEEGVPCLAGPEAAASLTVAPAAEEDESFDFGWFDQYPTWHRSALYAPLLPPEEWERELQGEDALFAGLGELPECAVVFGRRRELSLAATAPCS

SEQ ID NO: 111289 - protein, 261 aa, Zea mays subsp. mays
  misc_feature (1)..(261): Ceres Seq. ID no. 12635698
  misc_feature (43)..(101): Pfam Name: WRKY DNA -binding domain Pfam Description: WRKY DNA -binding domain
  misc_feature (14)..(147): Homolog of NCBI NO: 18397606 NR Description: WRKY family transcription factor
  misc_feature (14)..(226): Homolog of NCBI NO: 15226838 NR Description: WRKY family transcription factor
  misc_feature (14)..(147): Homolog of NCBI NO: 21553615 NR Description: putative DNA-binding protein [Arabidopsis
  misc_feature (14)..(117): Homolog of NCBI NO: 22331854 NR Description: WRKY family transcription factor
  misc_feature (14)..(112): Homolog of NCBI NO: 37537178 NR Description: putative DNA-binding protein
  misc_feature (14)..(147): Homolog of NCBI NO: 25518142 NR Description: T5I8.10 protein - Arabidopsis thaliana
  misc_feature (13)..(117): Homolog of NCBI NO: 30694863 NR Description: WRKY family transcription factor [Arabidopsis
  misc_feature (13)..(199): Homolog of NCBI NO: 22329838 NR Description: WRKY family transcription factor
  misc_feature (1)..(249): Homolog of NCBI NO: 34910854 NR Description: P0435H01.23 [Oryza sativa (japonica
  misc_feature (13)..(261): Homolog of NCBI NO: 34909540 NR Description: P0481E12.40 [Oryza sativa (japonica
MANSALVYFCASSRRSVEKRVVSVPLAECGDRPRGASGEGPPPSDSWAWRKYGQKPIKGSPYPRGYYRCSSSKGCPARKQVERSHADPTALLVTYTFEHNHEAPQPKTSGGSCCHQQGKPSARPPAPKPEPSVVLVQRDELGPEHELVETEVPEQEQETEPEEEHEPAEEGVPCLAGPEAAASLTVAPAAEEDESFDFGWFDQYPTWHRSALYAPLLPPEEWERELQGEDALFAGLGELPECAVVFGRRRELSLAATAPCS

SEQ ID NO: 111290 - protein, 151 aa, Zea mays subsp. mays
  misc_feature (1)..(151): Ceres Seq. ID no. 12635699
  misc_feature (46)..(151): Homolog of NCBI NO: 5821151 NR Description: RNA binding protein [Homo sapiens]
  misc_feature (11)..(151): Homolog of NCBI NO: 5821151 NR Description: RNA binding protein [Homo sapiens]
  misc_feature (37)..(151): Homolog of NCBI NO: 5821151 NR Description: RNA binding protein [Homo sapiens]
ELRRWLTRLLSISVRAAGDRWRSGLCRCRWPSAGTGPEGPAGRGRRRRTRGRGASMGRSPSRAPPTHGVTTAAAAPRGAQRGSRWSAATRTPPRCSSPTPSSTITRRRSPRPAAAAAATSKASRPRGRRRRSLSRPWSWSSGMSSARSTSW

SEQ ID NO: 111291 - DNA, 730 bp, Zea mays subsp. mays
  misc_feature (1)..(730): Ceres Seq. ID no. 12635311
actacttctcttcctactccatctttcgcttgtacaaacctaatcagaaatggcaacggcgtcgtttagtatgctgtcagtgttcgccgctccttccggtggattgggctctcgcaacatcagaaacacaaaccaagtcttctccaataggaatcctttggtgggagtcaggtgcatggctcaggacgatcctatcaaggaagaatctcctctgccttcgacctcggccactccaccacagacgccgttgtattctcctccaccacttagcaagcctaaggtgagtacgaagtttggagatcttttagcgtttagcggtccagcgcccgaaagaataaatgggagactcgctatggtagggttcgtagcagcgattgcggtggagcttttgaagggagagaacgtgtttgctcaaatctccgacggtggagtcggatggtttctaggaacaacggcgttgctaacgttggcatcgatgattccattgttcaagggaataagggcagagtcaaagtccaaagggtttatgacgtcagatgccgagctatggaatggtcgattcgccatgctcggcctcgtggccttggctttcactgagtacgtcaaaggcgggactcttgtctaagtctcttttttttttcttcttttttgcatttcttgtgttaccctttagctatgttttaagggataatttggaggataataagtaaatcaaagttttgtttttaat

SEQ ID NO: 111292 - protein, 191 aa, Zea mays subsp. mays
  misc_feature (1)..(191): Ceres Seq. ID no. 12635312
  misc_feature (1)..(191): Homolog of NCBI NO: 38123375 NR Description: ELIP [Brassica rapa subsp. pekinensis]
  misc_feature (1)..(191): Homolog of NCBI NO: 15228866 NR Description: early light-induced protein
  misc_feature (8)..(191): Homolog of NCBI NO: 25315849 NR Description: early light-inducable protein [imported] -
  misc_feature (1)..(190): Homolog of NCBI NO: 7488128 NR Description: probable light induced protein - Arabidopsis
  misc_feature (1)..(191): Homolog of NCBI NO: 18414282 NR Description: Expressed protein
  misc_feature (1)..(191): Homolog of NCBI NO: 21618071 NR Description: light-induced protein-like protein [Arabidopsis
MATASFSMLSVFAAPSGGLGSRNIRNTNQVFSNRNPLVGVRCMAQDDPIKEESPLPSTSATPPQTPLYSPPPLSKPKVSTKFGDLLAFSGPAPERINGRLAMVGFVAAIAVELLKGENVFAQISDGGVGWFLGTTALLTLASMIPLFKGIRAESKSKGFMTSDAELWNGRFAMLGLVALAFTEYVKGGTLV

SEQ ID NO: 111293 - protein, 184 aa, Zea mays subsp. mays
  misc_feature (1)..(184): Ceres Seq. ID no. 12635313
  misc_feature (1)..(184): Homolog of NCBI NO: 38123375 NR Description: ELIP [Brassica rapa subsp. pekinensis]
  misc_feature (1)..(184): Homolog of NCBI NO: 15228866 NR Description: early light-induced protein
  misc_feature (1)..(184): Homolog of NCBI NO: 25315849 NR Description: early light-inducable protein [imported] -
  misc_feature (1)..(183): Homolog of NCBI NO: 7488128 NR Description: probable light induced protein - Arabidopsis
  misc_feature (1)..(184): Homolog of NCBI NO: 18414282 NR Description: Expressed protein
  misc_feature (1)..(184): Homolog of NCBI NO: 21618071 NR Description: light-induced protein-like protein [Arabidopsis
MLSVFAAPSGGLGSRNIRNTNQVFSNRNPLVGVRCMAQDDPIKEESPLPSTSATPPQTPLYSPPPLSKPKVSTKFGDLLAFSGPAPERINGRLAMVGFVAAIAVELLKGENVFAQISDGGVGWFLGTTALLTLASMIPLFKGIRAESKSKGFMTSDAELWNGRFAMLGLVALAFTEYVKGGTLV

SEQ ID NO: 111294 - protein, 149 aa, Zea mays subsp. mays
  misc_feature (1)..(149): Ceres Seq. ID no. 12635314
  misc_feature (1)..(149): Homolog of NCBI NO: 38123375 NR Description: ELIP [Brassica rapa subsp. pekinensis]
  misc_feature (1)..(149): Homolog of NCBI NO: 15228866 NR Description: early light-induced protein
  misc_feature (1)..(149): Homolog of NCBI NO: 25315849 NR Description: early light-inducable protein [imported] -
  misc_feature (1)..(148): Homolog of NCBI NO: 7488128 NR Description: probable light induced protein - Arabidopsis
  misc_feature (1)..(149): Homolog of NCBI NO: 18414282 NR Description: Expressed protein
  misc_feature (1)..(149): Homolog of NCBI NO: 21618071 NR Description: light-induced protein-like protein [Arabidopsis
MAQDDPIKEESPLPSTSATPPQTPLYSPPPLSKPKVSTKFGDLLAFSGPAPERINGRLAMVGFVAAIAVELLKGENVFAQISDGGVGWFLGTTALLTLASMIPLFKGIRAESKSKGFMTSDAELWNGRFAMLGLVALAFTEYVKGGTLV

SEQ ID NO: 111295 - DNA, 1293 bp, Zea mays subsp. mays
  misc_feature (1)..(1293): Ceres Seq. ID no. 15226354
atcaagattccgaccccaaaatccctctccgagctcgaccaaaaaccaccctctctgattcattccacccacgtccacgtacgtacgtacattcccaccacctcccagtgcagcgccagtctgtaacccataaccataaccataccatggtggtcctcaccaagggcgagctggagcagatcgcgctgccggccgtgcagcgcgcatcgccgccgccgccggccgccgtgccggaggtcgacctggcagccggggacgccgccgccgcgcgcgcggtggccaaggcgtgcgaggaccacggcttcttcaaggtgacgggccacggcgtgccgcagcacctcctggcgcgcctcgaggccgccgcggccgcgttcttcgcgctcccgcagcgggagaaggacagggccgccggctgcccgttcggatacgccagcaagcggattggcgccaacggcgatctcggctgggtcgagtacctcctgcttgccgtcaccgccgccggcgcagcggccgcgccggtgtctgcgtgcgagggcgcggagccgccctgtttccgtgctgtgctggacgagtacgtggcggcggtgaggcgcatgacctgcacggtgctgcagctgatggcgcaggggctgggcctcgacgacagggacgtgttcagccggctggtgctggaccgggacagcgactccatgctgagggtgaaccactacccgccgcggccccagccagcggcggcggcggagacgaggcggctgacggggttcggcgagcacaccgacccgcagatcatctccgtcctccgctccaacgacgcgtccggcctcgagatcacgctgcgggacggcacctgggtgtccgtgccctccgacacggaatccttcttcgtcaatgtcggcgacgcgttgcaggtgctgaccaacgggcggttccggagcgtgcggcaccgggtgatggtgagcagcgcgcggccgcgggtgtcggtgatcttcttcggcggcccgccgccgcgggagcgcctggcgccgctgccgggtctggtggaccgggagggcggccgacgccgctacagggagttcacgtggagggagtacaagaactcggcgtaccggaccaagctggcagacaacaggctctgctccttcgagaccatggcgacgagctagctaagccgccgcgctgacgccggacacggctcatcgccctcccttctcgatgtgtagtgtagcaagagacgtttttttgtgccatatagttttctgtttatacacgataaggctggtctcaacttcgttt

SEQ ID NO: 111296 - protein, 386 aa, Zea mays subsp. mays
  misc_feature (1)..(386): Ceres Seq. ID no. 15226355
  misc_feature (227)..(333): Pfam Name: 2OG-Fe(II) oxygenase superfamily Pfam Description: 2OG-Fe(II) oxygenase superfamily
  misc_feature (60)..(386): Homolog of NCBI NO: 1666096 NR Description: dioxygenase [Marah macrocarpus]
  misc_feature (49)..(381): Homolog of NCBI NO: 34903844 NR Description: unnamed protein product [Oryza sativa (japonica
QDSDPKIPLRARPKTTLSDSFHPRPRTYVHSHHLPVQRQSVTHNHNHTMVVLTKGELEQIALPAVQRASPPPPAAVPEVDLAAGDAAAARAVAKACEDHGFFKVTGHGVPQHLLARLEAAAAAFFALPQREKDRAAGCPFGYASKRIGANGDLGWVEYLLLAVTAAGAAAAPVSACEGAEPPCFRAVLDEYVAAVRRMTCTVLQLMAQGLGLDDRDVFSRLVLDRDSDSMLRVNHYPPRPQPAAAAETRRLTGFGEHTDPQIISVLRSNDASGLEITLRDGTWVSVPSDTESFFVNVGDALQVLTNGRFRSVRHRVMVSSARPRVSVIFFGGPPPRERLAPLPGLVDREGGRRRYREFTWREYKNSAYRTKLADNRLCSFETMATS

SEQ ID NO: 111297 - protein, 338 aa, Zea mays subsp. mays
  misc_feature (1)..(338): Ceres Seq. ID no. 15226356
  misc_feature (179)..(285): Pfam Name: 2OG-Fe(II) oxygenase superfamily Pfam Description: 2OG-Fe(II) oxygenase superfamily
  misc_feature (12)..(338): Homolog of NCBI NO: 1666096 NR Description: dioxygenase [Marah macrocarpus]
  misc_feature (1)..(333): Homolog of NCBI NO: 34903844 NR Description: unnamed protein product [Oryza sativa (japonica
MVVLTKGELEQIALPAVQRASPPPPAAVPEVDLAAGDAAAARAVAKACEDHGFFKVTGHGVPQHLLARLEAAAAAFFALPQREKDRAAGCPFGYASKRIGANGDLGWVEYLLLAVTAAGAAAAPVSACEGAEPPCFRAVLDEYVAAVRRMTCTVLQLMAQGLGLDDRDVFSRLVLDRDSDSMLRVNHYPPRPQPAAAAETRRLTGFGEHTDPQIISVLRSNDASGLEITLRDGTWVSVPSDTESFFVNVGDALQVLTNGRFRSVRHRVMVSSARPRVSVIFFGGPPPRERLAPLPGLVDREGGRRRYREFTWREYKNSAYRTKLADNRLCSFETMATS

SEQ ID NO: 111298 - DNA, 926 bp, Zea mays subsp. mays
  misc_feature (1)..(926): Ceres Seq. ID no. 12638274
gtcgagagagagaagatggaggattcgtcggcatcgtttgtaggaaacagatattgggtgctccgacatggaaagagcattccaaacgagagaggcctcatcgtctcttcaatggaaaatggagtgctaccagagtaccagttagcgcctgatggtgtcgctcaggctcagctcgctggccaatccttcctcaagcaactcgaggaaagtaagatatcactggacaaggtccgcatttgctactcccccttctctagaaccactcacaccgctaaggttgtcgctcaggtcctcaatatcccttttgattcccctcaatgcaagatgatggaaactctgcgagaacgctactttggacctacatttgaactcaagtcacatgataagtacccggagatatgggatcttgatgagaaagatccattcatgggaccagaaggaggtgaaagcgctgatgacgttgtatccagacttgccactgccatgttatccatggaagcagaatttcaaaggtgcgcaattctggtggtgagccatggagatccactgcagatgctgcagaacataatgcattcagcaaagcaacaaagcggaggagatggtggtttagctgagagaattcagatgagcagagttgcttctgtcttgtcacagcaccgcaagtttgctttgctcactggtgaactccgacccctcgtctgattgattgcaaaccagaaaaagtattcaactttgggatgttggtcctatctgccaatgacaattcttgcaatttttaaacttttatatggaataagcaagctgtttttgttagaaagacaaaggtttattcttctgtttggaataaatcatgattcatatgcatcttcaaatctgtacacgacctgagagctaccaaaaaaaaaaaaaaaaaagcttatcgatac

SEQ ID NO: 111299 - protein, 233 aa, Zea mays subsp. mays
  misc_feature (1)..(233): Ceres Seq. ID no. 12638275
  misc_feature (16)..(228): Pfam Name: Phosphoglycerate mutase family Pfam Description: Phosphoglycerate mutase family
  misc_feature (16)..(233): Homolog of NCBI NO: 38344128 NR Description: OSJNBb0072N21.7 [Oryza sativa (japonica
  misc_feature (8)..(109): Homolog of NCBI NO: 7485952 NR Description: hypothetical protein F22I13.140 - Arabidopsis
  misc_feature (108)..(233): Homolog of NCBI NO: 7485952 NR Description: hypothetical protein F22I13.140 - Arabidopsis
  misc_feature (8)..(233): Homolog of NCBI NO: 18420226 NR Description: expressed protein
  misc_feature (8)..(233): Homolog of NCBI NO: 21592519 NR Description: unknown [Arabidopsis thaliana]
VEREKMEDSSASFVGNRYWVLRHGKSIPNERGLIVSSMENGVLPEYQLAPDGVAQAQLAGQSFLKQLEESKISLDKVRICYSPFSRTTHTAKVVAQVLNIPFDSPQCKMMETLRERYFGPTFELKSHDKYPEIWDLDEKDPFMGPEGGESADDVVSRLATAMLSMEAEFQRCAILVVSHGDPLQMLQNIMHSAKQQSGGDGGLAERIQMSRVASVLSQHRKFALLTGELRPLV

SEQ ID NO: 111300 - protein, 228 aa, Zea mays subsp. mays
  misc_feature (1)..(228): Ceres Seq. ID no. 12638276
  misc_feature (11)..(223): Pfam Name: Phosphoglycerate mutase family Pfam Description: Phosphoglycerate mutase family
  misc_feature (11)..(228): Homolog of NCBI NO: 38344128 NR Description: OSJNBb0072N21.7 [Oryza sativa (japonica
  misc_feature (3)..(104): Homolog of NCBI NO: 7485952 NR Description: hypothetical protein F22I13.140 - Arabidopsis
  misc_feature (103)..(228): Homolog of NCBI NO: 7485952 NR Description: hypothetical protein F22I13.140 - Arabidopsis
  misc_feature (3)..(228): Homolog of NCBI NO: 18420226 NR Description: expressed protein
  misc_feature (3)..(228): Homolog of NCBI NO: 21592519 NR Description: unknown [Arabidopsis thaliana]
MEDSSASFVGNRYWVLRHGKSIPNERGLIVSSMENGVLPEYQLAPDGVAQAQLAGQSFLKQLEESKISLDKVRICYSPFSRTTHTAKVVAQVLNIPFDSPQCKMMETLRERYFGPTFELKSHDKYPEIWDLDEKDPFMGPEGGESADDVVSRLATAMLSMEAEFQRCAILVVSHGDPLQMLQNIMHSAKQQSGGDGGLAERIQMSRVASVLSQHRKFALLTGELRPLV

SEQ ID NO: 111301 - protein, 196 aa, Zea mays subsp. mays
  misc_feature (1)..(196): Ceres Seq. ID no. 12638277
  misc_feature (1)..(191): Pfam Name: Phosphoglycerate mutase family Pfam Description: Phosphoglycerate mutase family
  misc_feature (1)..(196): Homolog of NCBI NO: 38344128 NR Description: OSJNBb0072N21.7 [Oryza sativa (japonica
  misc_feature (1)..(72): Homolog of NCBI NO: 7485952 NR Description: hypothetical protein F22I13.140 - Arabidopsis
  misc_feature (71)..(196): Homolog of NCBI NO: 7485952 NR Description: hypothetical protein F22I13.140 - Arabidopsis
  misc_feature (1)..(196): Homolog of NCBI NO: 18420226 NR Description: expressed protein
  misc_feature (1)..(196): Homolog of NCBI NO: 21592519 NR Description: unknown [Arabidopsis thaliana]
MENGVLPEYQLAPDGVAQAQLAGQSFLKQLEESKISLDKVRICYSPFSRTTHTAKVVAQVLNIPFDSPQCKMMETLRERYFGPTFELKSHDKYPEIWDLDEKDPFMGPEGGESADDVVSRLATAMLSMEAEFQRCAILVVSHGDPLQMLQNIMHSAKQQSGGDGGLAERIQMSRVASVLSQHRKFALLTGELRPLV

SEQ ID NO: 111302 - DNA, 822 bp, Zea mays subsp. mays
  misc_feature (1)..(822): Ceres Seq. ID no. 12635934
actcccacacaagacaagcgtcgattgccccccatccgtggctgcgcgtccgccggtggccgggggttctaatccgagcgattcccaatcccaaccgccgctggaagaccccgcagctccacgacagcgcgggcagacatggcgcccgtgctacctgcgccgccggcggtggcggctcctcccaccttctgccgcgtctctatcccggcccgcagcgctttcccctcctcctcccccgtcagaaaccttcgcaggtttgcggccaggagcggcggcggcggcggcggccgtcccgagcccaaagcaggtgatgatgagagcaaggccgtccttgacgccttcttcctcgggaaggccttggcggaggcgctgacggagcgggccgagtcggtggtgggcgaggtgttcagcgtcgtcgggcagtggcaggcggagcagcagaagcaggtccaggaatttcaggaggaagtagttcagagagcccaaaaggctaaggaaagagctgctgaggaggtcgttgatgataagggaccaaagactctaaagggaccttcaacaacaatcgtgacgcctgcacctacgcctcctccttctcctaatattcccacacaggcagaacagttataagcggcgatgaagagttagtgctgcatgtagactcactttgtgctccaagaaagtgatgaaattctcctatgagatatgtattgatcaagttgtcctttctttgatagtgaatatccagaatatcaactagaaaaatctatggtacaagttccgagatgaatggaataaaaatctgttagtttactacagattctg

SEQ ID NO: 111303 - protein, 162 aa, Zea mays subsp. mays
  misc_feature (1)..(162): Ceres Seq. ID no. 12635935
  misc_feature (61)..(122): Homolog of NCBI NO: 23130619 NR Description: hypothetical protein [Nostoc punctiforme]
  misc_feature (61)..(134): Homolog of NCBI NO: 17232006 NR Description: hypothetical protein [Nostoc sp. PCC 7120]
  misc_feature (56)..(131): Homolog of NCBI NO: 15235625 NR Description: putative protein
  misc_feature (56)..(148): Homolog of NCBI NO: 21553912 NR Description: unknown [Arabidopsis thaliana]
MAPVLPAPPAVAAPPTFCRVSIPARSAFPSSSPVRNLRRFAARSGGGGGGRPEPKAGDDESKAVLDAFFLGKALAEALTERAESVVGEVFSVVGQWQAEQQKQVQEFQEEVVQRAQKAKERAAEEVVDDKGPKTLKGPSTTIVTPAPTPPPSPNIPTQAEQL

SEQ ID NO: 111304 - protein, 123 aa, Zea mays subsp. mays
  misc_feature (1)..(123): Ceres Seq. ID no. 12635936
LPHKTSVDCPPSVAARPPVAGGSNPSDSQSQPPLEDPAAPRQRGQTWRPCYLRRRRWRLLPPSAASLSRPAALSPPPPPSETFAGLRPGAAAAAAAVPSPKQVMMRARPSLTPSSSGRPWRRR

SEQ ID NO: 111305 - protein, 102 aa, Zea mays subsp. mays
  misc_feature (1)..(102): Ceres Seq. ID no. 12635937
SHTRQASIAPHPWLRVRRWPGVLIRAIPNPNRRWKTPQLHDSAGRHGARATCAAGGGGSSHLLPRLYPGPQRFPLLLPRQKPSQVCGQERRRRRRPSRAQSR

SEQ ID NO: 111306 - DNA, 1321 bp, Zea mays subsp. mays
  misc_feature (1)..(1321): Ceres Seq. ID no. 13599377
cnaaatttacgattagcctagcgactcggcatggctactgtcttcccccgtgacgccggcgtctccacgccggaagccgacgaggctaagaaaatctacgatgaagcacggcgagtggtgtccacctacgagactgttcccagtcccagcggaaccctgcaggattactgccgccaccccagcggctggtgcataaccctgccgatcatggtgagctccatggtcgcagagcagcactttgaggcgcgtggcaccgacgtgctccttgttacgatgcccaagtccgggactacctggatcaaggccctcctctatgctgcggcccaccgcactgacgacacatcatcgtccatactccggcagctcgcctcccacaactcccaccagctcgttcctttcctcgaggcccaggtctacaccaaggaccagattccagacctgagctcgcttcccgcgccacggctcttcgccacgcacatcccggctgagtcgctgccaccctccgttgtggcgtccggctgcaaggtggtgtacttgtgccgggaccccaaggactgcttcgtgtctctctggcactttatgaacaagttcaccccatgggacatcgacgaggcacacggccggttctgcgagggtgtctcgttgtatgggccattttgggagcacgtgctgagctactggcgttggcacgtcgaccgaccgggtcaggtgctcttcctgacttacgaggagctcagcgccgacccgctcggccaactgaggcgcctagccgagttcattgggcgccccttcacgccgggggagcaggaggcgggagtggacagggagattgcggaggcatgtgccatgaaaagcatggtcaaccaggaggtgaaccagtccaggacgaccgaaatcgttgagatgccgattcccaacgggatcttcttccggcgaggcgtggtcggagactggaccaactacctcacgccggagatggcaggaaggatcgatgagattaccaagagcaagtttgaaggatccggcctcatgctgccgaaaacaatctcggaaatctcaaagatctagcatccctccgtcgtgtttgatgtttgaaatcgttcaccttttttttctcttgttgtaaactgcaccctgctggcactggcttggctgaataaaaaaagcttgcattgttcttgttgatcaaacgaaataccagctggcgagttgttgatgttacggaaaaggcctgcttagtcttaggtatttttcttatcggtttaattgtgatcaaatgtgtttgtactctgcttaattattaataaaaatgattgtatgc

SEQ ID NO: 111307 - protein, 345 aa, Zea mays subsp. mays
  misc_feature (1)..(345): Ceres Seq. ID no. 15218612
  misc_feature (75)..(332): Pfam Name: Sulfotransferase domain Pfam Description: Sulfotransferase domain
  misc_feature (14)..(333): Homolog of NCBI NO: 15809903 NR Description: AT5g07010/MOJ9_18 [Arabidopsis thaliana]
  misc_feature (3)..(334): Homolog of NCBI NO: 21593660 NR Description: putative flavonol sulfotransferase [Arabidopsis
  misc_feature (6)..(335): Homolog of NCBI NO: 15222843 NR Description: sulfotransferase family [Arabidopsis thaliana]
  misc_feature (14)..(333): Homolog of NCBI NO: 18415376 NR Description: sulfotransferase family [Arabidopsis thaliana]
  misc_feature (14)..(333): Homolog of NCBI NO: 9759557 NR Description: steroid sulfotransferase-like protein
  misc_feature (54)..(334): Homolog of NCBI NO: 25288806 NR Description: probable steroid sulfotransferase
  misc_feature (54)..(334): Homolog of NCBI NO: 18395604 NR Description: sulfotransferase family [Arabidopsis thaliana]
  misc_feature (24)..(333): Homolog of NCBI NO: 15230602 NR Description: sulfotransferase family [Arabidopsis thaliana]
  misc_feature (15)..(333): Homolog of NCBI NO: 38344441 NR Description: OSJNBa0038O10.13 [Oryza sativa (japonica
  misc_feature (12)..(336): Homolog of NCBI NO: 34894524 NR Description: putative steroid sulfotransferase
MATVFPRDAGVSTPEADEAKKIYDEARRVVSTYETVPSPSGTLQDYCRHPSGWCITLPIMVSSMVAEQHFEARGTDVLLVTMPKSGTTWIKALLYAAAHRTDDTSSSILRQLASHNSHQLVPFLEAQVYTKDQIPDLSSLPAPRLFATHIPAESLPPSVVASGCKVVYLCRDPKDCFVSLWHFMNKFTPWDIDEAHGRFCEGVSLYGPFWEHVLSYWRWHVDRPGQVLFLTYEELSADPLGQLRRLAEFIGRPFTPGEQEAGVDREIAEACAMKSMVNQEVNQSRTTEIVEMPIPNGIFFRRGVVGDWTNYLTPEMAGRIDEITKSKFEGSGLMLPKTISEISKI

SEQ ID NO: 111308 - protein, 286 aa, Zea mays subsp. mays
  misc_feature (1)..(286): Ceres Seq. ID no. 15218613
  misc_feature (16)..(273): Pfam Name: Sulfotransferase domain Pfam Description: Sulfotransferase domain
  misc_feature (1)..(274): Homolog of NCBI NO: 15809903 NR Description: AT5g07010/MOJ9_18 [Arabidopsis thaliana]
  misc_feature (1)..(275): Homolog of NCBI NO: 21593660 NR Description: putative flavonol sulfotransferase [Arabidopsis
  misc_feature (1)..(276): Homolog of NCBI NO: 15222843 NR Description: sulfotransferase family [Arabidopsis thaliana]
  misc_feature (1)..(274): Homolog of NCBI NO: 18415376 NR Description: sulfotransferase family [Arabidopsis thaliana]
  misc_feature (1)..(274): Homolog of NCBI NO: 9759557 NR Description: steroid sulfotransferase-like protein
  misc_feature (1)..(275): Homolog of NCBI NO: 25288806 NR Description: probable steroid sulfotransferase
  misc_feature (1)..(275): Homolog of NCBI NO: 18395604 NR Description: sulfotransferase family [Arabidopsis thaliana]
  misc_feature (1)..(274): Homolog of NCBI NO: 15230602 NR Description: sulfotransferase family [Arabidopsis thaliana]
  misc_feature (1)..(274): Homolog of NCBI NO: 38344441 NR Description: OSJNBa0038O10.13 [Oryza sativa (japonica
  misc_feature (1)..(277): Homolog of NCBI NO: 34894524 NR Description: putative steroid sulfotransferase
MVSSMVAEQHFEARGTDVLLVTMPKSGTTWIKALLYAAAHRTDDTSSSILRQLASHNSHQLVPFLEAQVYTKDQIPDLSSLPAPRLFATHIPAESLPPSVVASGCKVVYLCRDPKDCFVSLWHFMNKFTPWDIDEAHGRFCEGVSLYGPFWEHVLSYWRWHVDRPGQVLFLTYEELSADPLGQLRRLAEFIGRPFTPGEQEAGVDREIAEACAMKSMVNQEVNQSRTTEIVEMPIPNGIFFRRGVVGDWTNYLTPEMAGRIDEITKSKFEGSGLMLPKTISEISKI

SEQ ID NO: 111309 - protein, 282 aa, Zea mays subsp. mays
  misc_feature (1)..(282): Ceres Seq. ID no. 15218614
  misc_feature (12)..(269): Pfam Name: Sulfotransferase domain Pfam Description: Sulfotransferase domain
  misc_feature (1)..(270): Homolog of NCBI NO: 15809903 NR Description: AT5g07010/MOJ9_18 [Arabidopsis thaliana]
  misc_feature (1)..(271): Homolog of NCBI NO: 21593660 NR Description: putative flavonol sulfotransferase [Arabidopsis
  misc_feature (1)..(272): Homolog of NCBI NO: 15222843 NR Description: sulfotransferase family [Arabidopsis thaliana]
  misc_feature (1)..(270): Homolog of NCBI NO: 18415376 NR Description: sulfotransferase family [Arabidopsis thaliana]
  misc_feature (1)..(270): Homolog of NCBI NO: 9759557 NR Description: steroid sulfotransferase-like protein
  misc_feature (1)..(271): Homolog of NCBI NO: 25288806 NR Description: probable steroid sulfotransferase
  misc_feature (1)..(271): Homolog of NCBI NO: 18395604 NR Description: sulfotransferase family [Arabidopsis thaliana]
  misc_feature (1)..(270): Homolog of NCBI NO: 15230602 NR Description: sulfotransferase family [Arabidopsis thaliana]
  misc_feature (1)..(270): Homolog of NCBI NO: 38344441 NR Description: OSJNBa0038O10.13 [Oryza sativa (japonica
  misc_feature (1)..(273): Homolog of NCBI NO: 34894524 NR Description: putative steroid sulfotransferase
MVAEQHFEARGTDVLLVTMPKSGTTWIKALLYAAAHRTDDTSSSILRQLASHNSHQLVPFLEAQVYTKDQIPDLSSLPAPRLFATHIPAESLPPSVVASGCKVVYLCRDPKDCFVSLWHFMNKFTPWDIDEAHGRFCEGVSLYGPFWEHVLSYWRWHVDRPGQVLFLTYEELSADPLGQLRRLAEFIGRPFTPGEQEAGVDREIAEACAMKSMVNQEVNQSRTTEIVEMPIPNGIFFRRGVVGDWTNYLTPEMAGRIDEITKSKFEGSGLMLPKTISEISKI

SEQ ID NO: 111310 - DNA, 933 bp, Zea mays subsp. mays
  misc_feature (1)..(933): Ceres Seq. ID no. 13599557
aacaatggcagttcctccacttctcctcctcacactcctctccctcccttctcttctcatccacgccgccatctccgatgcttaccccaccattcccggaaccgctccgatcgacggaggtttctccgatgaactcaaacccatccgccgtgaggtctacggcgaaggcaaaatcttcgacatcagccaccgctacacgccggagatgccggcgtgggagtcaaaagaaggaatcggacggtttctatggctagccgcgagcatgaagaacgggtcgctcgctaacaactccgagatgaagatcccgactcacactgggacccacgtcgattcgcctggacacgtgtacgatgagtattacgacgctgggttcgatgtagactcgcttgatctccaagtcttaaacggtcctgcgttgttggttgatgttccaaggaacaagaacataactgccgaagtgatgaagtctcttaacataccaagaggagtccgtcgtgtgcttttcagaacattgaatactgacaggcgtctgatgttcaagaaggagtttgatacaagctatgtcggattcatgaaggacggcgcacaatggttggtagacaacactgacatcaaacttgttggggttgattatctatcagtagctgcatatgatgatctgattccgtcccacctagtattcctaaaaggccgagagactatactggtggagggattgaagctggatgatgtgaaggcaggagtctactctgttcattgcttacctctaagacttgttggagcagaagggtctccaattcgctgcatcctcatcagttgatttcttcctccaaaacttggagttgtctgtatgcaagttaacctttcgtatctttacttcaagatcttatgcttgacaaaaaaaaaaagtaaaataaataaggaaacttggcg

SEQ ID NO: 111311 - protein, 272 aa, Zea mays subsp. mays
  misc_feature (1)..(272): Ceres Seq. ID no. 13599558
  misc_feature (58)..(258): Pfam Name: Putative cyclase Pfam Description: Putative cyclase
  misc_feature (42)..(271): Homolog of NCBI NO: 18418393 NR Description: expressed protein [Arabidopsis thaliana]
  misc_feature (7)..(271): Homolog of NCBI NO: 15219416 NR Description: hypothetical protein [Arabidopsis thaliana]
  misc_feature (58)..(270): Homolog of NCBI NO: 23056289 NR Description: hypothetical protein [Geobacter metallireducens]
  misc_feature (59)..(270): Homolog of NCBI NO: 23016903 NR Description: hypothetical protein [Magnetospirillum
  misc_feature (42)..(231): Homolog of NCBI NO: 7486287 NR Description: hypothetical protein F28A23.60 - Arabidopsis
  misc_feature (2)..(150): Homolog of NCBI NO: 7486023 NR Description: hypothetical protein F23E12.220 - Arabidopsis
  misc_feature (58)..(270): Homolog of NCBI NO: 16330650 NR Description: hypothetical protein [Synechocystis sp. PCC 6803]
  misc_feature (57)..(272): Homolog of NCBI NO: 39998438 NR Description: cyclase, putative [Geobacter sulfurreducens PCA]
  misc_feature (5)..(271): Homolog of NCBI NO: 35215089 NR Description: hypothetical protein [Oryza sativa (japonica
  misc_feature (2)..(271): Homolog of NCBI NO: 18418598 NR Description: expressed protein [Arabidopsis thaliana]
TMAVPPLLLLTLLSLPSLLIHAAISDAYPTIPGTAPIDGGFSDELKPIRREVYGEGKIFDISHRYTPEMPAWESKEGIGRFLWLAASMKNGSLANNSEMKIPTHTGTHVDSPGHVYDEYYDAGFDVDSLDLQVLNGPALLVDVPRNKNITAEVMKSLNIPRGVRRVLFRTLNTDRRLMFKKEFDTSYVGFMKDGAQWLVDNTDIKLVGVDYLSVAAYDDLIPSHLVFLKGRETILVEGLKLDDVKAGVYSVHCLPLRLVGAEGSPIRCILIS

SEQ ID NO: 111312 - protein, 271 aa, Zea mays subsp. mays
  misc_feature (1)..(271): Ceres Seq. ID no. 13599559
  misc_feature (57)..(257): Pfam Name: Putative cyclase Pfam Description: Putative cyclase
  misc_feature (57)..(269): Homolog of NCBI NO: 23056289 NR Description: hypothetical protein [Geobacter metallireducens]
  misc_feature (56)..(271): Homolog of NCBI NO: 39998438 NR Description: cyclase, putative [Geobacter sulfurreducens PCA]
  misc_feature (58)..(269): Homolog of NCBI NO: 23016903 NR Description: hypothetical protein [Magnetospirillum
  misc_feature (57)..(269): Homolog of NCBI NO: 16330650 NR Description: hypothetical protein [Synechocystis sp. PCC 6803]
  misc_feature (41)..(230): Homolog of NCBI NO: 7486287 NR Description: hypothetical protein F28A23.60 - Arabidopsis
  misc_feature (1)..(149): Homolog of NCBI NO: 7486023 NR Description: hypothetical protein F23E12.220 - Arabidopsis
  misc_feature (41)..(270): Homolog of NCBI NO: 18418393 NR Description: expressed protein [Arabidopsis thaliana]
  misc_feature (6)..(270): Homolog of NCBI NO: 15219416 NR Description: hypothetical protein [Arabidopsis thaliana]
  misc_feature (4)..(270): Homolog of NCBI NO: 35215089 NR Description: hypothetical protein [Oryza sativa (japonica
  misc_feature (1)..(270): Homolog of NCBI NO: 18418598 NR Description: expressed protein [Arabidopsis thaliana]
MAVPPLLLLTLLSLPSLLIHAAISDAYPTIPGTAPIDGGFSDELKPIRREVYGEGKIFDISHRYTPEMPAWESKEGIGRFLWLAASMKNGSLANNSEMKIPTHTGTHVDSPGHVYDEYYDAGFDVDSLDLQVLNGPALLVDVPRNKNITAEVMKSLNIPRGVRRVLFRTLNTDRRLMFKKEFDTSYVGFMKDGAQWLVDNTDIKLVGVDYLSVAAYDDLIPSHLVFLKGRETILVEGLKLDDVKAGVYSVHCLPLRLVGAEGSPIRCILIS

SEQ ID NO: 111313 - protein, 204 aa, Zea mays subsp. mays
  misc_feature (1)..(204): Ceres Seq. ID no. 13599560
  misc_feature (1)..(190): Pfam Name: Putative cyclase Pfam Description: Putative cyclase
  misc_feature (1)..(202): Homolog of NCBI NO: 23056289 NR Description: hypothetical protein [Geobacter metallireducens]
  misc_feature (1)..(204): Homolog of NCBI NO: 39998438 NR Description: cyclase, putative [Geobacter sulfurreducens PCA]
  misc_feature (1)..(202): Homolog of NCBI NO: 23016903 NR Description: hypothetical protein [Magnetospirillum
  misc_feature (1)..(202): Homolog of NCBI NO: 16330650 NR Description: hypothetical protein [Synechocystis sp. PCC 6803]
  misc_feature (1)..(163): Homolog of NCBI NO: 7486287 NR Description: hypothetical protein F28A23.60 - Arabidopsis
  misc_feature (1)..(82): Homolog of NCBI NO: 7486023 NR Description: hypothetical protein F23E12.220 - Arabidopsis
  misc_feature (1)..(203): Homolog of NCBI NO: 18418393 NR Description: expressed protein [Arabidopsis thaliana]
  misc_feature (1)..(203): Homolog of NCBI NO: 15219416 NR Description: hypothetical protein [Arabidopsis thaliana]
  misc_feature (1)..(203): Homolog of NCBI NO: 35215089 NR Description: hypothetical protein [Oryza sativa (japonica
  misc_feature (1)..(203): Homolog of NCBI NO: 18418598 NR Description: expressed protein [Arabidopsis thaliana]
MPAWESKEGIGRFLWLAASMKNGSLANNSEMKIPTHTGTHVDSPGHVYDEYYDAGFDVDSLDLQVLNGPALLVDVPRNKNITAEVMKSLNIPRGVRRVLFRTLNTDRRLMFKKEFDTSYVGFMKDGAQWLVDNTDIKLVGVDYLSVAAYDDLIPSHLVFLKGRETILVEGLKLDDVKAGVYSVHCLPLRLVGAEGSPIRCILIS

SEQ ID NO: 111314 - DNA, 674 bp, Zea mays subsp. mays
  misc_feature (1)..(674): Ceres Seq. ID no. 12635708
acctacgtcgataaatctacgagggagcttgaccttgagcaacagagagagagagagagatgggtttcttctcgtttcttggaagagttcttttcgcttctctcttcatcctctccgcttggcaaatgttcaatgactttggagttgatggtggtcctgcagctacagagctggctccaaagcttcatctggctaagtcacatctatcttctagattaggtgtaactttgcctagcgtagaggtaaaacaagtcgttgctgctatagttgcgttgaaaggagttggaggcttactctttgttatcggaaacatcttcggtgcttatcttctggctttctaccttgtggttgtcagtcctattctgtatgatttctacaactacggacctgaggagcgtcatttctctccattgttgactgagttcttgcagagcgttgcactctttggagcattactcttctttattggaatgaagaactcaacacccactaagaggaatctgaagaggactcctaagcccaaagctgcttagtatctcttttttttttataacttttgttcggacaaaatcgtttcttagcactttggttttctttttgttgtgtgattcttagattggctcatgatatcataaaattatcttttacttgatttgattattgggatttcttgg

SEQ ID NO: 111315 - protein, 157 aa, Zea mays subsp. mays
  misc_feature (1)..(157): Ceres Seq. ID no. 12635709
  misc_feature (1)..(138): Pfam Name: HR-like lesion-inducing Pfam Description: HR-like lesion-inducing
  misc_feature (1)..(155): Homolog of NCBI NO: 7489144 NR Description: hypothetical protein (clone NF22) - common
  misc_feature (1)..(156): Homolog of NCBI NO: 15236497 NR Description: elicitor like protein
  misc_feature (1)..(24): Homolog of NCBI NO: 37534824 NR Description: putative RNA-binding protein
  misc_feature (24)..(156): Homolog of NCBI NO: 37534824 NR Description: putative RNA-binding protein
  misc_feature (1)..(155): Homolog of NCBI NO: 38346190 NR Description: OSJNBa0027O01.6 [Oryza sativa (japonica
  misc_feature (1)..(157): Homolog of NCBI NO: 40287494 NR Description: putative lesion-inducing protein [Capsicum annuum]
  misc_feature (1)..(155): Homolog of NCBI NO: 27261473 NR Description: Unknown protein [Oryza sativa (japonica
  misc_feature (1)..(157): Homolog of NCBI NO: 15219714 NR Description: unknown protein
  misc_feature (1)..(157): Homolog of NCBI NO: 15239873 NR Description: Nicotiana lesion-inducing like
  misc_feature (1)..(157): Homolog of NCBI NO: 21592798 NR Description: Nicotiana lesion-inducing like [Arabidopsis
MGFFSFLGRVLFASLFILSAWQMFNDFGVDGGPAATELAPKLHLAKSHLSSRLGVTLPSVEVKQVVAAIVALKGVGGLLFVIGNIFGAYLLAFYLVVVSPILYDFYNYGPEERHFSPLLTEFLQSVALFGALLFFIGMKNSTPTKRNLKRTPKPKAA

SEQ ID NO: 111316 - protein, 135 aa, Zea mays subsp. mays
  misc_feature (1)..(135): Ceres Seq. ID no. 12635710
  misc_feature (1)..(116): Pfam Name: HR-like lesion-inducing Pfam Description: HR-like lesion-inducing
  misc_feature (9)..(134): Homolog of NCBI NO: 3885517 NR Description: similar to Nicotiana HR lesion-inducing ORF
  misc_feature (1)..(133): Homolog of NCBI NO: 7489144 NR Description: hypothetical protein (clone NF22) - common
  misc_feature (1)..(134): Homolog of NCBI NO: 15236497 NR Description: elicitor like protein
  misc_feature (2)..(134): Homolog of NCBI NO: 37534824 NR Description: putative RNA-binding protein
  misc_feature (1)..(133): Homolog of NCBI NO: 38346190 NR Description: OSJNBa0027O01.6 [Oryza sativa (japonica
  misc_feature (1)..(135): Homolog of NCBI NO: 40287494 NR Description: putative lesion-inducing protein [Capsicum annuum]
  misc_feature (1)..(133): Homolog of NCBI NO: 27261473 NR Description: Unknown protein [Oryza sativa (japonica
  misc_feature (1)..(135): Homolog of NCBI NO: 15219714 NR Description: unknown protein
  misc_feature (1)..(135): Homolog of NCBI NO: 15239873 NR Description: Nicotiana lesion-inducing like
  misc_feature (1)..(135): Homolog of NCBI NO: 21592798 NR Description: Nicotiana lesion-inducing like [Arabidopsis
MFNDFGVDGGPAATELAPKLHLAKSHLSSRLGVTLPSVEVKQVVAAIVALKGVGGLLFVIGNIFGAYLLAFYLVVVSPILYDFYNYGPEERHFSPLLTEFLQSVALFGALLFFIGMKNSTPTKRNLKRTPKPKAA

SEQ ID NO: 111317 - DNA, 814 bp, Zea mays subsp. mays
  misc_feature (1)..(814): Ceres Seq. ID no. 15227042
tttcccgagccggaggtggacgaggtaagaagaagcagccgcagccgcagcgcgaccccgcgaggaaaccctaccgccgccgcagcaggagcagccatgggtatcgacctcgtcgccggcgggaggaacaagaggaccaagcgcgtcgcgcccaagtccgacgatgtctacctcaagctcctcgtcaagctctaccgtttcctggtgaggaggaccaagagcaagttcaacgccgtcatcctcaagaggctcttcatgagcaagactaaccgcccgccgctctccatgcgccgcctctccaacttcatgaagggaaaggaggagaagaacattgctgtggttgttggtacaatcacagatgacatgcggatccaagaggtcccagcaatgaaggttaccgctctgaggttcacagagacagcgagggcaaggattgtcaatgctggtggggagtgcctcacttttgaccagcttgcactccgtgctccaactggggagaacactatcctgttgaggggacccaagaatgcccgtgaggcggtgaggcacttcggcaaagcacctggtgtgccgcacagccataccaagccctatgtgcgctccaagggtaggaagtttgagaaggctcgtggtaggaggaacagccgtggcttcaaggtttaagtcgccctttcttgttagtcgctgtttgcgtggagcggctgttgttctgtttgagcaattgacagtaattagtaaagtactttgtactgagagtagcaaaatctatcgccccagtgtttgaatgatattttgcaagattcttatcgctgcc

SEQ ID NO: 111318 - protein, 220 aa, Zea mays subsp. mays
  misc_feature (1)..(220): Ceres Seq. ID no. 15227043
  misc_feature (33)..(219): Homolog of NCBI NO: 13592057 NR Description: ribosomal protein L18 [Rattus norvegicus]
  misc_feature (33)..(219): Homolog of NCBI NO: 4506607 NR Description: ribosomal protein L18; 60S ribosomal protein L18
  misc_feature (33)..(196): Homolog of NCBI NO: 28798549 NR Description: 60S ribosomal protein [Medicago sativa]
  misc_feature (34)..(220): Homolog of NCBI NO: 7440855 NR Description: ribosomal protein L18, cytosolic - Arabidopsis
  misc_feature (36)..(220): Homolog of NCBI NO: 6094021 NR Description: 60S RIBOSOMAL PROTEIN L18
  misc_feature (33)..(220): Homolog of NCBI NO: 15241061 NR Description: 60S ribosomal protein L18 (RPL18C) [Arabidopsis
  misc_feature (33)..(220): Homolog of NCBI NO: 15230011 NR Description: 60S ribosomal protein L18 (RPL18B) [Arabidopsis
  misc_feature (33)..(220): Homolog of NCBI NO: 606970 NR Description: cytoplasmic ribosomal protein L18
  misc_feature (33)..(220): Homolog of NCBI NO: 34393858 NR Description: putative cytoplasmic ribosomal protein L18
  misc_feature (33)..(220): Homolog of NCBI NO: 34897628 NR Description: cytoplasmic ribosomal protein L18 [Oryza sativa]
FPEPEVDEVRRSSRSRSATPRGNPTAAAAGAAMGIDLVAGGRNKRTKRVAPKSDDVYLKLLVKLYRFLVRRTKSKFNAVILKRLFMSKTNRPPLSMRRLSNFMKGKEEKNIAVVVGTITDDMRIQEVPAMKVTALRFTETARARIVNAGGECLTFDQLALRAPTGENTILLRGPKNAREAVRHFGKAPGVPHSHTKPYVRSKGRKFEKARGRRNSRGFKV

SEQ ID NO: 111319 - protein, 188 aa, Zea mays subsp. mays
  misc_feature (1)..(188): Ceres Seq. ID no. 15227044
  misc_feature (1)..(187): Homolog of NCBI NO: 13592057 NR Description: ribosomal protein L18 [Rattus norvegicus]
  misc_feature (1)..(187): Homolog of NCBI NO: 4506607 NR Description: ribosomal protein L18; 60S ribosomal protein L18
  misc_feature (1)..(164): Homolog of NCBI NO: 28798549 NR Description: 60S ribosomal protein [Medicago sativa]
  misc_feature (2)..(188): Homolog of NCBI NO: 7440855 NR Description: ribosomal protein L18, cytosolic - Arabidopsis
  misc_feature (4)..(188): Homolog of NCBI NO: 6094021 NR Description: 60S RIBOSOMAL PROTEIN L18
  misc_feature (1)..(188): Homolog of NCBI NO: 15241061 NR Description: 60S ribosomal protein L18 (RPL18C) [Arabidopsis
  misc_feature (1)..(188): Homolog of NCBI NO: 15230011 NR Description: 60S ribosomal protein L18 (RPL18B) [Arabidopsis
  misc_feature (1)..(188): Homolog of NCBI NO: 606970 NR Description: cytoplasmic ribosomal protein L18
  misc_feature (1)..(188): Homolog of NCBI NO: 34393858 NR Description: putative cytoplasmic ribosomal protein L18
  misc_feature (1)..(188): Homolog of NCBI NO: 34897628 NR Description: cytoplasmic ribosomal protein L18 [Oryza sativa]
MGIDLVAGGRNKRTKRVAPKSDDVYLKLLVKLYRFLVRRTKSKFNAVILKRLFMSKTNRPPLSMRRLSNFMKGKEEKNIAVVVGTITDDMRIQEVPAMKVTALRFTETARARIVNAGGECLTFDQLALRAPTGENTILLRGPKNAREAVRHFGKAPGVPHSHTKPYVRSKGRKFEKARGRRNSRGFKV

SEQ ID NO: 111320 - protein, 135 aa, Zea mays subsp. mays
  misc_feature (1)..(135): Ceres Seq. ID no. 15227045
  misc_feature (1)..(134): Homolog of NCBI NO: 13592057 NR Description: ribosomal protein L18 [Rattus norvegicus]
  misc_feature (1)..(134): Homolog of NCBI NO: 4506607 NR Description: ribosomal protein L18; 60S ribosomal protein L18
  misc_feature (1)..(111): Homolog of NCBI NO: 28798549 NR Description: 60S ribosomal protein [Medicago sativa]
  misc_feature (1)..(135): Homolog of NCBI NO: 7440855 NR Description: ribosomal protein L18, cytosolic - Arabidopsis
  misc_feature (1)..(135): Homolog of NCBI NO: 6094021 NR Description: 60S RIBOSOMAL PROTEIN L18
  misc_feature (1)..(135): Homolog of NCBI NO: 15241061 NR Description: 60S ribosomal protein L18 (RPL18C) [Arabidopsis
  misc_feature (1)..(135): Homolog of NCBI NO: 15230011 NR Description: 60S ribosomal protein L18 (RPL18B) [Arabidopsis
  misc_feature (1)..(135): Homolog of NCBI NO: 606970 NR Description: cytoplasmic ribosomal protein L18
  misc_feature (1)..(135): Homolog of NCBI NO: 34393858 NR Description: putative cytoplasmic ribosomal protein L18
  misc_feature (1)..(135): Homolog of NCBI NO: 34897628 NR Description: cytoplasmic ribosomal protein L18 [Oryza sativa]
MSKTNRPPLSMRRLSNFMKGKEEKNIAVVVGTITDDMRIQEVPAMKVTALRFTETARARIVNAGGECLTFDQLALRAPTGENTILLRGPKNAREAVRHFGKAPGVPHSHTKPYVRSKGRKFEKARGRRNSRGFKV

SEQ ID NO: 111321 - DNA, 813 bp, Zea mays subsp. mays
  misc_feature (1)..(813): Ceres Seq. ID no. 12635711
accgtgccagaaccgcaatccgcgcctccccaatcgcgcgcttccatccatggcacacggtttggtcctttccttcccaaccgcgcccctccatccatggcagtcgccagcgcccttccatccatggaagcgcgcccacactcacacctccatctcccccccttctctctccctcaatcgccctgatccagatacccaagcacgcgcgtggcgaagagacgggtgtaacctccaggatgattcagggtcgatggcgtggatcgaaaatgaccgggcgccttggcgtcatccaaccagcgcggagctccatccgcaacaaattcgagtggcctcgcctccggtcccggtcagtagacccggtcgtgcagatcggcaggaacttcacccccgtcggtgagcagtcaccgacttcatctccaacgactccgacgaagacaggcggctccagagcgcgcgtcacggagatctccgtcatcaccgtgtccgacagcggggtcccatgcctcacgtttgggtccaggaatgcgtctttcctcttggaggtgccactcggcgtcgctgcctcgctccccgatgagggccacattgggggtcgtgcagttgatagcggtgtcatgatcgaggagcgcttgaatcttgtcatacacgcctgctagggcgaacctgaatcctgtcgtgtttgaagggtaccaggtgtgtggtgtccctggtgggcagctgatgaccaccatagagacggttgtccccttctcctctgtttgactgcctccacatccgcttctataaaattttagatgcatggacatctgctcc

SEQ ID NO: 111322 - protein, 217 aa, Zea mays subsp. mays
  misc_feature (1)..(217): Ceres Seq. ID no. 12635712
  misc_feature (150)..(210): Homolog of NCBI NO: 29467530 NR Description: P0582D05.22 [Oryza sativa (japonica
RARTAIRASPIARFHPWHTVWSFPSQPRPSIHGSRQRPSIHGSAPTLTPPSPPLLSPSIALIQIPKHARGEETGVTSRMIQGRWRGSKMTGRLGVIQPARSSIRNKFEWPRLRSRSVDPVVQIGRNFTPVGEQSPTSSPTTPTKTGGSRARVTEISVITVSDSGVPCLTFGSRNASFLLEVPLGVAASLPDEGHIGGRAVDSGVMIEERLNLVIHAC

SEQ ID NO: 111323 - protein, 139 aa, Zea mays subsp. mays
  misc_feature (1)..(139): Ceres Seq. ID no. 12635713
  misc_feature (72)..(132): Homolog of NCBI NO: 29467530 NR Description: P0582D05.22 [Oryza sativa (japonica
MIQGRWRGSKMTGRLGVIQPARSSIRNKFEWPRLRSRSVDPVVQIGRNFTPVGEQSPTSSPTTPTKTGGSRARVTEISVITVSDSGVPCLTFGSRNASFLLEVPLGVAASLPDEGHIGGRAVDSGVMIEERLNLVIHAC

SEQ ID NO: 111324 - protein, 131 aa, Zea mays subsp. mays
  misc_feature (1)..(131): Ceres Seq. ID no. 12635714
PCQNRNPRLPNRALPSMAHGLVLSFPTAPLHPWQSPAPFHPWKRAHTHTSISPPSLSLNRPDPDTQARAWRRDGCNLQDDSGSMAWIENDRAPWRHPTSAELHPQQIRVASPPVPVSRPGRADRQELHPRR

SEQ ID NO: 111325 - DNA, 912 bp, Zea mays subsp. mays
  misc_feature (1)..(912): Ceres Seq. ID no. 12635930
aactgaaagataagaagaagatgaagctgaaagtgtatgcagatcgtatgtcacagccgtctcgtgctgtaatcatattctgcaaggttaatggaatcgaattcgatgaggttctgattatcttggcgaagcgtcagcaattatcccctgaattcaaagagattaacccattggggaaagttccaactattgttgacggcagacttaagctcttcgagagtcacgccatcttgatttatctttcctctgcattcccgagtgtagctgatcattggtacccgaatgatctttccaagagagccaagattcactctgtcttggattggcatcactccaatttacgccctggtgcagctggatatgtaatgaatagtgttctagctccatttcttggcggttctctggactcgaaagcagctgctgaagctgagcagatactaaccaagtctctgtccactctagagactttttggcttaagggcaatgctaaattcttgctcggaagcaaccaaccatccatagctgatctcagccttgtatgcgaacttatgcaactccaggttttggatgagaaagatcgtcttagattgttttctccttacaagaaagttgaggaatggattgagaatacgagaaaggccacgcagcctcactttgatgtggttcataaaaccctttacggagctaaagacaaatttgagaaacagcggaagatggggacaacaaccgtatctaaacctggttttcaatctaagatgtgagaacaaatttgtatcggaggctgtttgtgaaaaccccggtttaggggatcactgtaataactcggttcaacatttacactgtaatcggaaccaaggaatgtatttgtaatcacttatcagggctgtttcaaaataaacatataagtgaggc

SEQ ID NO: 111326 - protein, 252 aa, Zea mays subsp. mays
  misc_feature (1)..(252): Ceres Seq. ID no. 12635931
  misc_feature (7)..(252): Homolog of NCBI NO: 30693769 NR Description: glutathione transferase, putative [Arabidopsis
  misc_feature (7)..(252): Homolog of NCBI NO: 15237583 NR Description: glutathione transferase, putative
  misc_feature (7)..(252): Homolog of NCBI NO: 10177768 NR Description: glutathione transferase [Arabidopsis thaliana]
  misc_feature (7)..(252): Homolog of NCBI NO: 15237595 NR Description: glutathione transferase, putative
  misc_feature (7)..(252): Homolog of NCBI NO: 25453559 NR Description: glutathione transferase (EC 2.5.1.18) GST 10b
LKDKKKMKLKVYADRMSQPSRAVIIFCKVNGIEFDEVLIILAKRQQLSPEFKEINPLGKVPTIVDGRLKLFESHAILIYLSSAFPSVADHWYPNDLSKRAKIHSVLDWHHSNLRPGAAGYVMNSVLAPFLGGSLDSKAAAEAEQILTKSLSTLETFWLKGNAKFLLGSNQPSIADLSLVCELMQLQVLDEKDRLRLFSPYKKVEEWIENTRKATQPHFDVVHKTLYGAKDKFEKQRKMGTTTVSKPGFQSKM

SEQ ID NO: 111327 - protein, 246 aa, Zea mays subsp. mays
  misc_feature (1)..(246): Ceres Seq. ID no. 12635932
  misc_feature (1)..(246): Homolog of NCBI NO: 10177768 NR Description: glutathione transferase [Arabidopsis thaliana]
  misc_feature (1)..(246): Homolog of NCBI NO: 15237595 NR Description: glutathione transferase, putative
  misc_feature (1)..(246): Homolog of NCBI NO: 25453559 NR Description: glutathione transferase (EC 2.5.1.18) GST 10b
  misc_feature (1)..(246): Homolog of NCBI NO: 30693769 NR Description: glutathione transferase, putative [Arabidopsis
  misc_feature (1)..(246): Homolog of NCBI NO: 15237583 NR Description: glutathione transferase, putative
MKLKVYADRMSQPSRAVIIFCKVNGIEFDEVLIILAKRQQLSPEFKEINPLGKVPTIVDGRLKLFESHAILIYLSSAFPSVADHWYPNDLSKRAKIHSVLDWHHSNLRPGAAGYVMNSVLAPFLGGSLDSKAAAEAEQILTKSLSTLETFWLKGNAKFLLGSNQPSIADLSLVCELMQLQVLDEKDRLRLFSPYKKVEEWIENTRKATQPHFDVVHKTLYGAKDKFEKQRKMGTTTVSKPGFQSKM

SEQ ID NO: 111328 - protein, 237 aa, Zea mays subsp. mays
  misc_feature (1)..(237): Ceres Seq. ID no. 12635933
  misc_feature (1)..(237): Homolog of NCBI NO: 10177768 NR Description: glutathione transferase [Arabidopsis thaliana]
  misc_feature (1)..(237): Homolog of NCBI NO: 15237595 NR Description: glutathione transferase, putative
  misc_feature (1)..(237): Homolog of NCBI NO: 25453559 NR Description: glutathione transferase (EC 2.5.1.18) GST 10b
  misc_feature (1)..(237): Homolog of NCBI NO: 30693769 NR Description: glutathione transferase, putative [Arabidopsis
  misc_feature (1)..(237): Homolog of NCBI NO: 15237583 NR Description: glutathione transferase, putative
MSQPSRAVIIFCKVNGIEFDEVLIILAKRQQLSPEFKEINPLGKVPTIVDGRLKLFESHAILIYLSSAFPSVADHWYPNDLSKRAKIHSVLDWHHSNLRPGAAGYVMNSVLAPFLGGSLDSKAAAEAEQILTKSLSTLETFWLKGNAKFLLGSNQPSIADLSLVCELMQLQVLDEKDRLRLFSPYKKVEEWIENTRKATQPHFDVVHKTLYGAKDKFEKQRKMGTTTVSKPGFQSKM

SEQ ID NO: 111329 - DNA, 622 bp, Zea mays subsp. mays
  misc_feature (1)..(622): Ceres Seq. ID no. 13623037
attttttcccactttcctttgagaaaacagagcaaaatggcactgagaatgtgggcttcctctacagcaaacgctcttaagctctcttcttctacctccaaatctcatctccttcctgcgttctccatctccagatgcttctcctcagtgttggaaggactcaagtatgcaacttcacacgagtgggtgaaacatgatggctcggtggctaccattggcatcactgaccatgcccaggaccatctaggagaagttgtgtttgtggagctgccagaagagaaaagctcagtgagcaaagaaaagaactttggagctgtggagagtgtgaaggcaacaagtgagattctatctccaatctctggtgaagtcattgaggttaacacaaagctaaccgattcacctggtttgatcaactcaagcccctatgaagatggttggatgataaaggtgaaaccaagcaaccctgcagagttggaaaccttgatgggttcaaaggaatacaccaagttctgcgaagaggaagatgctgctcactagagggtttcatctgtctatgtttcgtaccctatctctctcagctttgtatctctgtaatactaatttggttgaaagatgatcattc

SEQ ID NO: 111330 - protein, 178 aa, Zea mays subsp. mays
  misc_feature (1)..(178): Ceres Seq. ID no. 13623038
  misc_feature (54)..(174): Pfam Name: Glycine cleavage H-protein Pfam Description: Glycine cleavage H-protein
  misc_feature (13)..(176): Homolog of NCBI NO: 3334201 NR Description: Glycine cleavage system H protein, mitochondrial
  misc_feature (14)..(178): Homolog of NCBI NO: 2119600 NR Description: glycine cleavage system protein H precursor
  misc_feature (13)..(178): Homolog of NCBI NO: 1346118 NR Description: Glycine cleavage system H protein, mitochondrial
  misc_feature (13)..(178): Homolog of NCBI NO: 2887286 NR Description: H protein [Flaveria anomala]
  misc_feature (13)..(178): Homolog of NCBI NO: 3688309 NR Description: H-Protein precursor [Flaveria pringlei]
  misc_feature (13)..(178): Homolog of NCBI NO: 2499417 NR Description: Glycine cleavage system H protein, mitochondrial
  misc_feature (13)..(178): Homolog of NCBI NO: 2147453 NR Description: glycine cleavage system protein H precursor
  misc_feature (13)..(178): Homolog of NCBI NO: 121080 NR Description: Glycine cleavage system H protein, mitochondrial
  misc_feature (13)..(178): Homolog of NCBI NO: 15226973 NR Description: glycine decarboxylase complex H-protein
  misc_feature (13)..(178): Homolog of NCBI NO: 15223217 NR Description: glycine cleavage system H protein precursor
IFSHFPLRKQSKMALRMWASSTANALKLSSSTSKSHLLPAFSISRCFSSVLEGLKYATSHEWVKHDGSVATIGITDHAQDHLGEVVFVELPEEKSSVSKEKNFGAVESVKATSEILSPISGEVIEVNTKLTDSPGLINSSPYEDGWMIKVKPSNPAELETLMGSKEYTKFCEEEDAAH

SEQ ID NO: 111331 - protein, 166 aa, Zea mays subsp. mays
  misc_feature (1)..(166): Ceres Seq. ID no. 13623039
  misc_feature (42)..(162): Pfam Name: Glycine cleavage H-protein Pfam Description: Glycine cleavage H-protein
  misc_feature (1)..(164): Homolog of NCBI NO: 3334201 NR Description: Glycine cleavage system H protein, mitochondrial
  misc_feature (2)..(166): Homolog of NCBI NO: 2119600 NR Description: glycine cleavage system protein H precursor
  misc_feature (1)..(166): Homolog of NCBI NO: 1346118 NR Description: Glycine cleavage system H protein, mitochondrial
  misc_feature (1)..(166): Homolog of NCBI NO: 2887286 NR Description: H protein [Flaveria anomala]
  misc_feature (1)..(166): Homolog of NCBI NO: 3688309 NR Description: H-Protein precursor [Flaveria pringlei]
  misc_feature (1)..(166): Homolog of NCBI NO: 2499417 NR Description: Glycine cleavage system H protein, mitochondrial
  misc_feature (1)..(166): Homolog of NCBI NO: 2147453 NR Description: glycine cleavage system protein H precursor
  misc_feature (1)..(166): Homolog of NCBI NO: 121080 NR Description: Glycine cleavage system H protein, mitochondrial
  misc_feature (1)..(166): Homolog of NCBI NO: 15226973 NR Description: glycine decarboxylase complex H-protein
  misc_feature (1)..(166): Homolog of NCBI NO: 15223217 NR Description: glycine cleavage system H protein precursor
MALRMWASSTANALKLSSSTSKSHLLPAFSISRCFSSVLEGLKYATSHEWVKHDGSVATIGITDHAQDHLGEVVFVELPEEKSSVSKEKNFGAVESVKATSEILSPISGEVIEVNTKLTDSPGLINSSPYEDGWMIKVKPSNPAELETLMGSKEYTKFCEEEDAAH

SEQ ID NO: 111332 - protein, 162 aa, Zea mays subsp. mays
  misc_feature (1)..(162): Ceres Seq. ID no. 13623040
  misc_feature (38)..(158): Pfam Name: Glycine cleavage H-protein Pfam Description: Glycine cleavage H-protein
  misc_feature (1)..(160): Homolog of NCBI NO: 3334201 NR Description: Glycine cleavage system H protein, mitochondrial
  misc_feature (1)..(162): Homolog of NCBI NO: 2119600 NR Description: glycine cleavage system protein H precursor
  misc_feature (1)..(162): Homolog of NCBI NO: 1346118 NR Description: Glycine cleavage system H protein, mitochondrial
  misc_feature (1)..(162): Homolog of NCBI NO: 2887286 NR Description: H protein [Flaveria anomala]
  misc_feature (1)..(162): Homolog of NCBI NO: 3688309 NR Description: H-Protein precursor [Flaveria pringlei]
  misc_feature (1)..(162): Homolog of NCBI NO: 2499417 NR Description: Glycine cleavage system H protein, mitochondrial
  misc_feature (1)..(162): Homolog of NCBI NO: 2147453 NR Description: glycine cleavage system protein H precursor
  misc_feature (1)..(162): Homolog of NCBI NO: 121080 NR Description: Glycine cleavage system H protein, mitochondrial
  misc_feature (1)..(162): Homolog of NCBI NO: 15226973 NR Description: glycine decarboxylase complex H-protein
  misc_feature (1)..(162): Homolog of NCBI NO: 15223217 NR Description: glycine cleavage system H protein precursor
MWASSTANALKLSSSTSKSHLLPAFSISRCFSSVLEGLKYATSHEWVKHDGSVATIGITDHAQDHLGEVVFVELPEEKSSVSKEKNFGAVESVKATSEILSPISGEVIEVNTKLTDSPGLINSSPYEDGWMIKVKPSNPAELETLMGSKEYTKFCEEEDAAH

SEQ ID NO: 111333 - DNA, 735 bp, Zea mays subsp. mays
  misc_feature (1)..(735): Ceres Seq. ID no. 13599383
ctaacccaacgaccagacgcaacacgacggcgacggccatggcttcgccggacctcgccgccggcgacggcagctacgactttcaccttcgctctctctccgcggcctcacgggactccgctgcggcctccgaccccgcctctgaccccaacctcctccaatctgttaggagggtgtgcgagatgtgccgaacggcgaaggaagcgaaggacgagatggtggcgcgggcgttccccgtgatgggcaagctatttcagcgatgcgccgccgctcccacgcaggccgttgcctccaccggcgtgctgctcctcaccattttgcaattcttcttggattttggggaggctgttttgcatgatgctgatggtagcttgaaaaccttcttccgctcttgcttaagtagggagtttgcagatcctattgttgcagagcgcacagttgaattccttgtaacaaacaagacaaagatccttagctcctttcccaatttgattccacaggaggctgtaggccaaaaaggtagagaaaaaacagaaaaaaccatatttgtatgataagctactcaaccaatcttttgtaagattctttatagaatatctctcttctcttcctattttccatattcgacttaatcttgttaacacatgccaatgcttgtgtatccttgtttatacacagttctatccattgttgataaagcttatcgataccgtcgacctcgagggggcgtccggt

SEQ ID NO: 111334 - protein, 183 aa, Zea mays subsp. mays
  misc_feature (1)..(183): Ceres Seq. ID no. 13599384
  misc_feature (22)..(166): Homolog of NCBI NO: 22331098 NR Description: expressed protein [Arabidopsis thaliana]
  misc_feature (22)..(166): Homolog of NCBI NO: 20465414 NR Description: unknown protein [Arabidopsis thaliana]
  misc_feature (13)..(166): Homolog of NCBI NO: 39545844 NR Description: OSJNBb0060E08.15 [Oryza sativa (japonica
NPTTRRNTTATAMASPDLAAGDGSYDFHLRSLSAASRDSAAASDPASDPNLLQSVRRVCEMCRTAKEAKDEMVARAFPVMGKLFQRCAAAPTQAVASTGVLLLTILQFFLDFGEAVLHDADGSLKTFFRSCLSREFADPIVAERTVEFLVTNKTKILSSFPNLIPQEAVGQKGREKTEKTIFV

SEQ ID NO: 111335 - protein, 171 aa, Zea mays subsp. mays
  misc_feature (1)..(171): Ceres Seq. ID no. 13599385
  misc_feature (10)..(154): Homolog of NCBI NO: 22331098 NR Description: expressed protein [Arabidopsis thaliana]
  misc_feature (10)..(154): Homolog of NCBI NO: 20465414 NR Description: unknown protein [Arabidopsis thaliana]
  misc_feature (1)..(154): Homolog of NCBI NO: 39545844 NR Description: OSJNBb0060E08.15 [Oryza sativa (japonica
MASPDLAAGDGSYDFHLRSLSAASRDSAAASDPASDPNLLQSVRRVCEMCRTAKEAKDEMVARAFPVMGKLFQRCAAAPTQAVASTGVLLLTILQFFLDFGEAVLHDADGSLKTFFRSCLSREFADPIVAERTVEFLVTNKTKILSSFPNLIPQEAVGQKGREKTEKTIFV

SEQ ID NO: 111336 - protein, 123 aa, Zea mays subsp. mays
  misc_feature (1)..(123): Ceres Seq. ID no. 13599386
  misc_feature (1)..(106): Homolog of NCBI NO: 22331098 NR Description: expressed protein [Arabidopsis thaliana]
  misc_feature (1)..(106): Homolog of NCBI NO: 20465414 NR Description: unknown protein [Arabidopsis thaliana]
  misc_feature (1)..(106): Homolog of NCBI NO: 39545844 NR Description: OSJNBb0060E08.15 [Oryza sativa (japonica
MCRTAKEAKDEMVARAFPVMGKLFQRCAAAPTQAVASTGVLLLTILQFFLDFGEAVLHDADGSLKTFFRSCLSREFADPIVAERTVEFLVTNKTKILSSFPNLIPQEAVGQKGREKTEKTIFV

SEQ ID NO: 111337 - DNA, 910 bp, Zea mays subsp. mays
  misc_feature (1)..(910): Ceres Seq. ID no. 12635723
aaaacacacctctccttcacatatttcttctttgtagtaatcagaaaggcagagagagagagagagatcagaggaaacaatggcgtctaactcgctcatgagctgcggcatcgccgccgtctacccttcccttctttcttcttcaaagtctaaattcgtctcagccggagtttctctccccaacgttggtaacgttggccacatcagaatggctgctcactggatgcccggcgagccacgtccagcttacctcgacggctctgcccctggtgactttggatttgacccgcttggacttggagaggttccagagaatcttgagagatacaaagaatcagagctcatccattgcagatgggctatgctcgctgttccagggattttggtaccagaggctttgggatacggaaactgggtcaaggcccaagaatgggcagcagtgcctggaggacaagccacttacttgggcaacccagtcccatggggtactttgcccacaatcttggctatagagttcttagctattgcctttgtggagcaccagaggagcatggagaaagaccctgagaaaaagaagtaccctggaggtgcatttgaccctcttggatactccaaggacccgaagaagtttgaggagttgaaagtcaaggagatcaagaacgggcgtcttgcgttgttggcgtttgtaggattctgtgtgcagcaatcggcctacccaggcacaggaccattggagaacctggctactcacttggcggatccatggcacaaaaacattggcgatattgttatccctttgaactagtgactttgtaaagaaaagatagtaatgtgtcctatgagctttatgtgtatcaaaactctctgtaatgaatgacagattgtctgaaacctttgttttgtcttggtg

SEQ ID NO: 111338 - protein, 241 aa, Zea mays subsp. mays
  misc_feature (1)..(241): Ceres Seq. ID no. 12635724
  misc_feature (53)..(210): Pfam Name: Chlorophyll A-B binding protein Pfam Description: Chlorophyll A-B binding protein
  misc_feature (1)..(239): Homolog of NCBI NO: 3789954 NR Description: chlorophyll a/b-binding protein precursor [Oryza
  misc_feature (1)..(241): Homolog of NCBI NO: 6685157 NR Description: chlorophyll a/b binding protein precursor
  misc_feature (186)..(241): Homolog of NCBI NO: 30694146 NR Description: light-harvesting chlorophyll a/b binding protein
  misc_feature (1)..(151): Homolog of NCBI NO: 30694146 NR Description: light-harvesting chlorophyll a/b binding protein
  misc_feature (1)..(239): Homolog of NCBI NO: 115764 NR Description: Chlorophyll A-B binding protein 6A, chloroplast
  misc_feature (1)..(239): Homolog of NCBI NO: 82079 NR Description: chlorophyll a/b-binding protein type I precursor
  misc_feature (1)..(239): Homolog of NCBI NO: 82078 NR Description: chlorophyll a/b-binding protein type I precursor
  misc_feature (1)..(238): Homolog of NCBI NO: 625547 NR Description: chlorophyll a/b-binding protein type I - common
  misc_feature (1)..(241): Homolog of NCBI NO: 13265501 NR Description: AT3g54890 [Arabidopsis thaliana]
  misc_feature (1)..(241): Homolog of NCBI NO: 15233115 NR Description: light-harvesting chlorophyll a/b binding protein
MASNSLMSCGIAAVYPSLLSSSKSKFVSAGVSLPNVGNVGHIRMAAHWMPGEPRPAYLDGSAPGDFGFDPLGLGEVPENLERYKESELIHCRWAMLAVPGILVPEALGYGNWVKAQEWAAVPGGQATYLGNPVPWGTLPTILAIEFLAIAFVEHQRSMEKDPEKKKYPGGAFDPLGYSKDPKKFEELKVKEIKNGRLALLAFVGFCVQQSAYPGTGPLENLATHLADPWHKNIGDIVIPLN

SEQ ID NO: 111339 - protein, 235 aa, Zea mays subsp. mays
  misc_feature (1)..(235): Ceres Seq. ID no. 12635725
  misc_feature (47)..(204): Pfam Name: Chlorophyll A-B binding protein Pfam Description: Chlorophyll A-B binding protein
  misc_feature (1)..(233): Homolog of NCBI NO: 3789954 NR Description: chlorophyll a/b-binding protein precursor [Oryza
  misc_feature (1)..(235): Homolog of NCBI NO: 6685157 NR Description: chlorophyll a/b binding protein precursor
  misc_feature (180)..(235): Homolog of NCBI NO: 30694146 NR Description: light-harvesting chlorophyll a/b binding protein
  misc_feature (1)..(145): Homolog of NCBI NO: 30694146 NR Description: light-harvesting chlorophyll a/b binding protein
  misc_feature (1)..(233): Homolog of NCBI NO: 115764 NR Description: Chlorophyll A-B binding protein 6A, chloroplast
  misc_feature (1)..(233): Homolog of NCBI NO: 82079 NR Description: chlorophyll a/b-binding protein type I precursor
  misc_feature (1)..(233): Homolog of NCBI NO: 82078 NR Description: chlorophyll a/b-binding protein type I precursor
  misc_feature (1)..(232): Homolog of NCBI NO: 625547 NR Description: chlorophyll a/b-binding protein type I - common
  misc_feature (1)..(235): Homolog of NCBI NO: 13265501 NR Description: AT3g54890 [Arabidopsis thaliana]
  misc_feature (1)..(235): Homolog of NCBI NO: 15233115 NR Description: light-harvesting chlorophyll a/b binding protein
MSCGIAAVYPSLLSSSKSKFVSAGVSLPNVGNVGHIRMAAHWMPGEPRPAYLDGSAPGDFGFDPLGLGEVPENLERYKESELIHCRWAMLAVPGILVPEALGYGNWVKAQEWAAVPGGQATYLGNPVPWGTLPTILAIEFLAIAFVEHQRSMEKDPEKKKYPGGAFDPLGYSKDPKKFEELKVKEIKNGRLALLAFVGFCVQQSAYPGTGPLENLATHLADPWHKNIGDIVIPLN

SEQ ID NO: 111340 - protein, 198 aa, Zea mays subsp. mays
  misc_feature (1)..(198): Ceres Seq. ID no. 12635726
  misc_feature (10)..(167): Pfam Name: Chlorophyll A-B binding protein Pfam Description: Chlorophyll A-B binding protein
  misc_feature (143)..(198): Homolog of NCBI NO: 30694146 NR Description: light-harvesting chlorophyll a/b binding protein
  misc_feature (1)..(108): Homolog of NCBI NO: 30694146 NR Description: light-harvesting chlorophyll a/b binding protein
  misc_feature (1)..(196): Homolog of NCBI NO: 115764 NR Description: Chlorophyll A-B binding protein 6A, chloroplast
  misc_feature (1)..(196): Homolog of NCBI NO: 82079 NR Description: chlorophyll a/b-binding protein type I precursor
  misc_feature (1)..(196): Homolog of NCBI NO: 3789954 NR Description: chlorophyll a/b-binding protein precursor [Oryza
  misc_feature (1)..(198): Homolog of NCBI NO: 6685157 NR Description: chlorophyll a/b binding protein precursor
  misc_feature (1)..(196): Homolog of NCBI NO: 82078 NR Description: chlorophyll a/b-binding protein type I precursor
  misc_feature (1)..(195): Homolog of NCBI NO: 625547 NR Description: chlorophyll a/b-binding protein type I - common
  misc_feature (1)..(198): Homolog of NCBI NO: 13265501 NR Description: AT3g54890 [Arabidopsis thaliana]
  misc_feature (1)..(198): Homolog of NCBI NO: 15233115 NR Description: light-harvesting chlorophyll a/b binding protein
MAAHWMPGEPRPAYLDGSAPGDFGFDPLGLGEVPENLERYKESELIHCRWAMLAVPGILVPEALGYGNWVKAQEWAAVPGGQATYLGNPVPWGTLPTILAIEFLAIAFVEHQRSMEKDPEKKKYPGGAFDPLGYSKDPKKFEELKVKEIKNGRLALLAFVGFCVQQSAYPGTGPLENLATHLADPWHKNIGDIVIPLN

SEQ ID NO: 111341 - DNA, 704 bp, Zea mays subsp. mays
  misc_feature (1)..(704): Ceres Seq. ID no. 13600599
cccccctccagttcscarmwaaatactaatatctaaatctcttccttcttccaatcaagacctgactactcttgaagtttctgaaacaacagggcattttaatggcggccatgaactcgagtgttctcacctgcagctacgctatctctggtgctggctcagcagaactgaaccagaaagtgggtttggtcaattcatcagttggttttggtcaaaagaaacaaacgcttccagtgatcaaagcagctcaaagagttggtggtgatgatgttaatggaagaagatccgcaatggtgttcttagctgctacactcttctcctctgctgctgtatctgcttccgctaatgctagcgtcttcgatgaatacctcgagaagagcaaagccaacaaagagctgaatgataagaagagattggcaacaagtggagcaaactttgcgagagcgtttactgtccagttcggaagctgcaagttccctgagaatttcactggctgccaagatcttgccaagcaaaagaaagttccatttatctcagaagatttggcgttggaatgtgaaggcaaagacaagttcaagtgtggttccaatgttttctggaaatggtgatcatcttttgtttctgttttaatccattcttgtataaactcaacaatgtatcaatccatctctctgttcatcaaagtctcatatccatttgaattt

SEQ ID NO: 111342 - protein, 168 aa, Zea mays subsp. mays
  misc_feature (1)..(168): Ceres Seq. ID no. 15218981
  misc_feature (34)..(168): Pfam Name: Photosystem I reaction centre subunit N (PSAN or PSI-N) Pfam Description: Photosystem I reaction centre subunit N (PSAN
  misc_feature (85)..(133): Homolog of NCBI NO: 485082 NR Description: photosystem I 9K protein - rice (strain
  misc_feature (59)..(162): Homolog of NCBI NO: 12744797 NR Description: PsaN precursor [Chlamydomonas reinhardtii]
  misc_feature (71)..(162): Homolog of NCBI NO: 11134150 NR Description: Photosystem I reaction centre subunit N,
  misc_feature (78)..(168): Homolog of NCBI NO: 3914466 NR Description: Photosystem I reaction centre subunit N,
  misc_feature (48)..(168): Homolog of NCBI NO: 400879 NR Description: Photosystem I reaction centre subunit N,
  misc_feature (1)..(168): Homolog of NCBI NO: 28629385 NR Description: photosystem I-N subunit [Phaseolus vulgaris]
  misc_feature (1)..(168): Homolog of NCBI NO: 15237593 NR Description: photosystem I reaction center subunit PSI-N
MAAMNSSVLTCSYAISGAGSAELNQKVGLVNSSVGFGQKKQTLPVIKAAQRVGGDDVNGRRSAMVFLAATLFSSAAVSASANASVFDEYLEKSKANKELNDKKRLATSGANFARAFTVQFGSCKFPENFTGCQDLAKQKKVPFISEDLALECEGKDKFKCGSNVFWKW

SEQ ID NO: 111343 - protein, 165 aa, Zea mays subsp. mays
  misc_feature (1)..(165): Ceres Seq. ID no. 15218982
  misc_feature (31)..(165): Pfam Name: Photosystem I reaction centre subunit N (PSAN or PSI-N) Pfam Description: Photosystem I reaction centre subunit N (PSAN
  misc_feature (82)..(130): Homolog of NCBI NO: 485082 NR Description: photosystem I 9K protein - rice (strain
  misc_feature (56)..(159): Homolog of NCBI NO: 12744797 NR Description: PsaN precursor [Chlamydomonas reinhardtii]
  misc_feature (68)..(159): Homolog of NCBI NO: 11134150 NR Description: Photosystem I reaction centre subunit N,
  misc_feature (75)..(165): Homolog of NCBI NO: 3914466 NR Description: Photosystem I reaction centre subunit N,
  misc_feature (45)..(165): Homolog of NCBI NO: 400879 NR Description: Photosystem I reaction centre subunit N,
  misc_feature (1)..(165): Homolog of NCBI NO: 28629385 NR Description: photosystem I-N subunit [Phaseolus vulgaris]
  misc_feature (1)..(165): Homolog of NCBI NO: 15237593 NR Description: photosystem I reaction center subunit PSI-N
MNSSVLTCSYAISGAGSAELNQKVGLVNSSVGFGQKKQTLPVIKAAQRVGGDDVNGRRSAMVFLAATLFSSAAVSASANASVFDEYLEKSKANKELNDKKRLATSGANFARAFTVQFGSCKFPENFTGCQDLAKQKKVPFISEDLALECEGKDKFKCGSNVFWKW

SEQ ID NO: 111344 - protein, 105 aa, Zea mays subsp. mays; identical to SEQ ID NO: 11
  misc_feature (1)..(105): Ceres Seq. ID no. 15218983
  misc_feature (1)..(105): Pfam Name: Photosystem I reaction centre subunit N (PSAN or PSI-N) Pfam Description: Photosystem I reaction centre subunit N (PSAN
  misc_feature (22)..(70): Homolog of NCBI NO: 485082 NR Description: photosystem I 9K protein - rice (strain
  misc_feature (1)..(99): Homolog of NCBI NO: 12744797 NR Description: PsaN precursor [Chlamydomonas reinhardtii]
  misc_feature (8)..(99): Homolog of NCBI NO: 11134150 NR Description: Photosystem I reaction centre subunit N,
  misc_feature (15)..(105): Homolog of NCBI NO: 3914466 NR Description: Photosystem I reaction centre subunit N,
  misc_feature (1)..(105): Homolog of NCBI NO: 400879 NR Description: Photosystem I reaction centre subunit N,
  misc_feature (1)..(105): Homolog of NCBI NO: 28629385 NR Description: photosystem I-N subunit [Phaseolus vulgaris]
  misc_feature (1)..(105): Homolog of NCBI NO: 15237593 NR Description: photosystem I reaction center subunit PSI-N

SEQ ID NO: 111345 - DNA, 624 bp, Zea mays subsp. mays
  misc_feature (1)..(624): Ceres Seq. ID no. 13599565
atattctctcattccgatctctatctgcctaatctctatccattttgtttcatttcttcttcccaatcacaaaaatgggtcgccgtagctcaggaggaagatctgcacctcgtcctcgccctgctgctgcacgtgcccccgctcctcaacatgtaaaccgtgcacctcctccagctccagctcaggcgaccagtggtggtggcatgttctcaggcattggttccaccatagctcagggtatggcttttggaaccggaagtgctgttgcacatagggctgttgattccgtcatgggcccacgtaccattcagcatgaaactgttgaggctgcctctgcatctgccgctcctgtcggaagcagcatgttctcgagctcctgtgacattcatgctaaggctttccaagattgcatcagcagctatggaagcgacattagcaagtgtcagttctacatggacatgttgtctgagtgcaagaagaactccggttccactattggtgcctgaatcaagcttgtttcatttcttatctagctttgtctaaacattatgcagctgttatatgctgagggtctggatatcaaataaacaacatttsaacatttcrggtaaaaaaaaaaaaaaa

SEQ ID NO: 111346 - protein, 143 aa, Zea mays subsp. mays
  misc_feature (1)..(143): Ceres Seq. ID no. 15218597
  misc_feature (15)..(134): Homolog of NCBI NO: 32417732 NR Description: hypothetical protein [Neurospora crassa]
  misc_feature (1)..(136): Homolog of NCBI NO: 23509031 NR Description: hypothetical protein, conserved [Plasmodium
  misc_feature (1)..(139): Homolog of NCBI NO: 13174237 NR Description: unknown protein [Oryza sativa]
  misc_feature (1)..(143): Homolog of NCBI NO: 15242455 NR Description: expressed protein [Arabidopsis thaliana]
  misc_feature (1)..(143): Homolog of NCBI NO: 15237688 NR Description: expressed protein [Arabidopsis thaliana]
MGRRSSGGRSAPRPRPAAARAPAPQHVNRAPPPAPAQATSGGGMFSGIGSTIAQGMAFGTGSAVAHRAVDSVMGPRTIQHETVEAASASAAPVGSSMFSSSCDIHAKAFQDCISSYGSDISKCQFYMDMLSECKKNSGSTIGA

SEQ ID NO: 111347 - protein, 100 aa, Zea mays subsp. mays
  misc_feature (1)..(100): Ceres Seq. ID no. 15218598
  misc_feature (1)..(91): Homolog of NCBI NO: 32417732 NR Description: hypothetical protein [Neurospora crassa]
  misc_feature (1)..(93): Homolog of NCBI NO: 23509031 NR Description: hypothetical protein, conserved [Plasmodium
  misc_feature (1)..(96): Homolog of NCBI NO: 13174237 NR Description: unknown protein [Oryza sativa]
  misc_feature (1)..(100): Homolog of NCBI NO: 15242455 NR Description: expressed protein [Arabidopsis thaliana]
  misc_feature (1)..(100): Homolog of NCBI NO: 15237688 NR Description: expressed protein [Arabidopsis thaliana]
MFSGIGSTIAQGMAFGTGSAVAHRAVDSVMGPRTIQHETVEAASASAAPVGSSMFSSSCDIHAKAFQDCISSYGSDISKCQFYMDMLSECKKNSGSTIGA

SEQ ID NO: 111348 - protein, 88 aa, Zea mays subsp. mays
  misc_feature (1)..(88): Ceres Seq. ID no. 15218599
  misc_feature (1)..(79): Homolog of NCBI NO: 32417732 NR Description: hypothetical protein [Neurospora crassa]
  misc_feature (1)..(81): Homolog of NCBI NO: 23509031 NR Description: hypothetical protein, conserved [Plasmodium
  misc_feature (1)..(84): Homolog of NCBI NO: 13174237 NR Description: unknown protein [Oryza sativa]
  misc_feature (1)..(88): Homolog of NCBI NO: 15242455 NR Description: expressed protein [Arabidopsis thaliana]
  misc_feature (1)..(88): Homolog of NCBI NO: 15237688 NR Description: expressed protein [Arabidopsis thaliana]
MAFGTGSAVAHRAVDSVMGPRTIQHETVEAASASAAPVGSSMFSSSCDIHAKAFQDCISSYGSDISKCQFYMDMLSECKKNSGSTIGA

SEQ ID NO: 111349 - DNA, 1371 bp, Zea mays subsp. mays
  misc_feature (1)..(1371): Ceres Seq. ID no. 13623041
acaccacagcacaccaaccgcgcgccactgatccatcaactccactccactagctacgtaccttccgaccgagcagccagagagatggagaggatggtgatgaggctggtgaggaacaagcagtccctccgccagctgcaaggggccgccgccggcggcctagcgtcgtcgtcctccgcctcctcgaccgccggcgccgccgcgtcctccttctccaccctgcagcagcagcaggaggaccaccccggagtgctcaacatcagggacaccgccgcccacctcatcggccggacgccgctggtgtacctgaacaaggtgacggaggggtgcggcgcccgcgtcgccgccaagctcgagttcctccagccttccttcagcgtcaaggacaggccagcaatctccatgatcgaagacgcggagaagaaggggctgataaccccaggcaagacgacgctgatcgagcccacatccgggaacatgggcatcggcctggcgttcatggcagcactcaaagggtacgagctcgtgctgacgatgccatcatacaccagcctcgagaggagggtggtcatgaaggccttcggtgcgcagctcgtgctcactgacccggccaaggggatgggaggcaccgtcaggaaagcaacccagctctatgagaaccatcccagcgccttcatgctccagcagttcgagaatcccgccaacgtccaggtgcactacgagactaccggtccggagatatgggaggacacgctcgggcaggtcgacatcttcgtcatgggaatcggcagcggcggcaccgtcaccggcgtcggcaagtaccttaaggagaagaaccccaacgcaaagatctatggagttgaacctgccgaagcaaatgtcctgaacggtggcaagccagggcctcacctcatcactggaaatggagttggatttaagccagatattttggatatggatataatggagaaggttctagaggtgaaaagcgaggacgccgttacgatggcgcaacagttggcactgcaggagggcctgctggtggggatatcatcaggagccaacacagtggctgcgatcgaactcgcaaagaggccagaaaacaaagggaagctcatcgtgactgttcatccgagcgcgggagagcgatacttatcgtcggcgctattcgagggtctgaggaaggaggctgaggcaatgcagccagtgccagtggactaagttggagctatacaatgcatgtagaataaattcactgcaaccatgttgcaagtgctagtcatacctcatttgtgattcttcagtttgttcatcatgtggaagtcgtgtaaacaacagttcaaatggttgaaaaaaggactttacctctct

SEQ ID NO: 111350 - protein, 406 aa, Zea mays subsp. mays
  misc_feature (1)..(406): Ceres Seq. ID no. 13623042
  misc_feature (91)..(379): Pfam Name: Pyridoxal-phosphate dependent enzyme Pfam Description: Pyridoxal-phosphate dependent enzyme
  misc_feature (39)..(402): Homolog of NCBI NO: 12644209 NR Description: CYSTEINE SYNTHASE, CHLOROPLAST PRECURSOR SULFHYDRYLASE) (O-ACETYLSERINE (THIOL)-LYASE) (CSASE B) (CS-B)
  misc_feature (39)..(402): Homolog of NCBI NO: 303902 NR Description: cysteine synthase [Spinacia oleracea]
  misc_feature (85)..(402): Homolog of NCBI NO: 12081919 NR Description: plastidic cysteine synthase 1 [Solanum tuberosum]
  misc_feature (86)..(406): Homolog of NCBI NO: 11995005 NR Description: beta-cyanoalanine synthase like protein [Solanum
  misc_feature (62)..(406): Homolog of NCBI NO: 15233111 NR Description: cysteine synthase (O-acetylserine
  misc_feature (69)..(406): Homolog of NCBI NO: 11559260 NR Description: beta-cyanoalanine synthase [Solanum tuberosum]
  misc_feature (70)..(406): Homolog of NCBI NO: 30840956 NR Description: beta-cyanoalanine synthase [Betula pendula]
  misc_feature (86)..(406): Homolog of NCBI NO: 1071913 NR Description: cysteine synthase (EC 4.2.99.8) C precursor,
  misc_feature (29)..(406): Homolog of NCBI NO: 38346461 NR Description: OSJNBa0019G23.9 [Oryza sativa (japonica
  misc_feature (29)..(406): Homolog of NCBI NO: 10241630 NR Description: cysteine synthase [Oryza sativa (indica
TPQHTNRAPLIHQLHSTSYVPSDRAAREMERMVMRLVRNKQSLRQLQGAAAGGLASSSSASSTAGAAASSFSTLQQQQEDHPGVLNIRDTAAHLIGRTPLVYLNKVTEGCGARVAAKLEFLQPSFSVKDRPAISMIEDAEKKGLITPGKTTLIEPTSGNMGIGLAFMAALKGYELVLTMPSYTSLERRVVMKAFGAQLVLTDPAKGMGGTVRKATQLYENHPSAFMLQQFENPANVQVHYETTGPEIWEDTLGQVDIFVMGIGSGGTVTGVGKYLKEKNPNAKIYGVEPAEANVLNGGKPGPHLITGNGVGFKPDILDMDIMEKVLEVKSEDAVTMAQQLALQEGLLVGISSGANTVAAIELAKRPENKGKLIVTVHPSAGERYLSSALFEGLRKEAEAMQPVPVD

SEQ ID NO: 111351 - protein, 378 aa, Zea mays subsp. mays; identical to SEQ ID NO: 69045
  misc_feature (1)..(378): Ceres Seq. ID no. 13623043
  misc_feature (63)..(351): Pfam Name: Pyridoxal-phosphate dependent enzyme Pfam Description: Pyridoxal-phosphate dependent enzyme
  misc_feature (11)..(374): Homolog of NCBI NO: 12644209 NR Description: CYSTEINE SYNTHASE, CHLOROPLAST PRECURSOR SULFHYDRYLASE) (O-ACETYLSERINE (THIOL)-LYASE) (CSASE B) (CS-B)
  misc_feature (11)..(374): Homolog of NCBI NO: 303902 NR Description: cysteine synthase [Spinacia oleracea]
  misc_feature (57)..(374): Homolog of NCBI NO: 12081919 NR Description: plastidic cysteine synthase 1 [Solanum tuberosum]
  misc_feature (58)..(378): Homolog of NCBI NO: 11995005 NR Description: beta-cyanoalanine synthase like protein [Solanum
  misc_feature (34)..(378): Homolog of NCBI NO: 15233111 NR Description: cysteine synthase (O-acetylserine
  misc_feature (41)..(378): Homolog of NCBI NO: 11559260 NR Description: beta-cyanoalanine synthase [Solanum tuberosum]
  misc_feature (42)..(378): Homolog of NCBI NO: 30840956 NR Description: beta-cyanoalanine synthase [Betula pendula]
  misc_feature (58)..(378): Homolog of NCBI NO: 1071913 NR Description: cysteine synthase (EC 4.2.99.8) C precursor,
  misc_feature (1)..(378): Homolog of NCBI NO: 38346461 NR Description: OSJNBa0019G23.9 [Oryza sativa (japonica
  misc_feature (1)..(378): Homolog of NCBI NO: 10241630 NR Description: cysteine synthase [Oryza sativa (indica

SEQ ID NO: 111352 - protein, 375 aa, Zea mays subsp. mays; identical to SEQ ID NO: 69046
  misc_feature (1)..(375): Ceres Seq. ID no. 13623044
  misc_feature (60)..(348): Pfam Name: Pyridoxal-phosphate dependent enzyme Pfam Description: Pyridoxal-phosphate dependent enzyme
  misc_feature (8)..(371): Homolog of NCBI NO: 12644209 NR Description: CYSTEINE SYNTHASE, CHLOROPLAST PRECURSOR SULFHYDRYLASE) (O-ACETYLSERINE (THIOL)-LYASE) (CSASE B) (CS-B)
  misc_feature (8)..(371): Homolog of NCBI NO: 303902 NR Description: cysteine synthase [Spinacia oleracea]
  misc_feature (54)..(371): Homolog of NCBI NO: 12081919 NR Description: plastidic cysteine synthase 1 [Solanum tuberosum]
  misc_feature (55)..(375): Homolog of NCBI NO: 11995005 NR Description: beta-cyanoalanine synthase like protein [Solanum
  misc_feature (31)..(375): Homolog of NCBI NO: 15233111 NR Description: cysteine synthase (O-acetylserine
  misc_feature (38)..(375): Homolog of NCBI NO: 11559260 NR Description: beta-cyanoalanine synthase [Solanum tuberosum]
  misc_feature (39)..(375): Homolog of NCBI NO: 30840956 NR Description: beta-cyanoalanine synthase [Betula pendula]
  misc_feature (55)..(375): Homolog of NCBI NO: 1071913 NR Description: cysteine synthase (EC 4.2.99.8) C precursor,
  misc_feature (1)..(375): Homolog of NCBI NO: 38346461 NR Description: OSJNBa0019G23.9 [Oryza sativa (japonica
  misc_feature (1)..(375): Homolog of NCBI NO: 10241630 NR Description: cysteine synthase [Oryza sativa (indica

SEQ ID NO: 111353 - DNA, 785 bp, Zea mays subsp. mays
  misc_feature (1)..(785): Ceres Seq. ID no. 13623047
  misc_feature: MA Experiment ID: 108504 Result: Up-regulated in Transcription
  misc_feature: MA Experiment 108504 PARAMETER Experiment Name: Zm_Drought_P Parameter: Age (day) Value: 8
  misc_feature: MA Experiment 108504 PARAMETER Experiment Name: Zm_Drought_P Parameter: Organism Value: Zea mays
  misc_feature: MA Experiment 108504 PARAMETER Experiment Name: Zm_Drought_P Parameter: Plant Line Value: 35A19
  misc_feature: MA Experiment 108504 PARAMETER Experiment Name: Zm_Drought_P Parameter: Timepoint (hr) Value: 12
  misc_feature: MA Experiment 108504 PARAMETER Experiment Name: Zm_Drought_P Parameter: Tissue Value: Aerial
  misc_feature: MA Experiment 108504 PARAMETER Experiment Name: Zm_Drought_P Parameter: Treatment Value: Drought vs. No Drought
  misc_feature: MA Experiment ID: 108527 Result: Up-regulated in Transcription
  misc_feature: MA Experiment 108527 PARAMETER Experiment Name: Zm_5mM_NO_P Parameter: Age (day) Value: 8
  misc_feature: MA Experiment 108527 PARAMETER Experiment Name: Zm_5mM_NO_P Parameter: Organism Value: Zea mays
  misc_feature: MA Experiment 108527 PARAMETER Experiment Name: Zm_5mM_NO_P Parameter: Plant Line Value: 35A19
  misc_feature: MA Experiment 108527 PARAMETER Experiment Name: Zm_5mM_NO_P Parameter: Timepoint (hr) Value: 6
  misc_feature: MA Experiment 108527 PARAMETER Experiment Name: Zm_5mM_NO_P Parameter: Tissue Value: Aerial
  misc_feature: MA Experiment 108527 PARAMETER Experiment Name: Zm_5mM_NO_P Parameter: Treatment Value: 5mM NO vs. No Treatment
  misc_feature: MA Experiment ID: 20000477 Result: Up-regulated in Transcription
  misc_feature: MA Experiment 20000477 PARAMETER Experiment Name: Zm_5mM_SA_P Parameter: Age (day) Value: 10
  misc_feature: MA Experiment 20000477 PARAMETER Experiment Name: Zm_5mM_SA_P Parameter: Organism Value: Zea mays
  misc_feature: MA Experiment 20000477 PARAMETER Experiment Name: Zm_5mM_SA_P Parameter: Plant Line Value: 35A19
  misc_feature: MA Experiment 20000477 PARAMETER Experiment Name: Zm_5mM_SA_P Parameter: Timepoint (hr) Value: 48
  misc_feature: MA Experiment 20000477 PARAMETER Experiment Name: Zm_5mM_SA_P Parameter: Tissue Value: Aerial
  misc_feature: MA Experiment 20000477 PARAMETER Experiment Name: Zm_5mM_SA_P Parameter: Treatment Value: 5mM SA vs. No Treatment
  misc_feature: MA Experiment ID: 20000478 Result: Up-regulated in Transcription
  misc_feature: MA Experiment 20000478 PARAMETER Experiment Name: Zm_5mM_SA_P Parameter: Age (day) Value: 11
  misc_feature: MA Experiment 20000478 PARAMETER Experiment Name: Zm_5mM_SA_P Parameter: Organism Value: Zea mays
  misc_feature: MA Experiment 20000478 PARAMETER Experiment Name: Zm_5mM_SA_P Parameter: Plant Line Value: 35A19
  misc_feature: MA Experiment 20000478 PARAMETER Experiment Name: Zm_5mM_SA_P Parameter: Timepoint (hr) Value: 72
  misc_feature: MA Experiment 20000478 PARAMETER Experiment Name: Zm_5mM_SA_P Parameter: Tissue Value: Aerial
  misc_feature: MA Experiment 20000478 PARAMETER Experiment Name: Zm_5mM_SA_P Parameter: Treatment Value: 5mM SA vs. No Treatment
  misc_feature: MA Experiment ID: 20000479 Result: Up-regulated in Transcription
  misc_feature: MA Experiment 20000479 PARAMETER Experiment Name: Zm_Drought_P Parameter: Age (day) Value: 10
  misc_feature: MA Experiment 20000479 PARAMETER Experiment Name: Zm_Drought_P Parameter: Organism Value: Zea mays
  misc_feature: MA Experiment 20000479 PARAMETER Experiment Name: Zm_Drought_P Parameter: Plant Line Value: 35A19
  misc_feature: MA Experiment 20000479 PARAMETER Experiment Name: Zm_Drought_P Parameter: Timepoint (hr) Value: 48
  misc_feature: MA Experiment 20000479 PARAMETER Experiment Name: Zm_Drought_P Parameter: Tissue Value: Aerial
  misc_feature: MA Experiment 20000479 PARAMETER Experiment Name: Zm_Drought_P Parameter: Treatment Value: Drought vs. No Drought
  misc_feature: MA Experiment ID: 20000480 Result: Up-regulated in Transcription
  misc_feature: MA Experiment 20000480 PARAMETER Experiment Name: Zm_Drought_P Parameter: Age (day) Value: 11
  misc_feature: MA Experiment 20000480 PARAMETER Experiment Name: Zm_Drought_P Parameter: Organism Value: Zea mays
  misc_feature: MA Experiment 20000480 PARAMETER Experiment Name: Zm_Drought_P Parameter: Plant Line Value: 35A19
  misc_feature: MA Experiment 20000480 PARAMETER Experiment Name: Zm_Drought_P Parameter: Timepoint (hr) Value: 72
  misc_feature: MA Experiment 20000480 PARAMETER Experiment Name: Zm_Drought_P Parameter: Tissue Value: Aerial
  misc_feature: MA Experiment 20000480 PARAMETER Experiment Name: Zm_Drought_P Parameter: Treatment Value: Drought vs. No Drought
gctagatcactgcccccggcagaccacctgacccggccgctcgagatggccgccagaaggcacgccgggagcagctccggtcccacttcggccaacctaagcatgaagctgctggtggaggtggacaggcgcggcacgcccaggcgcgtggtgtacgccgaggccggcaaggacgtcgtcgacttcctcctcaccttcctcaccttgccgatcggcacggtcgtcaagctgctcaggaggaactccatgcccatggtaggctgcgtcggcaacctgtacggcagcgtcgaggagctccccgacgacttcatctgccacagggacgccagggccgccaaggacaccctgctcaggcccgccggcggcaggcttcccctgctcacgaacgcggggtcgtcgtcgtccagcaccggcggctttgtgagggcgggcgtgacctacgaggtcatggacgacctcgagattgctcccaggtctaacgtcgatttcatcaccaacctcaacagatatggtatcagggacatcggctgtctccagaggaagactgtccgagttggcgacaccgagggtctccagatactgagggcgtcactcaagtcgaagacggtcctcaccgacgtcttccttcggacgaacactccgagtccgagtccgagggccttaactgcagggtgaagtgtccttgccgtgtcatccttgtggtgcgtgcatgtgtttctttggtcatatcgttcgtgttggtcactggttcacggctcacatactatgaataaaggcaaggaatt

SEQ ID NO: 111354 - protein, 224 aa, Zea mays subsp. mays
  misc_feature (1)..(224): Ceres Seq. ID no. 13623048
  misc_feature (34)..(123): Pfam Name: Protein of unknown function (DUF674) Pfam Description: Protein of unknown function (DUF674)
  misc_feature (120)..(208): Homolog of NCBI NO: 32490477 NR Description: hypothetical protein [Oryza sativa (japonica
  misc_feature (16)..(127): Homolog of NCBI NO: 32490477 NR Description: hypothetical protein [Oryza sativa (japonica
  misc_feature (139)..(222): Homolog of NCBI NO: 34895930 NR Description: P0030H07.32 [Oryza sativa (japonica
  misc_feature (30)..(126): Homolog of NCBI NO: 34895930 NR Description: P0030H07.32 [Oryza sativa (japonica
  misc_feature (130)..(189): Homolog of NCBI NO: 34895912 NR Description: P0030H07.21 [Oryza sativa (japonica
  misc_feature (29)..(136): Homolog of NCBI NO: 34895912 NR Description: P0030H07.21 [Oryza sativa (japonica
  misc_feature (139)..(209): Homolog of NCBI NO: 34895922 NR Description: P0030H07.27 [Oryza sativa (japonica
  misc_feature (29)..(122): Homolog of NCBI NO: 34895922 NR Description: P0030H07.27 [Oryza sativa (japonica
  misc_feature (120)..(209): Homolog of NCBI NO: 34895918 NR Description: P0030H07.25 [Oryza sativa (japonica
  misc_feature (24)..(136): Homolog of NCBI NO: 34895918 NR Description: P0030H07.25 [Oryza sativa (japonica
ARSLPPADHLTRPLEMAARRHAGSSSGPTSANLSMKLLVEVDRRGTPRRVVYAEAGKDVVDFLLTFLTLPIGTVVKLLRRNSMPMVGCVGNLYGSVEELPDDFICHRDARAAKDTLLRPAGGRLPLLTNAGSSSSSTGGFVRAGVTYEVMDDLEIAPRSNVDFITNLNRYGIRDIGCLQRKTVRVGDTEGLQILRASLKSKTVLTDVFLRTNTPSPSPRALTAG

SEQ ID NO: 111355 - protein, 209 aa, Zea mays subsp. mays
  misc_feature (1)..(209): Ceres Seq. ID no. 13623049
  misc_feature (19)..(108): Pfam Name: Protein of unknown function (DUF674) Pfam Description: Protein of unknown function (DUF674)
  misc_feature (124)..(207): Homolog of NCBI NO: 34895930 NR Description: P0030H07.32 [Oryza sativa (japonica
  misc_feature (15)..(111): Homolog of NCBI NO: 34895930 NR Description: P0030H07.32 [Oryza sativa (japonica
  misc_feature (115)..(174): Homolog of NCBI NO: 34895912 NR Description: P0030H07.21 [Oryza sativa (japonica
  misc_feature (14)..(121): Homolog of NCBI NO: 34895912 NR Description: P0030H07.21 [Oryza sativa (japonica
  misc_feature (105)..(193): Homolog of NCBI NO: 32490477 NR Description: hypothetical protein [Oryza sativa (japonica
  misc_feature (1)..(112): Homolog of NCBI NO: 32490477 NR Description: hypothetical protein [Oryza sativa (japonica
  misc_feature (124)..(194): Homolog of NCBI NO: 34895922 NR Description: P0030H07.27 [Oryza sativa (japonica
  misc_feature (14)..(107): Homolog of NCBI NO: 34895922 NR Description: P0030H07.27 [Oryza sativa (japonica
  misc_feature (105)..(194): Homolog of NCBI NO: 34895918 NR Description: P0030H07.25 [Oryza sativa (japonica
  misc_feature (9)..(121): Homolog of NCBI NO: 34895918 NR Description: P0030H07.25 [Oryza sativa (japonica
MAARRHAGSSSGPTSANLSMKLLVEVDRRGTPRRVVYAEAGKDVVDFLLTFLTLPIGTVVKLLRRNSMPMVGCVGNLYGSVEELPDDFICHRDARAAKDTLLRPAGGRLPLLTNAGSSSSSTGGFVRAGVTYEVMDDLEIAPRSNVDFITNLNRYGIRDIGCLQRKTVRVGDTEGLQILRASLKSKTVLTDVFLRTNTPSPSPRALTAG

SEQ ID NO: 111356 - protein, 190 aa, Zea mays subsp. mays
  misc_feature (1)..(190): Ceres Seq. ID no. 13623050
  misc_feature (1)..(89): Pfam Name: Protein of unknown function (DUF674) Pfam Description: Protein of unknown function (DUF674)
  misc_feature (86)..(174): Homolog of NCBI NO: 32490477 NR Description: hypothetical protein [Oryza sativa (japonica
  misc_feature (1)..(93): Homolog of NCBI NO: 32490477 NR Description: hypothetical protein [Oryza sativa (japonica
  misc_feature (105)..(188): Homolog of NCBI NO: 34895930 NR Description: P0030H07.32 [Oryza sativa (japonica
  misc_feature (1)..(92): Homolog of NCBI NO: 34895930 NR Description: P0030H07.32 [Oryza sativa (japonica
  misc_feature (96)..(155): Homolog of NCBI NO: 34895912 NR Description: P0030H07.21 [Oryza sativa (japonica
  misc_feature (1)..(102): Homolog of NCBI NO: 34895912 NR Description: P0030H07.21 [Oryza sativa (japonica
  misc_feature (105)..(175): Homolog of NCBI NO: 34895922 NR Description: P0030H07.27 [Oryza sativa (japonica
  misc_feature (1)..(88): Homolog of NCBI NO: 34895922 NR Description: P0030H07.27 [Oryza sativa (japonica
  misc_feature (86)..(175): Homolog of NCBI NO: 34895918 NR Description: P0030H07.25 [Oryza sativa (japonica
  misc_feature (1)..(102): Homolog of NCBI NO: 34895918 NR Description: P0030H07.25 [Oryza sativa (japonica
MKLLVEVDRRGTPRRVVYAEAGKDVVDFLLTFLTLPIGTVVKLLRRNSMPMVGCVGNLYGSVEELPDDFICHRDARAAKDTLLRPAGGRLPLLTNAGSSSSSTGGFVRAGVTYEVMDDLEIAPRSNVDFITNLNRYGIRDIGCLQRKTVRVGDTEGLQILRASLKSKTVLTDVFLRTNTPSPSPRALTAG

SEQ ID NO: 111357 - DNA, 1326 bp, Zea mays subsp. mays
  misc_feature (1)..(1326): Ceres Seq. ID no. 13587054
agtataatcatggccggcggcgtgagctaggctttccctcctataaataccggccgcccggcattcctccaccatccagcaaacaagctctcaagccactatctatctagctagctactagctagataacacacttgactcgatcgatcatcagcaacgtaaacccatagatcgatcatggcggcgcgcgccattgtcgtcctggtctcgctcatccttgcggtggtcgccggcggcgcgtcggcgcagctgtcgtcgggcttctactcccgctcgtgcccgggcatgctcaaagccgtgcgctcggcgctgcggccggcgatcgccagggagcggcgcgtgggcgcctccatcgtccgcctcttcttccacgactgcttcgtccagggctgcgacgcctcgctgctgctggacgacgccccgggcctgagcggcgagaagaacgccaagcccaacaagaactccgtcagggggttcgacgtcatcgacgccatcaagacggccgtcgagaaggagtgtcccggcgtcgtctcctgtgccgacatcctcgccatcgccgccgaggagagcgtcgtcttgctgggtggcccgagttgggaggtgaagatgggacggagggactcgacgacggcgagcttcaacggcgccgagaacaacatcccaccaccgacatcggggctcgcaaaccttacgtcgctcttcgccgcgcaggggctctcccagaaagacatggtcgccctctcaggagcccacacgatcggccaagcacgctgcacattcttccgggaccacatctacaacgacacaaacatcgactccggcttcgccaggagccgccagtcaggctgccctcgtaccgccggctccggcgacaacaacctggcgccactggacctgcagaccccgaccaccttcgagaacgactactacaagaatctcgtccagaagaggggcatcctgcactcggaccaggagctcttcaatggcggcgccgctgacgcgctggtccggcagtacatcggcagccagagcaccttcttcaaggacttcgtggtggggatggtcaagatgggggacatcacgccgctgacgggatccaacggacagatcaggaagaactgcaggaggatcaactaagaaaagatcctccactttctgcgcagacagttgtgaaatccctagaaatgcagcacaatccgtagcaatccaggatgtgtttggtcgcgcccatgcttgcaagcaagcttgtggtttcctctcgttcgactctgtttatgcaattgtgaaatcaatgtacgttgtgcctggtggattaataaaaggtcg

SEQ ID NO: 111358 - protein, 319 aa, Zea mays subsp. mays
  misc_feature (1)..(319): Ceres Seq. ID no. 15220810
  misc_feature (41)..(280): Pfam Name: Peroxidase Pfam Description: Peroxidase
  misc_feature (12)..(319): Homolog of NCBI NO: 7433047 NR Description: probable peroxidase (EC 1.11.1.7) (clone PC23) -
  misc_feature (1)..(319): Homolog of NCBI NO: 15239075 NR Description: peroxidase, putative [Arabidopsis thaliana]
  misc_feature (3)..(319): Homolog of NCBI NO: 5453379 NR Description: bacterial-induced peroxidase precursor [Gossypium
  misc_feature (1)..(319): Homolog of NCBI NO: 19698446 NR Description: gaiacol peroxidase [Gossypium hirsutum]
  misc_feature (2)..(319): Homolog of NCBI NO: 39777532 NR Description: peroxidase precursor [Quercus suber]
  misc_feature (1)..(319): Homolog of NCBI NO: 39777536 NR Description: peroxidase precursor [Quercus suber]
  misc_feature (19)..(319): Homolog of NCBI NO: 28400796 NR Description: peroxidase [Asparagus officinalis]
  misc_feature (10)..(319): Homolog of NCBI NO: 28400794 NR Description: peroxidase [Asparagus officinalis]
  misc_feature (10)..(319): Homolog of NCBI NO: 28400798 NR Description: peroxidase [Asparagus officinalis]
  misc_feature (1)..(319): Homolog of NCBI NO: 5381253 NR Description: peroxidase [Nicotiana tabacum]
MAARAIVVLVSLILAVVAGGASAQLSSGFYSRSCPGMLKAVRSALRPAIARERRVGASIVRLFFHDCFVQGCDASLLLDDAPGLSGEKNAKPNKNSVRGFDVIDAIKTAVEKECPGVVSCADILAIAAEESVVLLGGPSWEVKMGRRDSTTASFNGAENNIPPPTSGLANLTSLFAAQGLSQKDMVALSGAHTIGQARCTFFRDHIYNDTNIDSGFARSRQSGCPRTAGSGDNNLAPLDLQTPTTFENDYYKNLVQKRGILHSDQELFNGGAADALVRQYIGSQSTFFKDFVVGMVKMGDITPLTGSNGQIRKNCRRIN

SEQ ID NO: 111359 - protein, 283 aa, Zea mays subsp. mays
  misc_feature (1)..(283): Ceres Seq. ID no. 15220811
  misc_feature (5)..(244): Pfam Name: Peroxidase Pfam Description: Peroxidase
  misc_feature (1)..(283): Homolog of NCBI NO: 7433047 NR Description: probable peroxidase (EC 1.11.1.7) (clone PC23) -
  misc_feature (1)..(283): Homolog of NCBI NO: 15239075 NR Description: peroxidase, putative [Arabidopsis thaliana]
  misc_feature (1)..(283): Homolog of NCBI NO: 5453379 NR Description: bacterial-induced peroxidase precursor [Gossypium
  misc_feature (1)..(283): Homolog of NCBI NO: 19698446 NR Description: gaiacol peroxidase [Gossypium hirsutum]
  misc_feature (1)..(283): Homolog of NCBI NO: 39777532 NR Description: peroxidase precursor [Quercus suber]
  misc_feature (1)..(283): Homolog of NCBI NO: 39777536 NR Description: peroxidase precursor [Quercus suber]
  misc_feature (1)..(283): Homolog of NCBI NO: 28400796 NR Description: peroxidase [Asparagus officinalis]
  misc_feature (1)..(283): Homolog of NCBI NO: 28400794 NR Description: peroxidase [Asparagus officinalis]
  misc_feature (1)..(283): Homolog of NCBI NO: 28400798 NR Description: peroxidase [Asparagus officinalis]
  misc_feature (1)..(283): Homolog of NCBI NO: 5381253 NR Description: peroxidase [Nicotiana tabacum]
MLKAVRSALRPAIARERRVGASIVRLFFHDCFVQGCDASLLLDDAPGLSGEKNAKPNKNSVRGFDVIDAIKTAVEKECPGVVSCADILAIAAEESVVLLGGPSWEVKMGRRDSTTASFNGAENNIPPPTSGLANLTSLFAAQGLSQKDMVALSGAHTIGQARCTFFRDHIYNDTNIDSGFARSRQSGCPRTAGSGDNNLAPLDLQTPTTFENDYYKNLVQKRGILHSDQELFNGGAADALVRQYIGSQSTFFKDFVVGMVKMGDITPLTGSNGQIRKNCRRIN

SEQ ID NO: 111360 - protein, 176 aa, Zea mays subsp. mays
  misc_feature (1)..(176): Ceres Seq. ID no. 15220812
  misc_feature (1)..(137): Pfam Name: Peroxidase Pfam Description: Peroxidase
  misc_feature (1)..(176): Homolog of NCBI NO: 7433047 NR Description: probable peroxidase (EC 1.11.1.7) (clone PC23) -
  misc_feature (1)..(176): Homolog of NCBI NO: 15239075 NR Description: peroxidase, putative [Arabidopsis thaliana]
  misc_feature (1)..(176): Homolog of NCBI NO: 5453379 NR Description: bacterial-induced peroxidase precursor [Gossypium
  misc_feature (1)..(176): Homolog of NCBI NO: 19698446 NR Description: gaiacol peroxidase [Gossypium hirsutum]
  misc_feature (1)..(176): Homolog of NCBI NO: 39777532 NR Description: peroxidase precursor [Quercus suber]
  misc_feature (1)..(176): Homolog of NCBI NO: 39777536 NR Description: peroxidase precursor [Quercus suber]
  misc_feature (1)..(176): Homolog of NCBI NO: 28400796 NR Description: peroxidase [Asparagus officinalis]
  misc_feature (1)..(176): Homolog of NCBI NO: 28400794 NR Description: peroxidase [Asparagus officinalis]
  misc_feature (1)..(176): Homolog of NCBI NO: 28400798 NR Description: peroxidase [Asparagus officinalis]
  misc_feature (1)..(176): Homolog of NCBI NO: 5381253 NR Description: peroxidase [Nicotiana tabacum]
MGRRDSTTASFNGAENNIPPPTSGLANLTSLFAAQGLSQKDMVALSGAHTIGQARCTFFRDHIYNDTNIDSGFARSRQSGCPRTAGSGDNNLAPLDLQTPTTFENDYYKNLVQKRGILHSDQELFNGGAADALVRQYIGSQSTFFKDFVVGMVKMGDITPLTGSNGQIRKNCRRIN

SEQ ID NO: 111361 - DNA, 685 bp, Zea mays subsp. mays
  misc_feature (1)..(685): Ceres Seq. ID no. 12590595
  misc_feature: MA Experiment ID: 20000479 Result: Down-regulated in Transcription
  misc_feature: MA Experiment 20000479 PARAMETER Experiment Name: Zm_Drought_P Parameter: Age (day) Value: 10
  misc_feature: MA Experiment 20000479 PARAMETER Experiment Name: Zm_Drought_P Parameter: Organism Value: Zea mays
  misc_feature: MA Experiment 20000479 PARAMETER Experiment Name: Zm_Drought_P Parameter: Plant Line Value: 35A19
  misc_feature: MA Experiment 20000479 PARAMETER Experiment Name: Zm_Drought_P Parameter: Timepoint (hr) Value: 48
  misc_feature: MA Experiment 20000479 PARAMETER Experiment Name: Zm_Drought_P Parameter: Tissue Value: Aerial
  misc_feature: MA Experiment 20000479 PARAMETER Experiment Name: Zm_Drought_P Parameter: Treatment Value: Drought vs. No Drought
aataattcttttctgctgcgccgggcaggccaggggtgatgctgctttatcctctctacgcgtccatgcgcgccatcgagagcccttcttccctggacgaccagcagtggctcacctactgggtcctgtactcgctgatcaccctcttcgagctctcaagctggaaagtcctgcagtggtttcccctgtggccgtacatgaagctgctcttctgctgctggctggtgcttcccgtcttcaacggcgcggcctacatctacgaggcgcacgtccggcgctacttcaagacgggcacctacgtgagccccagctacggcgagcgccagcgccgggtgctgcagatgatgagcctcgacgcgcgcaagtccgtcgagcgcttcatcgacacgcacgggcccgacgcgctcgacaggatcatcggagccgctgaagaggaagccaagagggagaaacctgaattgttccgggtggaaaccgaagcaagtctcccatcggttgggtagtcacttgtgcagaaatcgtatcgtatgcgtgtgtgtgtggttgatcattacgtcgggcttgcccagcagttggagaagagatgcccggtgcccatgagagcatgcatgcatatatggcttgaaagaagccgcgaaatttggtgtacttgttaatgaaaatttggcttggacctgtgaaagcc

SEQ ID NO: 111362 - protein, 154 aa, Zea mays subsp. mays
  misc_feature (1)..(154): Ceres Seq. ID no. 12590596
  misc_feature (10)..(82): Pfam Name: TB2/DP1, HVA22 family Pfam Description: TB2/DP1, HVA22 family
  misc_feature (1)..(83): Homolog of NCBI NO: 18416458 NR Description: abscisic acid-induced - like protein
  misc_feature (1)..(83): Homolog of NCBI NO: 33342176 NR Description: hypothetical protein [Triticum aestivum]
  misc_feature (1)..(83): Homolog of NCBI NO: 1076715 NR Description: abscisic acid-induced protein HVA22 - barley
  misc_feature (1)..(90): Homolog of NCBI NO: 8777395 NR Description: gene_id:MFB16.12~pir||T05517~similar to unknown
  misc_feature (1)..(90): Homolog of NCBI NO: 18423191 NR Description: putative protein
  misc_feature (1)..(81): Homolog of NCBI NO: 15241840 NR Description: AtHVA22b-like protein
  misc_feature (1)..(81): Homolog of NCBI NO: 4884934 NR Description: AtHVA22b [Arabidopsis thaliana]
  misc_feature (1)..(127): Homolog of NCBI NO: 15222421 NR Description: AtHVA22c
  misc_feature (1)..(146): Homolog of NCBI NO: 15221266 NR Description: AtHVA22a; protein id: At1g74520.1, supported by
  misc_feature (10)..(136): Homolog of NCBI NO: 34910810 NR Description: P0042A10.34 [Oryza sativa (japonica
MLLYPLYASMRAIESPSSLDDQQWLTYWVLYSLITLFELSSWKVLQWFPLWPYMKLLFCCWLVLPVFNGAAYIYEAHVRRYFKTGTYVSPSYGERQRRVLQMMSLDARKSVERFIDTHGPDALDRIIGAAEEEAKREKPELFRVETEASLPSVG

SEQ ID NO: 111363 - protein, 145 aa, Zea mays subsp. mays
  misc_feature (1)..(145): Ceres Seq. ID no. 12590597
  misc_feature (1)..(73): Pfam Name: TB2/DP1, HVA22 family Pfam Description: TB2/DP1, HVA22 family
  misc_feature (1)..(74): Homolog of NCBI NO: 18416458 NR Description: abscisic acid-induced - like protein
  misc_feature (1)..(74): Homolog of NCBI NO: 33342176 NR Description: hypothetical protein [Triticum aestivum]
  misc_feature (1)..(74): Homolog of NCBI NO: 1076715 NR Description: abscisic acid-induced protein HVA22 - barley
  misc_feature (1)..(81): Homolog of NCBI NO: 8777395 NR Description: gene_id:MFB16.12~pir||T05517~similar to unknown
  misc_feature (1)..(81): Homolog of NCBI NO: 18423191 NR Description: putative protein
  misc_feature (1)..(72): Homolog of NCBI NO: 15241840 NR Description: AtHVA22b-like protein
  misc_feature (1)..(72): Homolog of NCBI NO: 4884934 NR Description: AtHVA22b [Arabidopsis thaliana]
  misc_feature (1)..(118): Homolog of NCBI NO: 15222421 NR Description: AtHVA22c
  misc_feature (1)..(137): Homolog of NCBI NO: 15221266 NR Description: AtHVA22a; protein id: At1g74520.1, supported by
  misc_feature (1)..(127): Homolog of NCBI NO: 34910810 NR Description: P0042A10.34 [Oryza sativa (japonica
MRAIESPSSLDDQQWLTYWVLYSLITLFELSSWKVLQWFPLWPYMKLLFCCWLVLPVFNGAAYIYEAHVRRYFKTGTYVSPSYGERQRRVLQMMSLDARKSVERFIDTHGPDALDRIIGAAEEEAKREKPELFRVETEASLPSVG

SEQ ID NO: 111364 - protein, 142 aa, Zea mays subsp. mays
  misc_feature (1)..(142): Ceres Seq. ID no. 12590598
IILFCCAGQARGDAALSSLRVHARHREPFFPGRPAVAHLLGPVLADHPLRALKLESPAVVSPVAVHEAALLLLAGASRLQRRGLHLRGARPALLQDGHLREPQLRRAPAPGAADDEPRRAQVRRALHRHARARRARQDHRSR

SEQ ID NO: 111365 - DNA, 784 bp, Zea mays subsp. mays
  misc_feature (1)..(784): Ceres Seq. ID no. 12635820
aacaaaatcttctctcattgattccttcgtcaagcctcaatcactttcatcactcttctctctctttctcaaaccaacagcgcgaagagatgaagcatctgatccgccgcctctcccgcgtcgccgactccgcaaactacagcctcctccgttccgattcgcagcgacctagccgccgtccaccggcgcctcgccgctcgaagaagcacacatcctccgttcccgagggtcacgtgcctgtctacgtgggagacgagatggagcggttcgtggtgagcgcggagctgctaaaccacccggttttcatcggtttgttgaaccgatcgactcaagagtacggttacgaacagaaaggagttctgcagatcccctgccacgtgttggtattcgagcgaatcatggagtcgcttcggctcggattagcggtgccgagcgacctacaagatgtaatcggcgacgagacgatttgacacgcgagggaatctttggtagttagagagatatggatctggttctttttttttcggctcagatgcagtacgacgtcgtgttgatggtgtacatagctatgtatatttttcatttttctggatgatagatgatgaagaagattgaagttcaaatggggaaggggaaagattagcgatatttttagggcttttctttttgaatttttttttcttttttcaaaatttgtttgttgcaaatttcctgtttttcgccggtttaagaaccggtttgagactcttgtgaaggtttaaatggaaattggttcggtttggtt

SEQ ID NO: 111366 - protein, 155 aa, Zea mays subsp. mays
  misc_feature (1)..(155): Ceres Seq. ID no. 12635821
  misc_feature (33)..(137): Pfam Name: Auxin responsive protein Pfam Description: Auxin responsive protein
  misc_feature (71)..(137): Homolog of NCBI NO: 18410889 NR Description: expressed protein
  misc_feature (71)..(137): Homolog of NCBI NO: 9369367 NR Description: F10A5.20 [Arabidopsis thaliana]
  misc_feature (55)..(137): Homolog of NCBI NO: 15238919 NR Description: putative protein; protein id: At5g10990.1
  misc_feature (70)..(139): Homolog of NCBI NO: 38345606 NR Description: OSJNBa0093O08.8 [Oryza sativa (japonica
  misc_feature (64)..(135): Homolog of NCBI NO: 15236199 NR Description: putative protein; protein id: At4g34800.1
  misc_feature (57)..(145): Homolog of NCBI NO: 15228626 NR Description: putative protein; protein id: At3g61900.1
  misc_feature (30)..(150): Homolog of NCBI NO: 15219296 NR Description: hypothetical protein; protein id: At1g79130.1
  misc_feature (30)..(155): Homolog of NCBI NO: 15219275 NR Description: putative auxin-induced protein
  misc_feature (30)..(141): Homolog of NCBI NO: 15223462 NR Description: unknown protein; protein id: At1g56150.1
  misc_feature (30)..(155): Homolog of NCBI NO: 15230601 NR Description: unknown protein; protein id: At3g12830.1
QNLLSLIPSSSLNHFHHSSLSFSNQQREEMKHLIRRLSRVADSANYSLLRSDSQRPSRRPPAPRRSKKHTSSVPEGHVPVYVGDEMERFVVSAELLNHPVFIGLLNRSTQEYGYEQKGVLQIPCHVLVFERIMESLRLGLAVPSDLQDVIGDETI

SEQ ID NO: 111367 - protein, 126 aa, Zea mays subsp. mays
  misc_feature (1)..(126): Ceres Seq. ID no. 12635822
  misc_feature (4)..(108): Pfam Name: Auxin responsive protein Pfam Description: Auxin responsive protein
  misc_feature (42)..(108): Homolog of NCBI NO: 18410889 NR Description: expressed protein
  misc_feature (42)..(108): Homolog of NCBI NO: 9369367 NR Description: F10A5.20 [Arabidopsis thaliana]
  misc_feature (26)..(108): Homolog of NCBI NO: 15238919 NR Description: putative protein; protein id: At5g10990.1
  misc_feature (41)..(110): Homolog of NCBI NO: 38345606 NR Description: OSJNBa0093O08.8 [Oryza sativa (japonica
  misc_feature (35)..(106): Homolog of NCBI NO: 15236199 NR Description: putative protein; protein id: At4g34800.1
  misc_feature (28)..(116): Homolog of NCBI NO: 15228626 NR Description: putative protein; protein id: At3g61900.1
  misc_feature (1)..(121): Homolog of NCBI NO: 15219296 NR Description: hypothetical protein; protein id: At1g79130.1
  misc_feature (1)..(126): Homolog of NCBI NO: 15219275 NR Description: putative auxin-induced protein
  misc_feature (1)..(112): Homolog of NCBI NO: 15223462 NR Description: unknown protein; protein id: At1g56150.1
  misc_feature (1)..(126): Homolog of NCBI NO: 15230601 NR Description: unknown protein; protein id: At3g12830.1
MKHLIRRLSRVADSANYSLLRSDSQRPSRRPPAPRRSKKHTSSVPEGHVPVYVGDEMERFVVSAELLNHPVFIGLLNRSTQEYGYEQKGVLQIPCHVLVFERIMESLRLGLAVPSDLQDVIGDETI

SEQ ID NO: 111368 - DNA, 843 bp, Zea mays subsp. mays
  misc_feature (1)..(843): Ceres Seq. ID no. 13587260
aaatagcctcccagccctctctgcctcccgaaaaaacaaacaaacagagatcgcgcttccaatctagctctgcggctgtcgcgaggctccacatttccctccccgcagcgccgaagtaagcatgtgtcccggcggcaggtacgcgggccttgacctccccgccggcgccggcgcgggggacctgcggccggcgttcgacgtgctggacgcggaccacgacggccgcatcagccgcgacgacctcaagaccttctacgccaacgcgggcgccaccgacgagcgcttcgacgacgacgacatcgaggccatgatcaccgccgccgacgccgacctcgacggcttcgtgcagtaccacgagttcgagggcctccttggccgcgcagctaaggcgggggcggacagcggctgccgctcggcgatggaggacgccttccggctaatggaccgcgacggggacggcaaggtcgggttcgaggacctcaaggcctacctcgggtgggccgggatgccggtcgccgacgacgagatccgcgccatgataagtatggctggtgacggcgacagcggcgtggggctcgaggcgctcgccagaatactcgccgtggactttgatgccatcgtctgaagaatctaaaataatcctactgtaaagcactagacttgattttttgggactttttccccctaaaatttggttggtggggagagcaggctggcgtgagattgattgttgtgagtggttctcgttaaccgtgagttttgaatgtatcgtactgttacccataaaaaatcgaaaatctttgagaaacatgaaagatactatgcgtgtatccttggaaactc

SEQ ID NO: 111369 - protein, 167 aa, Zea mays subsp. mays; identical to SEQ ID NO: 61852
  misc_feature (1)..(167): Ceres Seq. ID no. 13587261
  misc_feature (20)..(46): Pfam Name: EF hand Pfam Description: EF hand
  misc_feature (20)..(159): Homolog of NCBI NO: 4959162 NR Description: calmodulin mutant SYNCAM57A [synthetic construct]
  misc_feature (20)..(159): Homolog of NCBI NO: 1168797 NR Description: CALTRACTIN (CENTRIN)
  misc_feature (19)..(159): Homolog of NCBI NO: 34909152 NR Description: putative calmodulin [Oryza sativa (japonica
  misc_feature (20)..(159): Homolog of NCBI NO: 4959637 NR Description: calmodulin mutant SYNCAM37 [synthetic construct]
  misc_feature (20)..(159): Homolog of NCBI NO: 4959626 NR Description: calmodulin mutant SYNCAM14 [synthetic construct]
  misc_feature (20)..(159): Homolog of NCBI NO: 115516 NR Description: CALMODULIN
  misc_feature (20)..(159): Homolog of NCBI NO: 7441481 NR Description: probable calmodulin - rice
  misc_feature (1)..(156): Homolog of NCBI NO: 2352828 NR Description: NaCl-inducible Ca2+-binding protein [Arabidopsis
  misc_feature (1)..(158): Homolog of NCBI NO: 15239904 NR Description: sodium-inducible calcium-binding protein
  misc_feature (1)..(162): Homolog of NCBI NO: 5702231 NR Description: hypersensitive reaction associated Ca2+-binding

SEQ ID NO: 111370 - protein, 105 aa, Zea mays subsp. mays; identical to SEQ ID NO: 61853
  misc_feature (1)..(105): Ceres Seq. ID no. 13587262
  misc_feature (1)..(97): Homolog of NCBI NO: 115516 NR Description: CALMODULIN
  misc_feature (1)..(97): Homolog of NCBI NO: 7441481 NR Description: probable calmodulin - rice
  misc_feature (1)..(97): Homolog of NCBI NO: 4959626 NR Description: calmodulin mutant SYNCAM14 [synthetic construct]
  misc_feature (1)..(97): Homolog of NCBI NO: 4959162 NR Description: calmodulin mutant SYNCAM57A [synthetic construct]
  misc_feature (1)..(97): Homolog of NCBI NO: 1168797 NR Description: CALTRACTIN (CENTRIN)
  misc_feature (1)..(97): Homolog of NCBI NO: 34909152 NR Description: putative calmodulin [Oryza sativa (japonica
  misc_feature (1)..(97): Homolog of NCBI NO: 4959637 NR Description: calmodulin mutant SYNCAM37 [synthetic construct]
  misc_feature (1)..(94): Homolog of NCBI NO: 2352828 NR Description: NaCl-inducible Ca2+-binding protein [Arabidopsis
  misc_feature (1)..(96): Homolog of NCBI NO: 15239904 NR Description: sodium-inducible calcium-binding protein
  misc_feature (1)..(100): Homolog of NCBI NO: 5702231 NR Description: hypersensitive reaction associated Ca2+-binding

SEQ ID NO: 111371 - DNA, 976 bp, Zea mays subsp. mays
  misc_feature (1)..(976): Ceres Seq. ID no. 13599397
atctttcattcgtgcctgaagcagcagccattgcccattgctaacgagagtggagtggtagagcagttcgagtttgcctttctctcttgcttgattggttgatcggtgactcgatccatcgtcggaggtacatatagttagcgaggaattctccggccggccaccggcgacgacgaccgcaagtgatccgtgaggatggtgaacacgacggcggctatggtgagcggcggcaagggcggcgtgctgccgctggcgtccctgaaccacatcagcatagtgtgcaagtcggtggaggagtcgctcgacttctacatgaacgtcctcgggttcacccccatccgccggcccggctccttcgacttcgacggcgcatggctgttcaactacgggatcggcatccacctgctgcagtcggagcgtcccgacagcttaccagcgaagaaggagatcaaccccaaggataaccacatctccttccagtgcgagagcatggtggcggtggagcggcggctcaaggagctgggcattccatacatccagcggtgcgtggaggagggcggcatctacgtggaccagatcttcttccacgaccccgacggcttcatgatcgagatctgcaactgcgacaacctcccggtcgtcccgctcgccgaccagaccttcgccatggccgcctgcaagagggtcgcctccgtcaagcagtagcaggtgcccatgccggtcgcacaagtagcgcaagcaacccctgctcccacggcggccgcggcttcgcagtgcattcccgcgccgaacccggccttgcagcgcgtcggcggcgaggaggcggcgcatatctcgtgcgcgtgagaggtgggaggccggggtagccaggccgcccaactggtggcgcgctccgtggagtcgtggtttttgtatattgtgatataacagtgtgcgtatgaataaagtgaggggagcagagtgtggtttcagctcc

SEQ ID NO: 111372 - protein, 169 aa, Zea mays subsp. mays
  misc_feature (1)..(169): Ceres Seq. ID no. 13599398
  misc_feature (21)..(140): Pfam Name: Glyoxalase/Bleomycin resistance Pfam Description: Glyoxalase/Bleomycin resistance
  misc_feature (19)..(139): Homolog of NCBI NO: 33146737 NR Description: unknown protein [Oryza sativa (japonica
  misc_feature (17)..(151): Homolog of NCBI NO: 21740426 NR Description: OSJNBa0091D06.24 [Oryza sativa (japonica
  misc_feature (17)..(150): Homolog of NCBI NO: 34899038 NR Description: hypothetical protein~similar to Arabidopsis
  misc_feature (17)..(150): Homolog of NCBI NO: 34395261 NR Description: glyoxalase family-like protein
  misc_feature (18)..(150): Homolog of NCBI NO: 15529260 NR Description: At2g28420/T1B3.6 [Arabidopsis thaliana]
  misc_feature (18)..(150): Homolog of NCBI NO: 18401734 NR Description: glyoxalase family protein (lactoylglutathione
  misc_feature (14)..(169): Homolog of NCBI NO: 18394235 NR Description: glyoxalase family protein (lactoylglutathione
  misc_feature (14)..(169): Homolog of NCBI NO: 25406639 NR Description: hypothetical protein F18B13.24 [imported] -
  misc_feature (14)..(169): Homolog of NCBI NO: 18412683 NR Description: glyoxalase family protein (lactoylglutathione
  misc_feature (1)..(151): Homolog of NCBI NO: 34910246 NR Description: OSJNBa0089K24.9 [Oryza sativa (japonica
MVNTTAAMVSGGKGGVLPLASLNHISIVCKSVEESLDFYMNVLGFTPIRRPGSFDFDGAWLFNYGIGIHLLQSERPDSLPAKKEINPKDNHISFQCESMVAVERRLKELGIPYIQRCVEEGGIYVDQIFFHDPDGFMIEICNCDNLPVVPLADQTFAMAACKRVASVKQ

SEQ ID NO: 111373 - protein, 162 aa, Zea mays subsp. mays
  misc_feature (1)..(162): Ceres Seq. ID no. 13599399
  misc_feature (14)..(133): Pfam Name: Glyoxalase/Bleomycin resistance Pfam Description: Glyoxalase/Bleomycin resistance
  misc_feature (12)..(132): Homolog of NCBI NO: 33146737 NR Description: unknown protein [Oryza sativa (japonica
  misc_feature (10)..(144): Homolog of NCBI NO: 21740426 NR Description: OSJNBa0091D06.24 [Oryza sativa (japonica
  misc_feature (10)..(143): Homolog of NCBI NO: 34899038 NR Description: hypothetical protein~similar to Arabidopsis
  misc_feature (10)..(143): Homolog of NCBI NO: 34395261 NR Description: glyoxalase family-like protein
  misc_feature (11)..(143): Homolog of NCBI NO: 15529260 NR Description: At2g28420/T1B3.6 [Arabidopsis thaliana]
  misc_feature (11)..(143): Homolog of NCBI NO: 18401734 NR Description: glyoxalase family protein (lactoylglutathione
  misc_feature (7)..(162): Homolog of NCBI NO: 18394235 NR Description: glyoxalase family protein (lactoylglutathione
  misc_feature (7)..(162): Homolog of NCBI NO: 25406639 NR Description: hypothetical protein F18B13.24 [imported] -
  misc_feature (7)..(162): Homolog of NCBI NO: 18412683 NR Description: glyoxalase family protein (lactoylglutathione
  misc_feature (1)..(144): Homolog of NCBI NO: 34910246 NR Description: OSJNBa0089K24.9 [Oryza sativa (japonica
MVSGGKGGVLPLASLNHISIVCKSVEESLDFYMNVLGFTPIRRPGSFDFDGAWLFNYGIGIHLLQSERPDSLPAKKEINPKDNHISFQCESMVAVERRLKELGIPYIQRCVEEGGIYVDQIFFHDPDGFMIEICNCDNLPVVPLADQTFAMAACKRVASVKQ

SEQ ID NO: 111374 - protein, 130 aa, Zea mays subsp. mays
  misc_feature (1)..(130): Ceres Seq. ID no. 13599400
  misc_feature (1)..(101): Pfam Name: Glyoxalase/Bleomycin resistance Pfam Description: Glyoxalase/Bleomycin resistance
  misc_feature (1)..(100): Homolog of NCBI NO: 33146737 NR Description: unknown protein [Oryza sativa (japonica
  misc_feature (1)..(112): Homolog of NCBI NO: 21740426 NR Description: OSJNBa0091D06.24 [Oryza sativa (japonica
  misc_feature (1)..(111): Homolog of NCBI NO: 34899038 NR Description: hypothetical protein~similar to Arabidopsis
  misc_feature (1)..(111): Homolog of NCBI NO: 34395261 NR Description: glyoxalase family-like protein
  misc_feature (1)..(111): Homolog of NCBI NO: 15529260 NR Description: At2g28420/T1B3.6 [Arabidopsis thaliana]
  misc_feature (1)..(111): Homolog of NCBI NO: 18401734 NR Description: glyoxalase family protein (lactoylglutathione
  misc_feature (1)..(130): Homolog of NCBI NO: 18394235 NR Description: glyoxalase family protein (lactoylglutathione
  misc_feature (1)..(130): Homolog of NCBI NO: 25406639 NR Description: hypothetical protein F18B13.24 [imported] -
  misc_feature (1)..(130): Homolog of NCBI NO: 18412683 NR Description: glyoxalase family protein (lactoylglutathione
  misc_feature (1)..(112): Homolog of NCBI NO: 34910246 NR Description: OSJNBa0089K24.9 [Oryza sativa (japonica
MNVLGFTPIRRPGSFDFDGAWLFNYGIGIHLLQSERPDSLPAKKEINPKDNHISFQCESMVAVERRLKELGIPYIQRCVEEGGIYVDQIFFHDPDGFMIEICNCDNLPVVPLADQTFAMAACKRVASVKQ

SEQ ID NO: 111375 - DNA, 1647 bp, Zea mays subsp. mays
  misc_feature (1)..(1647): Ceres Seq. ID no. 13599602
aaaagaacaaacccagttgaattttcccagaaagttttctcctttttttcttgaattaagcttaacagtgagaaaagatggagaaagccactgaaaggcagaagattctgattcgtcatctcaatccactttcttcttctccttctcttcctagcattaatgataataaacctactcttctctccgctgtgaactgtgctgctgagctttccccaatggctgccttcggagacgacgttgtgatcgttgcggcgtatcgcactgccatctgcaaagctaaacgtggagggttcaaagatactctcccagatgatcttcttgcttctgttctcaaggctgtggtggaaaggacgtctttggatccaagtgaagttggggatattgttgttggtaccgttatagctcctggctctcagagagccatggagtgtagagtagctgcttactttgctggctttcctgactctgtgccaatcagaactgtcaacagacaatgctcatcaggactacaagctgttgctgatgttgctgcttccatcagagctggatattacgacattggtattggtgctggagttgagtccatgtcgattgatcacactgctggaggtggctttcacacaacaaacccgagggcacaagagtttcgtggagctcgtgactgcttgcttccgatgggcataacttctgaaaacgtagcagaaagatactgtgtcacaagagaagatcaagacatggctgcggtggagtctcacaagcgtgcagcagctgcaaacgcgtctggtaaactaaaggatgagatagttcctgttgcgactaagattgttgaccctgatacaaaagcagagaagccaattgttgtttctgttgatgatggtgtacgtccaaactcaaacatggctgatcttgcaaagctgaagacagtctttaaacctaatggttcaaccacagcaggcaatgctagtcagattagtgatggtgctggagctgtactgctgatgaagaggagcttggcgatgaagaagggacttcccattcttggaatattcaggagctttgctgttactggtgtggatccagctgtaatgggtatcggtccagcttacgccattcccgctgcagccaaccttgcaggactcaaagttagcgatatcgatctatttgagatcaatgaggcatttgcatctcagtatgtgtactgttgcaagaagctagagctggatgtggaaaaggtcaatgttaatggaggggccattgctattggccatcctcttggtgctacaggagctcgatgtgttgcgacattgttgcatgagatgaaacggagagggaaagactgccgctttggagttatttcaatgtgcataggcactggtatgggagccgcagctgtgtttgagagaggagactctgttgatgacttgtccaatgcgcgtgtggagactaatgggagcggtcactagaacaaggttgaataaggacaagcaatgaaagcactaagtcaaataaaaaagtgtgaagcttaaacagctctttcacattgttgaacaatgaacaatttgtcattctgagtttaaaatgtatcaactagtaacttgtgagtgaacaaagagtcaaatctaaaaagcaaagttacatctttcaccg

SEQ ID NO: 111376 - protein, 461 aa, Zea mays subsp. mays
  misc_feature (1)..(461): Ceres Seq. ID no. 15218857
  misc_feature (51)..(311): Pfam Name: Thiolase, N-terminal domain Pfam Description: Thiolase, N-terminal domain
  misc_feature (1)..(458): Homolog of NCBI NO: 7433644 NR Description: acetyl-CoA C-acyltransferase (EC 2.3.1.16)
  misc_feature (1)..(453): Homolog of NCBI NO: 15219797 NR Description: acetyl-CoA C-acyltransferase (3-ketoacyl-CoA
  misc_feature (1)..(458): Homolog of NCBI NO: 421810 NR Description: acetyl-CoA C-acyltransferase (EC 2.3.1.16)
  misc_feature (1)..(458): Homolog of NCBI NO: 15225798 NR Description: acetyl-CoA C-acyltransferase (3-ketoacyl-CoA
  misc_feature (1)..(453): Homolog of NCBI NO: 7433647 NR Description: acetyl-CoA C-acyltransferase (EC 2.3.1.16)
  misc_feature (1)..(458): Homolog of NCBI NO: 393707 NR Description: 3-ketoacyl-CoA thiolase; acetyl-CoA
  misc_feature (47)..(461): Homolog of NCBI NO: 30695561 NR Description: acetyl-CoA C-acyltransferase 1 (3-ketoacyl-CoA
  misc_feature (1)..(461): Homolog of NCBI NO: 30695564 NR Description: acetyl-CoA C-acyltransferase 1 (3-ketoacyl-CoA
MEKATERQKILIRHLNPLSSSPSLPSINDNKPTLLSAVNCAAELSPMAAFGDDVVIVAAYRTAICKAKRGGFKDTLPDDLLASVLKAVVERTSLDPSEVGDIVVGTVIAPGSQRAMECRVAAYFAGFPDSVPIRTVNRQCSSGLQAVADVAASIRAGYYDIGIGAGVESMSIDHTAGGGFHTTNPRAQEFRGARDCLLPMGITSENVAERYCVTREDQDMAAVESHKRAAAANASGKLKDEIVPVATKIVDPDTKAEKPIVVSVDDGVRPNSNMADLAKLKTVFKPNGSTTAGNASQISDGAGAVLLMKRSLAMKKGLPILGIFRSFAVTGVDPAVMGIGPAYAIPAAANLAGLKVSDIDLFEINEAFASQYVYCCKKLELDVEKVNVNGGAIAIGHPLGATGARCVATLLHEMKRRGKDCRFGVISMCIGTGMGAAAVFERGDSVDDLSNARVETNGSGH

SEQ ID NO: 111377 - protein, 415 aa, Zea mays subsp. mays
  misc_feature (1)..(415): Ceres Seq. ID no. 15218858
  misc_feature (5)..(265): Pfam Name: Thiolase, N-terminal domain Pfam Description: Thiolase, N-terminal domain
  misc_feature (1)..(412): Homolog of NCBI NO: 7433644 NR Description: acetyl-CoA C-acyltransferase (EC 2.3.1.16)
  misc_feature (1)..(407): Homolog of NCBI NO: 15219797 NR Description: acetyl-CoA C-acyltransferase (3-ketoacyl-CoA
  misc_feature (1)..(412): Homolog of NCBI NO: 421810 NR Description: acetyl-CoA C-acyltransferase (EC 2.3.1.16)
  misc_feature (1)..(412): Homolog of NCBI NO: 15225798 NR Description: acetyl-CoA C-acyltransferase (3-ketoacyl-CoA
  misc_feature (1)..(407): Homolog of NCBI NO: 7433647 NR Description: acetyl-CoA C-acyltransferase (EC 2.3.1.16)
  misc_feature (1)..(412): Homolog of NCBI NO: 393707 NR Description: 3-ketoacyl-CoA thiolase; acetyl-CoA
  misc_feature (1)..(415): Homolog of NCBI NO: 30695561 NR Description: acetyl-CoA C-acyltransferase 1 (3-ketoacyl-CoA
  misc_feature (1)..(415): Homolog of NCBI NO: 30695564 NR Description: acetyl-CoA C-acyltransferase 1 (3-ketoacyl-CoA
MAAFGDDVVIVAAYRTAICKAKRGGFKDTLPDDLLASVLKAVVERTSLDPSEVGDIVVGTVIAPGSQRAMECRVAAYFAGFPDSVPIRTVNRQCSSGLQAVADVAASIRAGYYDIGIGAGVESMSIDHTAGGGFHTTNPRAQEFRGARDCLLPMGITSENVAERYCVTREDQDMAAVESHKRAAAANASGKLKDEIVPVATKIVDPDTKAEKPIVVSVDDGVRPNSNMADLAKLKTVFKPNGSTTAGNASQISDGAGAVLLMKRSLAMKKGLPILGIFRSFAVTGVDPAVMGIGPAYAIPAAANLAGLKVSDIDLFEINEAFASQYVYCCKKLELDVEKVNVNGGAIAIGHPLGATGARCVATLLHEMKRRGKDCRFGVISMCIGTGMGAAAVFERGDSVDDLSNARVETNGSGH

SEQ ID NO: 111378 - protein, 346 aa, Zea mays subsp. mays
  misc_feature (1)..(346): Ceres Seq. ID no. 15218859
  misc_feature (1)..(196): Pfam Name: Thiolase, N-terminal domain Pfam Description: Thiolase, N-terminal domain
  misc_feature (1)..(343): Homolog of NCBI NO: 7433644 NR Description: acetyl-CoA C-acyltransferase (EC 2.3.1.16)
  misc_feature (1)..(338): Homolog of NCBI NO: 15219797 NR Description: acetyl-CoA C-acyltransferase (3-ketoacyl-CoA
  misc_feature (1)..(343): Homolog of NCBI NO: 421810 NR Description: acetyl-CoA C-acyltransferase (EC 2.3.1.16)
  misc_feature (1)..(343): Homolog of NCBI NO: 15225798 NR Description: acetyl-CoA C-acyltransferase (3-ketoacyl-CoA
  misc_feature (1)..(338): Homolog of NCBI NO: 7433647 NR Description: acetyl-CoA C-acyltransferase (EC 2.3.1.16)
  misc_feature (1)..(343): Homolog of NCBI NO: 393707 NR Description: 3-ketoacyl-CoA thiolase; acetyl-CoA
  misc_feature (1)..(346): Homolog of NCBI NO: 30695561 NR Description: acetyl-CoA C-acyltransferase 1 (3-ketoacyl-CoA
  misc_feature (1)..(346): Homolog of NCBI NO: 30695564 NR Description: acetyl-CoA C-acyltransferase 1 (3-ketoacyl-CoA
MECRVAAYFAGFPDSVPIRTVNRQCSSGLQAVADVAASIRAGYYDIGIGAGVESMSIDHTAGGGFHTTNPRAQEFRGARDCLLPMGITSENVAERYCVTREDQDMAAVESHKRAAAANASGKLKDEIVPVATKIVDPDTKAEKPIVVSVDDGVRPNSNMADLAKLKTVFKPNGSTTAGNASQISDGAGAVLLMKRSLAMKKGLPILGIFRSFAVTGVDPAVMGIGPAYAIPAAANLAGLKVSDIDLFEINEAFASQYVYCCKKLELDVEKVNVNGGAIAIGHPLGATGARCVATLLHEMKRRGKDCRFGVISMCIGTGMGAAAVFERGDSVDDLSNARVETNGSGH

SEQ ID NO: 111379 - DNA, 682 bp, Zea mays subsp. mays
  misc_feature (1)..(682): Ceres Seq. ID no. 12638425
cctaatcgaaaagatctttactttctctgtagccgtgatcgtcgccgtccccgttttctatctccggtcggattgtataaccgggagctgttgtcaccatgtttctcacgagatttatcgggaggagattcttagcggtggctgcttccacgagatcggagtccactactgcagcagctgcctcgactgttaagattgcgaaaaaccctctcgaggagttctttgagttcgacagaagccaggacgaagacaaacctgttgtctacggtcgaggttggaaagcttcagaactgcgactcaagtcatgggatgatcttcagaagctgtggtacgttcttctcaaagagaaaaacatgttgatgactcagcgtcagatgcttcaagctcagaacatgatgtttcccaaccctgaacgcattccgaaggtgaggagatcaatgtgccgcataaagcatgtgctgacagagagagcgattgaagaaccggatcccagaagatcagccgagatgaagagaatggtcaatgctatgtgatcaatcccttgtgcttcttttcgcaaccgattagagtcggtgtttgggtcttagtccaatgattgtgactgttgtccggttgttaaaatgtttgttcgggtatatgcacgtacgttttctataaaaccgtggttggtgtttatttcagc

SEQ ID NO: 111380 - protein, 144 aa, Zea mays subsp. mays
  misc_feature (1)..(144): Ceres Seq. ID no. 12638426
  misc_feature (33)..(124): Homolog of NCBI NO: 29826287 NR Description: mitochondrial ribosomal protein L47 isoform a
  misc_feature (33)..(124): Homolog of NCBI NO: 9858831 NR Description: CGI-204 [Homo sapiens]
  misc_feature (33)..(124): Homolog of NCBI NO: 34856796 NR Description: similar to mitochondrial ribosomal protein L47
  misc_feature (33)..(124): Homolog of NCBI NO: 20865861 NR Description: similar to CGI-204 [Mus musculus]
  misc_feature (33)..(124): Homolog of NCBI NO: 23273006 NR Description: Unknown (protein for IMAGE:4489172) [Mus musculus]
  misc_feature (33)..(124): Homolog of NCBI NO: 20810578 NR Description: Similar to mitochondrial ribosomal protein L47
  misc_feature (9)..(124): Homolog of NCBI NO: 21618497 NR Description: Similar to mitochondrial ribosomal protein L47
  misc_feature (1)..(100): Homolog of NCBI NO: 25407010 NR Description: hypothetical protein [imported] - Arabidopsis
  misc_feature (58)..(144): Homolog of NCBI NO: 25407010 NR Description: hypothetical protein [imported] - Arabidopsis
  misc_feature (1)..(144): Homolog of NCBI NO: 15223019 NR Description: mitochondrial ribosomal protein, putative
MFLTRFIGRRFLAVAASTRSESTTAAAASTVKIAKNPLEEFFEFDRSQDEDKPVVYGRGWKASELRLKSWDDLQKLWYVLLKEKNMLMTQRQMLQAQNMMFPNPERIPKVRRSMCRIKHVLTERAIEEPDPRRSAEMKRMVNAM

SEQ ID NO: 111381 - DNA, 751 bp, Zea mays subsp. mays
  misc_feature (1)..(751): Ceres Seq. ID no. 15226701
aatttcgggaatcgatttgtagtggggcatgtaagcttgtgggagaggaaagcagcaggagacgaaggtagacaaggaaaagtatgtcaaagaaaatgagagaacaaccttcttagcttctcctccagtctctctccaccaccgctctatctcctcggtaggaagaagagcaagcaagagaggagcaagctagctagcggtacaagggagagtgagcggcgaaggggacggacgaattgaagaacacctgccagtccgatcgagctggtggtgccgccaggataaatcgggaggtatatgatggcgtcgaattcaccgtcggcggcgttctttggtgttagggatggggaccagcaagaccaccagattaagccgctgatatcaccgcagcagcagcagcagctggcagcggcactgcccagcgtggcgtccggccaaggcgcgccgacggcggcggcgcagccaccgcccaagaagaagaggactatgcccggtaattcacgcaagtccacccccttctgactccggtcgtccatgcacactgcgtacaggtctgctgcctgccagagatctcgctcgctcgtctggatcgattggagttttatgagttggatgcttgcagcaagagcatatatcttctctcacatagtcacatgcctgcactcggtttctctttccatttcttcgtggtttcttgtctgagtattgtagttcttggtttgtgatcaccgctatatatcttcactgcgcc

SEQ ID NO: 111382 - protein, 74 aa, Zea mays subsp. mays
  misc_feature (1)..(74): Ceres Seq. ID no. 15226702
  misc_feature (2)..(67): Homolog of NCBI NO: 38344265 NR Description: OSJNBa0005N02.2 [Oryza sativa (japonica
MMASNSPSAAFFGVRDGDQQDHQIKPLISPQQQQQLAAALPSVASGQGAPTAAAQPPPKKKRTMPGNSRKSTPF

SEQ ID NO: 111383 - protein, 73 aa, Zea mays subsp. mays
  misc_feature (1)..(73): Ceres Seq. ID no. 15226703
  misc_feature (1)..(66): Homolog of NCBI NO: 38344265 NR Description: OSJNBa0005N02.2 [Oryza sativa (japonica
MASNSPSAAFFGVRDGDQQDHQIKPLISPQQQQQLAAALPSVASGQGAPTAAAQPPPKKKRTMPGNSRKSTPF

SEQ ID NO: 111384 - protein, 55 aa, Zea mays subsp. mays
  misc_feature (1)..(55): Ceres Seq. ID no. 15226704
MHTAYRSAACQRSRSLVWIDWSFMSWMLAARAYIFSHIVTCLHSVSLSISSWFLV

SEQ ID NO: 111385 - DNA, 796 bp, Zea mays subsp. mays
  misc_feature (1)..(796): Ceres Seq. ID no. 13587097
cccaatcccctcccgccgcgtcacatcgccgccgtcctcgtgccccgttacctctaaaaccctagcggggagccggggatgaagatccagtgcaacgcgtgcggggccgcggaggcgcgggtgctgtgctgcgcggacgaggccccgctctgcgtcgcctgcgacgaggaggtgcacgccgccaacaagctcgccgggaagcaccagcgggtgccgctcctgacggacgccgccgtcgctgccgccgcggcggccccggccgtgcccaagtgcgacatctgtcaggtcaggcacccaggccccgaggcccgagccctcgtctccgctgcctctctctccatccctgtagctcgattgggttggggtgagctggagttgtcgtgcggtagctgccactgccaggctgggaattttctactaaccgtctgatcccaagctaccagggtagtctcgcctaatgatttggctcgcgaagtgaataggcggctgaagcactgcaaagttgttgttgatgcttcgatctgtagcaaactgccttgccttaccttacctgggcagcttcccttgggatgccgagtctgtttctggagcgttggcggaattgctatacgatatacactatgttttactgatgatctgactggaccaggacagcagtgagttcaattttagctcctacaggctttccctatcccggggaaggcatcatgtgtgatctgtggctggtcctgcaggatattgtaattatgaagaaaccgactcggatgttgtactgatgtgccactcttgaggaccc

SEQ ID NO: 111386 - protein, 116 aa, Zea mays subsp. mays
  misc_feature (1)..(116): Ceres Seq. ID no. 13587098
  misc_feature (1)..(47): Pfam Name: B-box zinc finger Pfam Description: B-box zinc finger
  misc_feature (1)..(69): Homolog of NCBI NO: 7489603 NR Description: zinc-finger protein R2931 [imported] - rice
  misc_feature (1)..(69): Homolog of NCBI NO: 15221367 NR Description: salt-tolerance protein [Arabidopsis thaliana]
  misc_feature (1)..(69): Homolog of NCBI NO: 3618312 NR Description: zinc finger protein [Oryza sativa (japonica
  misc_feature (1)..(71): Homolog of NCBI NO: 15234983 NR Description: CONSTANS B-box zinc finger family protein
  misc_feature (1)..(69): Homolog of NCBI NO: 38344979 NR Description: OSJNBa0011L07.9 [Oryza sativa (japonica
  misc_feature (1)..(69): Homolog of NCBI NO: 3618314 NR Description: zinc finger protein [Oryza sativa (japonica
  misc_feature (1)..(69): Homolog of NCBI NO: 3618310 NR Description: zinc finger protein [Oryza sativa (japonica
  misc_feature (1)..(72): Homolog of NCBI NO: 34903708 NR Description: putative zinc-finger protein
  misc_feature (1)..(69): Homolog of NCBI NO: 18412037 NR Description: CONSTANS B-box zinc finger family protein
  misc_feature (1)..(69): Homolog of NCBI NO: 17433085 NR Description: Zinc finger protein constans-like 7
MKIQCNACGAAEARVLCCADEAPLCVACDEEVHAANKLAGKHQRVPLLTDAAVAAAAAAPAVPKCDICQVRHPGPEARALVSAASLSIPVARLGWGELELSCGSCHCQAGNFLLTV

SEQ ID NO: 111387 - DNA, 751 bp, Zea mays subsp. mays
  misc_feature (1)..(751): Ceres Seq. ID no. 13599401
aaaaaacgtcttgatagggaacaaaaagacatggcttcttcttcttcttttttcactttctctagtcagaccacactgcattcccatcttcacagaaacacctttctcaccaaaacccaatttccagttcccacaaaatcatcagaatctaacttctttggtctcagactctctccctccacctctcgctctccgctctctccctgttctttcaaaagctcaatctttgctaaggttaacaaggggcagagtgcaccagacttcacactaaaggatcaaaatggaaagccggtgagcttgaagaagtataaagggaagcctgttgttgtatatttctaccctgccgatgaaacccctggctgcaccaagcaggcttgtgcgttcagagactcttatgagaaattcaagaaagccggcgcagaggtcattggcataagtggtgatgattctgcttctcacaaggcctttgcaagcaaatacaagcttccttacacattgttgagtgacgaagggaatagggtgaggaaagattggggagtgccaggagatttatttggggcattgccagggagacagacttatgttctcgacaaaaacggtgtcgttcagctcatctacaacaaccagttccagcctgagaaacacattgatgagaccttaaagttcctcaaagctgcttgatcttgtattcttctcttcttcctcatctggatgactggatatttacaacaacaattcatgacgttcctct

SEQ ID NO: 111388 - protein, 226 aa, Zea mays subsp. mays
  misc_feature (1)..(226): Ceres Seq. ID no. 13599402
  misc_feature (81)..(220): Pfam Name: AhpC/TSA family Pfam Description: AhpC/TSA family
  misc_feature (79)..(224): Homolog of NCBI NO: 16081486 NR Description: thiol-specific antioxidant related protein
  misc_feature (77)..(224): Homolog of NCBI NO: 21673494 NR Description: bacterioferritin comigratory protein, thiol
  misc_feature (79)..(224): Homolog of NCBI NO: 15898858 NR Description: Peroxiredoxin, bacterioferritin comigratory
  misc_feature (78)..(224): Homolog of NCBI NO: 23041480 NR Description: hypothetical protein [Trichodesmium erythraeum
  misc_feature (78)..(224): Homolog of NCBI NO: 28850433 NR Description: similar to Anabaena sp. (strain PCC 7120).
  misc_feature (79)..(224): Homolog of NCBI NO: 23125049 NR Description: hypothetical protein [Nostoc punctiforme]
  misc_feature (79)..(224): Homolog of NCBI NO: 17230675 NR Description: bacterioferritin comigratory protein [Nostoc sp.
  misc_feature (47)..(226): Homolog of NCBI NO: 39748708 NR Description: peroxiredoxin Q [Gentiana triflora]
  misc_feature (47)..(225): Homolog of NCBI NO: 6899842 NR Description: peroxiredoxin Q [Sedum lineare]
  misc_feature (11)..(226): Homolog of NCBI NO: 15230982 NR Description: peroxiredoxin -related [Arabidopsis thaliana]
KKRLDREQKDMASSSSFFTFSSQTTLHSHLHRNTFLTKTQFPVPTKSSESNFFGLRLSPSTSRSPLSPCSFKSSIFAKVNKGQSAPDFTLKDQNGKPVSLKKYKGKPVVVYFYPADETPGCTKQACAFRDSYEKFKKAGAEVIGISGDDSASHKAFASKYKLPYTLLSDEGNRVRKDWGVPGDLFGALPGRQTYVLDKNGVVQLIYNNQFQPEKHIDETLKFLKAA

SEQ ID NO: 111389 - protein, 216 aa, Zea mays subsp. mays
  misc_feature (1)..(216): Ceres Seq. ID no. 13599403
  misc_feature (71)..(210): Pfam Name: AhpC/TSA family Pfam Description: AhpC/TSA family
  misc_feature (69)..(214): Homolog of NCBI NO: 16081486 NR Description: thiol-specific antioxidant related protein
  misc_feature (67)..(214): Homolog of NCBI NO: 21673494 NR Description: bacterioferritin comigratory protein, thiol
  misc_feature (69)..(214): Homolog of NCBI NO: 15898858 NR Description: Peroxiredoxin, bacterioferritin comigratory
  misc_feature (68)..(214): Homolog of NCBI NO: 23041480 NR Description: hypothetical protein [Trichodesmium erythraeum
  misc_feature (68)..(214): Homolog of NCBI NO: 28850433 NR Description: similar to Anabaena sp. (strain PCC 7120).
  misc_feature (69)..(214): Homolog of NCBI NO: 23125049 NR Description: hypothetical protein [Nostoc punctiforme]
  misc_feature (69)..(214): Homolog of NCBI NO: 17230675 NR Description: bacterioferritin comigratory protein [Nostoc sp.
  misc_feature (37)..(216): Homolog of NCBI NO: 39748708 NR Description: peroxiredoxin Q [Gentiana triflora]
  misc_feature (37)..(215): Homolog of NCBI NO: 6899842 NR Description: peroxiredoxin Q [Sedum lineare]
  misc_feature (1)..(216): Homolog of NCBI NO: 15230982 NR Description: peroxiredoxin -related [Arabidopsis thaliana]
MASSSSFFTFSSQTTLHSHLHRNTFLTKTQFPVPTKSSESNFFGLRLSPSTSRSPLSPCSFKSSIFAKVNKGQSAPDFTLKDQNGKPVSLKKYKGKPVVVYFYPADETPGCTKQACAFRDSYEKFKKAGAEVIGISGDDSASHKAFASKYKLPYTLLSDEGNRVRKDWGVPGDLFGALPGRQTYVLDKNGVVQLIYNNQFQPEKHIDETLKFLKAA

SEQ ID NO: 111390 - DNA, 750 bp, Zea mays subsp. mays
  misc_feature (1)..(750): Ceres Seq. ID no. 13599603
ctcattagacttttctactacacattcccatttcccacatcagacaacattctctccctcagagggaaagcatctcctcttcttgattcacattttgaactttaaccttctcaaactatctccaacaaaaccaaatccaagttattaaaaatgacaaagataggaggtattcttgtttgtttagtcatcgtgggattagatgtggctgctgcaatcctcggaatccaagcagaagtcgctcagaatcaggtgaagcacatgaggctttggctatttgagtgcagagagccaagccaggacgcgtacaggttaggtctaggtgcagccgcggtattggtaatggctcatgtactcatcaatttggtcggaggctgtctctgtatttgctctcaagacgagtttcaaagatcttcttccacaaagcaaatctcaatggcttgtctcgttctcacttggatcgtattcgccgttggatttggggctttagtgattgggacgatgtccaacaacaagtcaagatcctcttgtggattcacacatcaccattttctctccattggagggatcttgtgttttctacatgccctcttttgtgtcgcttattacgtttctgccacagcggctaaagacgcagctgctaagtgacaaagccatgataaggatgggtgaacacaggtgggtggtccttgtacttgactatatattccaatggtaattgtgtaacatttcatatctattaacataacatag

SEQ ID NO: 111391 - protein, 164 aa, Zea mays subsp. mays
  misc_feature (1)..(164): Ceres Seq. ID no. 13599604
  misc_feature (25)..(102): Homolog of NCBI NO: 26452012 NR Description: unknown protein [Arabidopsis thaliana]
  misc_feature (43)..(163): Homolog of NCBI NO: 10177066 NR Description: dbj|BAA92731.1~gene_id:MKP11.6~similar to unknown
  misc_feature (7)..(163): Homolog of NCBI NO: 18418215 NR Description: expressed protein [Arabidopsis thaliana]
  misc_feature (7)..(159): Homolog of NCBI NO: 34897938 NR Description: ESTs AU082454(S3638),D41267(S3638) correspond to region of the predicted gene.~Similar to Arabidopsis thaliana DNA
  misc_feature (6)..(159): Homolog of NCBI NO: 15220395 NR Description: expressed protein [Arabidopsis thaliana]
  misc_feature (7)..(159): Homolog of NCBI NO: 25406837 NR Description: YUP8H12.9 [imported] - Arabidopsis thaliana
  misc_feature (1)..(159): Homolog of NCBI NO: 34393261 NR Description: unknown protein [Oryza sativa (japonica
  misc_feature (1)..(158): Homolog of NCBI NO: 15233592 NR Description: expressed protein [Arabidopsis thaliana]
  misc_feature (1)..(162): Homolog of NCBI NO: 15225221 NR Description: expressed protein [Arabidopsis thaliana]
MTKIGGILVCLVIVGLDVAAAILGIQAEVAQNQVKHMRLWLFECREPSQDAYRLGLGAAAVLVMAHVLINLVGGCLCICSQDEFQRSSSTKQISMACLVLTWIVFAVGFGALVIGTMSNNKSRSSCGFTHHHFLSIGGILCFLHALFCVAYYVSATAAKDAAAK

SEQ ID NO: 111392 - protein, 128 aa, Zea mays subsp. mays
  misc_feature (1)..(128): Ceres Seq. ID no. 13599605
  misc_feature (1)..(66): Homolog of NCBI NO: 26452012 NR Description: unknown protein [Arabidopsis thaliana]
  misc_feature (7)..(127): Homolog of NCBI NO: 10177066 NR Description: dbj|BAA92731.1~gene_id:MKP11.6~similar to unknown
  misc_feature (1)..(127): Homolog of NCBI NO: 18418215 NR Description: expressed protein [Arabidopsis thaliana]
  misc_feature (1)..(123): Homolog of NCBI NO: 34897938 NR Description: ESTs AU082454(S3638),D41267(S3638) correspond to region of the predicted gene.~Similar to Arabidopsis thaliana DNA
  misc_feature (1)..(123): Homolog of NCBI NO: 15220395 NR Description: expressed protein [Arabidopsis thaliana]
  misc_feature (1)..(123): Homolog of NCBI NO: 25406837 NR Description: YUP8H12.9 [imported] - Arabidopsis thaliana
  misc_feature (1)..(123): Homolog of NCBI NO: 34393261 NR Description: unknown protein [Oryza sativa (japonica
  misc_feature (1)..(122): Homolog of NCBI NO: 15233592 NR Description: expressed protein [Arabidopsis thaliana]
  misc_feature (1)..(126): Homolog of NCBI NO: 15225221 NR Description: expressed protein [Arabidopsis thaliana]
MRLWLFECREPSQDAYRLGLGAAAVLVMAHVLINLVGGCLCICSQDEFQRSSSTKQISMACLVLTWIVFAVGFGALVIGTMSNNKSRSSCGFTHHHFLSIGGILCFLHALFCVAYYVSATAAKDAAAK

SEQ ID NO: 111393 - protein, 101 aa, Zea mays subsp. mays
  misc_feature (1)..(101): Ceres Seq. ID no. 13599606
  misc_feature (1)..(39): Homolog of NCBI NO: 26452012 NR Description: unknown protein [Arabidopsis thaliana]
  misc_feature (1)..(100): Homolog of NCBI NO: 10177066 NR Description: dbj|BAA92731.1~gene_id:MKP11.6~similar to unknown
  misc_feature (1)..(100): Homolog of NCBI NO: 18418215 NR Description: expressed protein [Arabidopsis thaliana]
  misc_feature (1)..(96): Homolog of NCBI NO: 34897938 NR Description: ESTs AU082454(S3638),D41267(S3638) correspond to region of the predicted gene.~Similar to Arabidopsis thaliana DNA
  misc_feature (1)..(96): Homolog of NCBI NO: 15220395 NR Description: expressed protein [Arabidopsis thaliana]
  misc_feature (1)..(96): Homolog of NCBI NO: 25406837 NR Description: YUP8H12.9 [imported] - Arabidopsis thaliana
  misc_feature (1)..(96): Homolog of NCBI NO: 34393261 NR Description: unknown protein [Oryza sativa (japonica
  misc_feature (1)..(95): Homolog of NCBI NO: 15233592 NR Description: expressed protein [Arabidopsis thaliana]
  misc_feature (1)..(99): Homolog of NCBI NO: 15225221 NR Description: expressed protein [Arabidopsis thaliana]
MAHVLINLVGGCLCICSQDEFQRSSSTKQISMACLVLTWIVFAVGFGALVIGTMSNNKSRSSCGFTHHHFLSIGGILCFLHALFCVAYYVSATAAKDAAAK

SEQ ID NO: 111394 - DNA, 950 bp, Zea mays subsp. mays
  misc_feature (1)..(950): Ceres Seq. ID no. 12635836
gggaaatgggaaatggtcagatagatcctgcgagaacctaaacctaacactcgtttctttgtcatcaaaaaagattctctgtctctccgatcctcgtcgatctgaagaatctcggagaccactcacttcaatggcggaatctgtagcttctcaaactccgtcgctctccgagcaatatcatttggagaaggaagtgaagcaagacacaagtgcgaagcctgtcgaggttgcaccagaggttacttctcaagctgaagacgttagcaccgacaaagccagtgaagaatctcctgctgaggaagctgtttctgctgttgaggagaagtctgagtctcctcctgcttctgaagaggctcctcctgctgtggtagtggaagacagtgctgatgagactcctgttgcggtggaagagagtaatgacgaaaacgctagtgaagaagttgttgaggagactcctgatgagatcaagcttgagacagctcctgctgatttccgtttcccgacaactaaccaaacaaggcattgtttcacacgttacattgaatatcacagatgtgtagctgctaagggtgacgacgctccagaatgcgacaagttttcaaagttttaccgatctctttgccccggtgaatgggttgataagtggaacgagcaaagagagaatggaactttccctggtcctctttaagacactctcctgcctgaagaaaaatcttcttttgatgttaccttcatgatgtcagagctccaattacactgcagagtttaataagattttacagaaccagctcgtttggttccccttcataagatgtgagaatttaacaactataatctcaaattttttctcttttacctatatgctcatctcaagttttgaggatcttctgattttgaaatgttgttctgcctgattatatgcttttcaatggcgagcttcaatttttagt

SEQ ID NO: 111395 - protein, 228 aa, Zea mays subsp. mays
  misc_feature (1)..(228): Ceres Seq. ID no. 12635837
  misc_feature (154)..(227): Pfam Name: Cytochrome oxidase c subunit VIb Pfam Description: Cytochrome oxidase c subunit VIb
  misc_feature (156)..(226): Homolog of NCBI NO: 38048151 NR Description: similar to Drosophila melanogaster CG14235
  misc_feature (155)..(228): Homolog of NCBI NO: 15234375 NR Description: putative protein; protein id: At4g28060.1
  misc_feature (154)..(228): Homolog of NCBI NO: 9967162 NR Description: cytochrome c oxidase subunit 6b
  misc_feature (153)..(228): Homolog of NCBI NO: 21592329 NR Description: cytochrome c oxidase subunit 6b [Arabidopsis
  misc_feature (153)..(228): Homolog of NCBI NO: 18424030 NR Description: Expressed protein
  misc_feature (67)..(228): Homolog of NCBI NO: 22204116 NR Description: putative cytochrome c oxidase subunit [Triticum
  misc_feature (51)..(228): Homolog of NCBI NO: 34906824 NR Description: putative cytochrome c oxidase subunit 6b-1
  misc_feature (50)..(228): Homolog of NCBI NO: 4586449 NR Description: cytochrome c oxidase subunit 6b-1
  misc_feature (44)..(228): Homolog of NCBI NO: 21554378 NR Description: cytochrome c oxidase subunit, putative
  misc_feature (44)..(228): Homolog of NCBI NO: 15219886 NR Description: cytochrome c oxidase subunit, putative
GNGKWSDRSCENLNLTLVSLSSKKILCLSDPRRSEESRRPLTSMAESVASQTPSLSEQYHLEKEVKQDTSAKPVEVAPEVTSQAEDVSTDKASEESPAEEAVSAVEEKSESPPASEEAPPAVVVEDSADETPVAVEESNDENASEEVVEETPDEIKLETAPADFRFPTTNQTRHCFTRYIEYHRCVAAKGDDAPECDKFSKFYRSLCPGEWVDKWNEQRENGTFPGPL

SEQ ID NO: 111396 - protein, 185 aa, Zea mays subsp. mays
  misc_feature (1)..(185): Ceres Seq. ID no. 12635838
  misc_feature (111)..(184): Pfam Name: Cytochrome oxidase c subunit VIb Pfam Description: Cytochrome oxidase c subunit VIb
  misc_feature (113)..(183): Homolog of NCBI NO: 38048151 NR Description: similar to Drosophila melanogaster CG14235
  misc_feature (112)..(185): Homolog of NCBI NO: 15234375 NR Description: putative protein; protein id: At4g28060.1
  misc_feature (111)..(185): Homolog of NCBI NO: 9967162 NR Description: cytochrome c oxidase subunit 6b
  misc_feature (110)..(185): Homolog of NCBI NO: 21592329 NR Description: cytochrome c oxidase subunit 6b [Arabidopsis
  misc_feature (110)..(185): Homolog of NCBI NO: 18424030 NR Description: Expressed protein
  misc_feature (24)..(185): Homolog of NCBI NO: 22204116 NR Description: putative cytochrome c oxidase subunit [Triticum
  misc_feature (8)..(185): Homolog of NCBI NO: 34906824 NR Description: putative cytochrome c oxidase subunit 6b-1
  misc_feature (7)..(185): Homolog of NCBI NO: 4586449 NR Description: cytochrome c oxidase subunit 6b-1
  misc_feature (1)..(185): Homolog of NCBI NO: 21554378 NR Description: cytochrome c oxidase subunit, putative
  misc_feature (1)..(185): Homolog of NCBI NO: 15219886 NR Description: cytochrome c oxidase subunit, putative
MAESVASQTPSLSEQYHLEKEVKQDTSAKPVEVAPEVTSQAEDVSTDKASEESPAEEAVSAVEEKSESPPASEEAPPAVVVEDSADETPVAVEESNDENASEEVVEETPDEIKLETAPADFRFPTTNQTRHCFTRYIEYHRCVAAKGDDAPECDKFSKFYRSLCPGEWVDKWNEQRENGTFPGPL

SEQ ID NO: 111397 - DNA, 1005 bp, Zea mays subsp. mays
  misc_feature (1)..(1005): Ceres Seq. ID no. 13599610
atttaacgccgcggtcactacttaactcattaactggatcccagcacaaccatggaagcgtacgacaagacctaccactaccagtgctcctccatttcaccgtgctcttctcaaccgctgcgtgcagcgtgctcctagtcatagcgcccccgcccactagctgagccaccgacttgttccgggccgccgcggggcagggcatgaaagcgacgacgtggcgcggcgcgccggggaccctaccggccgccagcgccaaggagaagaggaggaagcaaaaaacgcccgcgccgcgcggcttgatgtgcggctgcggcagcaccaggtcggtctccgtcgacatctccgccgctgtcacgacggcggcgcggacgaggcgacgcgtttccacggcgggggagccagcatctgcggcaaagacgacgacgacgacaggctgcggccgcggcgctgacgaagcgagcgccaatggcacgcccagcgtggactcgcttctgcggcagctgcgggagctggagcgcggcgtccgcgcgctgggcctgggcgtccgggaacgggaggagggcggcggcgcggcatcagggacggcgacgaccgcggaaacggcggcaaggccccgccggcacgcgcggagcgcgagcgtcgtggagcggctggactacgggagcgtggcggtggtgacggagtcggcggacccgctgcgcgacttccggcgctcgatggcgcagatgatcgtggagaacggcatcaccggcggcgccgagctgcgcgagctcctgcgccggttcctcgcgctcaacgccgcgtgccaccaccacctcatcctccgcgccttcggcgacgtctgggaggagatcttcgccgccgccgccgccggccgcgatggcggtagagctagcaaacggccacgcggtcgcgctggcgctggcgctgacactctaagctagccacccacagtcgtctgtcgtctcgtccatcctactactacaataatacttactctcctcg

SEQ ID NO: 111398 - protein, 247 aa, Zea mays subsp. mays
  misc_feature (1)..(247): Ceres Seq. ID no. 13599611
  misc_feature (162)..(220): Pfam Name: Protein of unknown function, DUF623 Pfam Description: Protein of unknown function, DUF623
  misc_feature (155)..(239): Homolog of NCBI NO: 22331750 NR Description: similar to unknown protein (gb|AAB63094.1)
  misc_feature (150)..(228): Homolog of NCBI NO: 32488495 NR Description: OSJNBa0011J08.2 [Oryza sativa (japonica
  misc_feature (83)..(219): Homolog of NCBI NO: 23429649 NR Description: ovate protein [Lycopersicon esculentum]
  misc_feature (117)..(220): Homolog of NCBI NO: 15241148 NR Description: hypothetical protein [Arabidopsis thaliana]
  misc_feature (55)..(232): Homolog of NCBI NO: 15224185 NR Description: expressed protein [Arabidopsis thaliana]
  misc_feature (17)..(215): Homolog of NCBI NO: 34908542 NR Description: P0423B08.21 [Oryza sativa (japonica
  misc_feature (115)..(224): Homolog of NCBI NO: 33146440 NR Description: unknown protein [Oryza sativa (japonica
  misc_feature (157)..(215): Homolog of NCBI NO: 34904220 NR Description: P0443E07.26 [Oryza sativa (japonica
  misc_feature (31)..(220): Homolog of NCBI NO: 37536390 NR Description: hypothetical protein [Oryza sativa (japonica
  misc_feature (17)..(235): Homolog of NCBI NO: 20330744 NR Description: Hypothetical protein [Oryza sativa (japonica
MKATTWRGAPGTLPAASAKEKRRKQKTPAPRGLMCGCGSTRSVSVDISAAVTTAARTRRRVSTAGEPASAAKTTTTTGCGRGADEASANGTPSVDSLLRQLRELERGVRALGLGVREREEGGGAASGTATTAETAARPRRHARSASVVERLDYGSVAVVTESADPLRDFRRSMAQMIVENGITGGAELRELLRRFLALNAACHHHLILRAFGDVWEEIFAAAAAGRDGGRASKRPRGRAGAGADTLS

SEQ ID NO: 111399 - protein, 214 aa, Zea mays subsp. mays
  misc_feature (1)..(214): Ceres Seq. ID no. 13599612
  misc_feature (129)..(187): Pfam Name: Protein of unknown function, DUF623 Pfam Description: Protein of unknown function, DUF623
  misc_feature (50)..(186): Homolog of NCBI NO: 23429649 NR Description: ovate protein [Lycopersicon esculentum]
  misc_feature (124)..(182): Homolog of NCBI NO: 34904220 NR Description: P0443E07.26 [Oryza sativa (japonica
  misc_feature (84)..(187): Homolog of NCBI NO: 15241148 NR Description: hypothetical protein [Arabidopsis thaliana]
  misc_feature (82)..(191): Homolog of NCBI NO: 33146440 NR Description: unknown protein [Oryza sativa (japonica
  misc_feature (22)..(199): Homolog of NCBI NO: 15224185 NR Description: expressed protein [Arabidopsis thaliana]
  misc_feature (1)..(182): Homolog of NCBI NO: 34908542 NR Description: P0423B08.21 [Oryza sativa (japonica
  misc_feature (122)..(206): Homolog of NCBI NO: 22331750 NR Description: similar to unknown protein (gb|AAB63094.1)
  misc_feature (117)..(195): Homolog of NCBI NO: 32488495 NR Description: OSJNBa0011J08.2 [Oryza sativa (japonica
  misc_feature (1)..(187): Homolog of NCBI NO: 37536390 NR Description: hypothetical protein [Oryza sativa (japonica
  misc_feature (1)..(202): Homolog of NCBI NO: 20330744 NR Description: Hypothetical protein [Oryza sativa (japonica
MCGCGSTRSVSVDISAAVTTAARTRRRVSTAGEPASAAKTTTTTGCGRGADEASANGTPSVDSLLRQLRELERGVRALGLGVREREEGGGAASGTATTAETAARPRRHARSASVVERLDYGSVAVVTESADPLRDFRRSMAQMIVENGITGGAELRELLRRFLALNAACHHHLILRAFGDVWEEIFAAAAAGRDGGRASKRPRGRAGAGADTLS

SEQ ID NO: 111400 - DNA, 850 bp, Zea mays subsp. mays
  misc_feature (1)..(850): Ceres Seq. ID no. 13589109
ccsssctscaggaatttgcackwkayyrtgtttamcwagaacatcctaatcgaaaaaaattaaaagcgcgttttagagtttaactgccgcttgccggaggagaaaactcaactcgccgttacctaccccgaacaccagttttattcccgcctgacatccaccgcgccgtttctgaactccgattaagttgatgtcaggattcgcagctcacctagtgttgttactcctggttcttgtctctgtctccttgtcgccgtcggtcaggtgtttaggtaaagagagaacattggctatgataaagccagatggagtctctggtaactacactgaagaaatcaaaaggctcattgtcgaggctggttttaatatcgtcaaggagaggcttactcagctggagaaggaggcagcctctgcgttctacgacgagcattcgtcaaggagcttttttcctcatcttgtttcttacatgacaagtggtcctgtggtggtgatggtgttggagaaaggagacgctgtttctgattggcgtggtttaatcgggcctactgattcgcaaaaggctaagatatctcatcctcacagcatcagagcattgtgtggtaaggactctcagagaaactgtgtgcacggctccgattcaacttcatcagctgagagagaaattaactttttcttcaaggatgtagtttcaggtgacatcgcttcacaacatgatgaactataagatacaccaatatatattctcwwtgtaawsttgkaactgkwggkkgatctatctatagtcacctaaamrmaaaraaaamrargcttatcgrtaccgkcracctcgaggggrsgctccggtacccaw

SEQ ID NO: 111401 - protein, 177 aa, Zea mays subsp. mays
  misc_feature (1)..(177): Ceres Seq. ID no. 15220936
  misc_feature (30)..(101): Pfam Name: Nucleoside diphosphate kinase Pfam Description: Nucleoside diphosphate kinase
  misc_feature (26)..(162): Homolog of NCBI NO: 18859073 NR Description: nucleoside diphosphate kinase-Z4 [Danio rerio]
  misc_feature (29)..(162): Homolog of NCBI NO: 38181932 NR Description: Unknown (protein for MGC:75677) [Silurana
  misc_feature (30)..(166): Homolog of NCBI NO: 32700087 NR Description: Nucleoside diphosphate kinase homolog 5 (NDK-H 5)
  misc_feature (30)..(166): Homolog of NCBI NO: 18079349 NR Description: RIKEN cDNA 1700019D05 [Mus musculus]
  misc_feature (30)..(166): Homolog of NCBI NO: 4505413 NR Description: non-metastatic cells 5, protein expressed in
  misc_feature (35)..(130): Homolog of NCBI NO: 9665132 NR Description: Unknown protein [Arabidopsis thaliana]
  misc_feature (35)..(172): Homolog of NCBI NO: 15220107 NR Description: hypothetical protein [Arabidopsis thaliana]
  misc_feature (131)..(167): Homolog of NCBI NO: 8778480 NR Description: F1L3.7 [Arabidopsis thaliana]
  misc_feature (92)..(130): Homolog of NCBI NO: 8778480 NR Description: F1L3.7 [Arabidopsis thaliana]
  misc_feature (12)..(101): Homolog of NCBI NO: 8778480 NR Description: F1L3.7 [Arabidopsis thaliana]
MSGFAAHLVLLLLVLVSVSLSPSVRCLGKERTLAMIKPDGVSGNYTEEIKRLIVEAGFNIVKERLTQLEKEAASAFYDEHSSRSFFPHLVSYMTSGPVVVMVLEKGDAVSDWRGLIGPTDSQKAKISHPHSIRALCGKDSQRNCVHGSDSTSSAEREINFFFKDVVSGDIASQHDEL

SEQ ID NO: 111402 - protein, 143 aa, Zea mays subsp. mays
  misc_feature (1)..(143): Ceres Seq. ID no. 15220937
  misc_feature (1)..(67): Pfam Name: Nucleoside diphosphate kinase Pfam Description: Nucleoside diphosphate kinase
  misc_feature (1)..(128): Homolog of NCBI NO: 18859073 NR Description: nucleoside diphosphate kinase-Z4 [Danio rerio]
  misc_feature (1)..(128): Homolog of NCBI NO: 38181932 NR Description: Unknown (protein for MGC:75677) [Silurana
  misc_feature (1)..(132): Homolog of NCBI NO: 32700087 NR Description: Nucleoside diphosphate kinase homolog 5 (NDK-H 5)
  misc_feature (1)..(132): Homolog of NCBI NO: 18079349 NR Description: RIKEN cDNA 1700019D05 [Mus musculus]
  misc_feature (1)..(132): Homolog of NCBI NO: 4505413 NR Description: non-metastatic cells 5, protein expressed in
  misc_feature (1)..(96): Homolog of NCBI NO: 9665132 NR Description: Unknown protein [Arabidopsis thaliana]
  misc_feature (1)..(138): Homolog of NCBI NO: 15220107 NR Description: hypothetical protein [Arabidopsis thaliana]
  misc_feature (97)..(133): Homolog of NCBI NO: 8778480 NR Description: F1L3.7 [Arabidopsis thaliana]
  misc_feature (58)..(96): Homolog of NCBI NO: 8778480 NR Description: F1L3.7 [Arabidopsis thaliana]
  misc_feature (1)..(67): Homolog of NCBI NO: 8778480 NR Description: F1L3.7 [Arabidopsis thaliana]
MIKPDGVSGNYTEEIKRLIVEAGFNIVKERLTQLEKEAASAFYDEHSSRSFFPHLVSYMTSGPVVVMVLEKGDAVSDWRGLIGPTDSQKAKISHPHSIRALCGKDSQRNCVHGSDSTSSAEREINFFFKDVVSGDIASQHDEL

SEQ ID NO: 111403 - DNA, 876 bp, Zea mays subsp. mays
  misc_feature (1)..(876): Ceres Seq. ID no. 12590120
tcaagtatacacttctctagccttccacacgctagacaacaaacgcgaccccgcgcccctctgctctgcctgcgcccgcccgctcgctcacaggcgctgcctggcagtgccattactgcccccacccgtctctccgggcccgagcacgccagggggaaccgggttcctcctcatggccggtgaccgccgcggcgggtcgcccacgatggagcgccggcgggggatccggcgcctcctgctgccccgcggggaggtctcctcgtcctcctcgccctcggtgccgctgcctccgccggccgcagccgaggtggggcggaggaagagcttcgcctccgcggcgctgcgcgggctgggctgcacgtcggccgcggcctcgcaggcgtacgcgccaggggcgggctccgcggctgcggcggccgtgcggtcgtccgccgactggcacgggcgaaggaagaaagggaaggacaggaggaaggagaggggaggaggtggaggaggcgnccttgtgggcggagggatcggcggcgacgtgtggtgcgccccggggataccgttcgccgcggaggcgtcgtccgtggactgcgtggtggcgcgccaccagatgctggggagggggcgcggcggcgacgccgagaggccgcacagagaggtgagccgtagatgcttactggcttctttggatctgttcgcgctcacagcttgtccatttcgtaggattgcttgctgttcttggtgggtggttattctcatcagttttctcattcctcatgtgcgtccgtttttgtgctttttttgaactcgttttttgtctgttgttgaaaagaaagcgtgtgttcttctccaagtattcaggttttctggtggctgttttgctcc

SEQ ID NO: 111404 - protein, 264 aa, Zea mays subsp. mays
  misc_feature (1)..(264): Ceres Seq. ID no. 12590121
  misc_feature (58)..(222): Homolog of NCBI NO: 34911396 NR Description: RING zinc finger protein-like
QVYTSLAFHTLDNKRDPAPLCSACARPLAHRRCLAVPLLPPPVSPGPSTPGGTGFLLMAGDRRGGSPTMERRRGIRRLLLPRGEVSSSSSPSVPLPPPAAAEVGRRKSFASAALRGLGCTSAAASQAYAPGAGSAAAAAVRSSADWHGRRKKGKDRRKERGGGGGGXLVGGGIGGDVWCAPGIPFAAEASSVDCVVARHQMLGRGRGGDAERPHREVSRRCLLASLDLFALTACPFRRIACCSWWVVILISFLIPHVRPFLCFF

SEQ ID NO: 111405 - protein, 207 aa, Zea mays subsp. mays
  misc_feature (1)..(207): Ceres Seq. ID no. 12590122
  misc_feature (1)..(165): Homolog of NCBI NO: 34911396 NR Description: RING zinc finger protein-like
MAGDRRGGSPTMERRRGIRRLLLPRGEVSSSSSPSVPLPPPAAAEVGRRKSFASAALRGLGCTSAAASQAYAPGAGSAAAAAVRSSADWHGRRKKGKDRRKERGGGGGGXLVGGGIGGDVWCAPGIPFAAEASSVDCVVARHQMLGRGRGGDAERPHREVSRRCLLASLDLFALTACPFRRIACCSWWVVILISFLIPHVRPFLCFF

SEQ ID NO: 111406 - protein, 196 aa, Zea mays subsp. mays
  misc_feature (1)..(196): Ceres Seq. ID no. 12590123
  misc_feature (1)..(154): Homolog of NCBI NO: 34911396 NR Description: RING zinc finger protein-like
MERRRGIRRLLLPRGEVSSSSSPSVPLPPPAAAEVGRRKSFASAALRGLGCTSAAASQAYAPGAGSAAAAAVRSSADWHGRRKKGKDRRKERGGGGGGXLVGGGIGGDVWCAPGIPFAAEASSVDCVVARHQMLGRGRGGDAERPHREVSRRCLLASLDLFALTACPFRRIACCSWWVVILISFLIPHVRPFLCFF

SEQ ID NO: 111407 - DNA, 763 bp, Zea mays subsp. mays
  misc_feature (1)..(763): Ceres Seq. ID no. 12635416
acctcaaccgcaccacagctcagctcccacccactcccaaaccctctcgccggagccccagcaacccgccagcaagcaagatggacggcagcaaggcgaagaaggtggcggcgaagaagttcggcgggccgaggaagaagtcggtgaccaagtccatcaaggccgggctccagttccccgtcggccgcatcgggcgctacctcaagaagggccgctacgcccagcgcgtcggctccggcgcccccgtctacctcgccgccgtcctcgagtacctcgcagcagaggtgctggagctggccgggaacgccgccaaggacaacaagaagagccgcatcgtgcccaggcacctgctgctggccatccgcaacgaccaggagctcgggaggctgctgtccggcgtcaccatcgcccacggcggcgtcatccccaacatcaacccggtgctgctccccaagaaggccgccgagaaggctgagaaggccgagaagaccgccaccaagtcgcccaagaaggccaccaagtcccccaagaaggccaccaaggcgtagatctggctccgagcgcccgtgccggtgaactggactgatggtgctccgtcagccctcgtgtgcctagtgtctctgtgttaagttagctgtggtgtgttccagagtgtgttgaagcttgttcttttgctttgccccgccatgtaaccgtgaacgaagaggaagcgtcttgcttcctctgttctgctatatcaatctggtttctaatgcagtgttgt

SEQ ID NO: 111408 - protein, 181 aa, Zea mays subsp. mays
  misc_feature (1)..(181): Ceres Seq. ID no. 12635417
  misc_feature (31)..(152): Pfam Name: Core histone H2A/H2B/H3/H4 Pfam Description: Core histone H2A/H2B/H3/H4
  misc_feature (27)..(178): Homolog of NCBI NO: 15241857 NR Description: putative protein
  misc_feature (35)..(177): Homolog of NCBI NO: 1076776 NR Description: histone H2A.2 - wheat
  misc_feature (27)..(171): Homolog of NCBI NO: 122003 NR Description: HISTONE H2A
  misc_feature (35)..(181): Homolog of NCBI NO: 1076777 NR Description: histone H2A.3 - wheat
  misc_feature (31)..(178): Homolog of NCBI NO: 122007 NR Description: Histone H2A
  misc_feature (27)..(178): Homolog of NCBI NO: 7649159 NR Description: histone H2A [Euphorbia esula]
  misc_feature (29)..(178): Homolog of NCBI NO: 34914498 NR Description: putative histone H2A [Oryza sativa (japonica
  misc_feature (29)..(178): Homolog of NCBI NO: 729671 NR Description: Histone H2A
  misc_feature (27)..(178): Homolog of NCBI NO: 121982 NR Description: HISTONE H2A.2.2
  misc_feature (27)..(178): Homolog of NCBI NO: 121974 NR Description: HISTONE H2A.2.1
LNRTTAQLPPTPKPSRRSPSNPPASKMDGSKAKKVAAKKFGGPRKKSVTKSIKAGLQFPVGRIGRYLKKGRYAQRVGSGAPVYLAAVLEYLAAEVLELAGNAAKDNKKSRIVPRHLLLAIRNDQELGRLLSGVTIAHGGVIPNINPVLLPKKAAEKAEKAEKTATKSPKKATKSPKKATKA

SEQ ID NO: 111409 - protein, 157 aa, Zea mays subsp. mays
  misc_feature (1)..(157): Ceres Seq. ID no. 12635418
PQPHHSSAPTHSQTLSPEPQQPASKQDGRQQGEEGGGEEVRRAEEEVGDQVHQGRAPVPRRPHRALPQEGPLRPARRLRRPRLPRRRPRVPRSRGAGAGRERRQGQQEEPHRAQAPAAGHPQRPGAREAAVRRHHRPRRRHPQHQPGAAPQEGRREG

SEQ ID NO: 111410 - protein, 155 aa, Zea mays subsp. mays
  misc_feature (1)..(155): Ceres Seq. ID no. 12635419
  misc_feature (5)..(126): Pfam Name: Core histone H2A/H2B/H3/H4 Pfam Description: Core histone H2A/H2B/H3/H4
  misc_feature (1)..(152): Homolog of NCBI NO: 15241857 NR Description: putative protein
  misc_feature (9)..(151): Homolog of NCBI NO: 1076776 NR Description: histone H2A.2 - wheat
  misc_feature (1)..(145): Homolog of NCBI NO: 122003 NR Description: HISTONE H2A
  misc_feature (9)..(155): Homolog of NCBI NO: 1076777 NR Description: histone H2A.3 - wheat
  misc_feature (5)..(152): Homolog of NCBI NO: 122007 NR Description: Histone H2A
  misc_feature (1)..(152): Homolog of NCBI NO: 7649159 NR Description: histone H2A [Euphorbia esula]
  misc_feature (3)..(152): Homolog of NCBI NO: 34914498 NR Description: putative histone H2A [Oryza sativa (japonica
  misc_feature (3)..(152): Homolog of NCBI NO: 729671 NR Description: Histone H2A
  misc_feature (1)..(152): Homolog of NCBI NO: 121982 NR Description: HISTONE H2A.2.2
  misc_feature (1)..(152): Homolog of NCBI NO: 121974 NR Description: HISTONE H2A.2.1
MDGSKAKKVAAKKFGGPRKKSVTKSIKAGLQFPVGRIGRYLKKGRYAQRVGSGAPVYLAAVLEYLAAEVLELAGNAAKDNKKSRIVPRHLLLAIRNDQELGRLLSGVTIAHGGVIPNINPVLLPKKAAEKAEKAEKTATKSPKKATKSPKKATKA

SEQ ID NO: 111411 - DNA, 811 bp, Zea mays subsp. mays
  misc_feature (1)..(811): Ceres Seq. ID no. 12635917
atcttcctcaattctccaattcccagatctgttagggatttcaaaaagagccatggagaatgggaaaagagacagagacgacatggaagtgcaaccctcccctagaaagccacgtgtactcctcgcagcaagcggaagcgtcgccgccatcaaattcggcaacctctgccactgcttcacagaatgggcggaagtgagagccgtcgtctcgaagtcgtctctccacttcctcgacaagctctctctcccaccggaagtgactctctacacagacgaagaagagtggtcgagctggaacaagatcggcgatcccgtgcttcacatcgagctcagacgctgggctgacgtcatggtcatcgctcctttgtctgctaacactttagccaagatagctggtgggatgtgtgataatcttctgacttgtatcataagagcttgggattatagcaaaccgctttttgttgcgccggctatgaatactttgatgtggaacaatccttttacggagaggcatcttttgtcgcttgatgagcttgggatcacactcattcctccgatcaagaagaggttggcttgtggtgactatggtaatggcgcgatggctgagccgtctcttatctattctactgttagactcttttgggagtctcagggtcatcagcaaagtggtggtggaactagttaaaaaccatggtctaatggttggttctgttttcagtgtcatagattgttctgtctgtactgctttgtgtttgtatatgttaagaacagctgtctggattgatgtctcttaactaccattttcactgtc

SEQ ID NO: 111412 - protein, 227 aa, Zea mays subsp. mays
  misc_feature (1)..(227): Ceres Seq. ID no. 12635918
  misc_feature (37)..(157): Pfam Name: Flavoprotein Pfam Description: Flavoprotein
  misc_feature (32)..(222): Homolog of NCBI NO: 28849879 NR Description: RIKEN cDNA 8430432M10 [Mus musculus]
  misc_feature (32)..(222): Homolog of NCBI NO: 34863489 NR Description: similar to RIKEN cDNA 8430432M10 [Rattus
  misc_feature (100)..(211): Homolog of NCBI NO: 12583571 NR Description: putative halotolerance protein HAL3 homolog
  misc_feature (19)..(216): Homolog of NCBI NO: 37590890 NR Description: Unknown (protein for MGC:73297) [Danio rerio]
  misc_feature (38)..(211): Homolog of NCBI NO: 40556079 NR Description: CNPV141 HAL3-like domain protein [Canarypox
  misc_feature (38)..(211): Homolog of NCBI NO: 9634784 NR Description: ORF FPV114 HAL3 domain [Fowlpox virus]
  misc_feature (27)..(224): Homolog of NCBI NO: 13124308 NR Description: Halotolerance protein Hal3b
  misc_feature (27)..(224): Homolog of NCBI NO: 8778701 NR Description: T1N15.24 [Arabidopsis thaliana]
  misc_feature (18)..(224): Homolog of NCBI NO: 28948673 NR Description: Chain A, Ppc Decarboxylase Mutant C175s
  misc_feature (18)..(224): Homolog of NCBI NO: 15229569 NR Description: HAL3A protein; protein id: At3g18030.1
SSSILQFPDLLGISKRAMENGKRDRDDMEVQPSPRKPRVLLAASGSVAAIKFGNLCHCFTEWAEVRAVVSKSSLHFLDKLSLPPEVTLYTDEEEWSSWNKIGDPVLHIELRRWADVMVIAPLSANTLAKIAGGMCDNLLTCIIRAWDYSKPLFVAPAMNTLMWNNPFTERHLLSLDELGITLIPPIKKRLACGDYGNGAMAEPSLIYSTVRLFWESQGHQQSGGGTS

SEQ ID NO: 111413 - protein, 210 aa, Zea mays subsp. mays
  misc_feature (1)..(210): Ceres Seq. ID no. 12635919
  misc_feature (20)..(140): Pfam Name: Flavoprotein Pfam Description: Flavoprotein
  misc_feature (15)..(205): Homolog of NCBI NO: 28849879 NR Description: RIKEN cDNA 8430432M10 [Mus musculus]
  misc_feature (15)..(205): Homolog of NCBI NO: 34863489 NR Description: similar to RIKEN cDNA 8430432M10 [Rattus
  misc_feature (83)..(194): Homolog of NCBI NO: 12583571 NR Description: putative halotolerance protein HAL3 homolog
  misc_feature (2)..(199): Homolog of NCBI NO: 37590890 NR Description: Unknown (protein for MGC:73297) [Danio rerio]
  misc_feature (21)..(194): Homolog of NCBI NO: 40556079 NR Description: CNPV141 HAL3-like domain protein [Canarypox
  misc_feature (21)..(194): Homolog of NCBI NO: 9634784 NR Description: ORF FPV114 HAL3 domain [Fowlpox virus]
  misc_feature (10)..(207): Homolog of NCBI NO: 13124308 NR Description: Halotolerance protein Hal3b
  misc_feature (10)..(207): Homolog of NCBI NO: 8778701 NR Description: T1N15.24 [Arabidopsis thaliana]
  misc_feature (1)..(207): Homolog of NCBI NO: 28948673 NR Description: Chain A, Ppc Decarboxylase Mutant C175s
  misc_feature (1)..(207): Homolog of NCBI NO: 15229569 NR Description: HAL3A protein; protein id: At3g18030.1
MENGKRDRDDMEVQPSPRKPRVLLAASGSVAAIKFGNLCHCFTEWAEVRAVVSKSSLHFLDKLSLPPEVTLYTDEEEWSSWNKIGDPVLHIELRRWADVMVIAPLSANTLAKIAGGMCDNLLTCIIRAWDYSKPLFVAPAMNTLMWNNPFTERHLLSLDELGITLIPPIKKRLACGDYGNGAMAEPSLIYSTVRLFWESQGHQQSGGGTS

SEQ ID NO: 111414 - protein, 200 aa, Zea mays subsp. mays
  misc_feature (1)..(200): Ceres Seq. ID no. 12635920
  misc_feature (10)..(130): Pfam Name: Flavoprotein Pfam Description: Flavoprotein
  misc_feature (5)..(195): Homolog of NCBI NO: 28849879 NR Description: RIKEN cDNA 8430432M10 [Mus musculus]
  misc_feature (5)..(195): Homolog of NCBI NO: 34863489 NR Description: similar to RIKEN cDNA 8430432M10 [Rattus
  misc_feature (73)..(184): Homolog of NCBI NO: 12583571 NR Description: putative halotolerance protein HAL3 homolog
  misc_feature (1)..(189): Homolog of NCBI NO: 37590890 NR Description: Unknown (protein for MGC:73297) [Danio rerio]
  misc_feature (11)..(184): Homolog of NCBI NO: 40556079 NR Description: CNPV141 HAL3-like domain protein [Canarypox
  misc_feature (11)..(184): Homolog of NCBI NO: 9634784 NR Description: ORF FPV114 HAL3 domain [Fowlpox virus]
  misc_feature (1)..(197): Homolog of NCBI NO: 13124308 NR Description: Halotolerance protein Hal3b
  misc_feature (1)..(197): Homolog of NCBI NO: 8778701 NR Description: T1N15.24 [Arabidopsis thaliana]
  misc_feature (1)..(197): Homolog of NCBI NO: 28948673 NR Description: Chain A, Ppc Decarboxylase Mutant C175s
  misc_feature (1)..(197): Homolog of NCBI NO: 15229569 NR Description: HAL3A protein; protein id: At3g18030.1
MEVQPSPRKPRVLLAASGSVAAIKFGNLCHCFTEWAEVRAVVSKSSLHFLDKLSLPPEVTLYTDEEEWSSWNKIGDPVLHIELRRWADVMVIAPLSANTLAKIAGGMCDNLLTCIIRAWDYSKPLFVAPAMNTLMWNNPFTERHLLSLDELGITLIPPIKKRLACGDYGNGAMAEPSLIYSTVRLFWESQGHQQSGGGTS

SEQ ID NO: 111415 - DNA, 639 bp, Zea mays subsp. mays
  misc_feature (1)..(639): Ceres Seq. ID no. 12635845
agattgggctgatcgctcagcgagtcaagtttgattttctccgggagagagagagatcgtttgattcttccgatggaggaggagatcggagggagggaggatagatggaagggatcgttagagaacataacggagatggcttcgaatctcgattctctacagaagcttctcctcaagaaagctgtcttcgttgaagaagacactttcgctagagcttctctagtctccgaacaaggtcgagcaatcaaggtacttgagcaaagggtacaaacactagaaagagaactagatgctgccattacagctgctgctcatgctcggtctgagaaacgccacgctgagtcttctcaaaaagctgctgagtcacgtgcgcaagaggttacaaaagagcttgaaaacaccacaaaggttttcaagctgcatatggaagagctccgaggtatgcaagaacagatatccaaacgcgataacgagattaagctcttggaatctataatccaaacgctcggcgggaaagagcggttgggaaaaagcggtgtgagtggatgatgcgttttttcacttgtagaaattttgtaagcttagtttgtgagacagtttatgtatgacaatgatactcctcttccaagataaaatatt

SEQ ID NO: 111416 - protein, 158 aa, Zea mays subsp. mays
  misc_feature (1)..(158): Ceres Seq. ID no. 12635846
  misc_feature (1)..(158): Homolog of NCBI NO: 21553794 NR Description: unknown [Arabidopsis thaliana]
  misc_feature (1)..(158): Homolog of NCBI NO: 15237639 NR Description: putative protein
MEEEIGGREDRWKGSLENITEMASNLDSLQKLLLKKAVFVEEDTFARASLVSEQGRAIKVLEQRVQTLERELDAAITAAAHARSEKRHAESSQKAAESRAQEVTKELENTTKVFKLHMEELRGMQEQISKRDNEIKLLESIIQTLGGKERLGKSGVSG

SEQ ID NO: 111417 - protein, 137 aa, Zea mays subsp. mays
  misc_feature (1)..(137): Ceres Seq. ID no. 12635847
  misc_feature (1)..(137): Homolog of NCBI NO: 21553794 NR Description: unknown [Arabidopsis thaliana]
  misc_feature (1)..(137): Homolog of NCBI NO: 15237639 NR Description: putative protein
MASNLDSLQKLLLKKAVFVEEDTFARASLVSEQGRAIKVLEQRVQTLERELDAAITAAAHARSEKRHAESSQKAAESRAQEVTKELENTTKVFKLHMEELRGMQEQISKRDNEIKLLESIIQTLGGKERLGKSGVSG

SEQ ID NO: 111418 - DNA, 953 bp, Zea mays subsp. mays
  misc_feature (1)..(953): Ceres Seq. ID no. 13599613
aggaaataatatacaaaatcaaaggttaagaaaaaaaatgggtgaggagaagaatcagcagcacttcgtgctagtacatggtgcatgccacggcgcgtggtgctggaacaaggttaagccgcttctcgaggcctccggccaccgcgtaaccgccttagacctagctgcttcgggtatagacacaaccaggtctatcactgagatctccacatgcgaacaatactctgagccattgatacagctaatcgcctcattaccaagtgatgagaaggttgtgctcgttggtcatagctttggagggttcagcttagccatggccatggataagtttccagacaaaatctctgtctcagtcttcgtgactgctttcatgcccgataccaaacactcaccatcgttcgtcgtggataagtttaaacgggatacgccaccagaagcatggttgggctcggagttcaaatcatatggctcagacaattccggtgtgtcaatgtctttcagcactgagttcatgaagcacgctctctatcaactttctcctgttgaggatattgagcttggattgcttttaaagaggcccggatcattgttcatcaacgatttatccaaggtggagaacttttcggacaaagggtatggatctgttcctcgagcttacattgtgtgcaaagaggacaaaacaattacaaaagaaattcagtggtggatgatcgataattatccgacgaaagtagtgaaggagatggaggacacagatcatatgccaatgttctgcaagcctcagttactaagtgactatctcttggaaatcgcggaaaaattagcttaaattatcttgttatgaaaatgtatttggatacaaataagtgttgtcctgcaaatgggtctttctaaagatcaagacttttatcgcgttcaaatgtttgacataatttaaaataaacttaacagtc

SEQ ID NO: 111419 - protein, 275 aa, Zea mays subsp. mays
  misc_feature (1)..(275): Ceres Seq. ID no. 15218860
  misc_feature (47)..(268): Pfam Name: alpha/beta hydrolase fold Pfam Description: alpha/beta hydrolase fold
  misc_feature (15)..(275): Homolog of NCBI NO: 15227861 NR Description: hydrolase, alpha/beta fold family [Arabidopsis
  misc_feature (13)..(273): Homolog of NCBI NO: 27754457 NR Description: putative acetone-cyanohydrin lyase [Arabidopsis
  misc_feature (13)..(273): Homolog of NCBI NO: 15227867 NR Description: esterase, putative [Arabidopsis thaliana]
  misc_feature (15)..(275): Homolog of NCBI NO: 15227859 NR Description: hydrolase, alpha/beta fold family [Arabidopsis
  misc_feature (19)..(275): Homolog of NCBI NO: 14279437 NR Description: ethylene-induced esterase [Citrus sinensis]
  misc_feature (13)..(275): Homolog of NCBI NO: 15227865 NR Description: esterase, putative [Arabidopsis thaliana]
  misc_feature (17)..(273): Homolog of NCBI NO: 40549303 NR Description: salicylic acid-binding protein 2 [Nicotiana
  misc_feature (17)..(272): Homolog of NCBI NO: 6651393 NR Description: polyneuridine aldehyde esterase [Rauvolfia
  misc_feature (13)..(275): Homolog of NCBI NO: 21554666 NR Description: putative acetone-cyanohydrin lyase [Arabidopsis
  misc_feature (13)..(272): Homolog of NCBI NO: 15227863 NR Description: hydrolase, alpha/beta fold family [Arabidopsis
GNNIQNQRLRKKMGEEKNQQHFVLVHGACHGAWCWNKVKPLLEASGHRVTALDLAASGIDTTRSITEISTCEQYSEPLIQLIASLPSDEKVVLVGHSFGGFSLAMAMDKFPDKISVSVFVTAFMPDTKHSPSFVVDKFKRDTPPEAWLGSEFKSYGSDNSGVSMSFSTEFMKHALYQLSPVEDIELGLLLKRPGSLFINDLSKVENFSDKGYGSVPRAYIVCKEDKTITKEIQWWMIDNYPTKVVKEMEDTDHMPMFCKPQLLSDYLLEIAEKLA

SEQ ID NO: 111420 - protein, 263 aa, Zea mays subsp. mays
  misc_feature (1)..(263): Ceres Seq. ID no. 15218861
  misc_feature (35)..(256): Pfam Name: alpha/beta hydrolase fold Pfam Description: alpha/beta hydrolase fold
  misc_feature (5)..(260): Homolog of NCBI NO: 6651393 NR Description: polyneuridine aldehyde esterase [Rauvolfia
  misc_feature (3)..(263): Homolog of NCBI NO: 15227859 NR Description: hydrolase, alpha/beta fold family [Arabidopsis
  misc_feature (5)..(261): Homolog of NCBI NO: 40549303 NR Description: salicylic acid-binding protein 2 [Nicotiana
  misc_feature (7)..(263): Homolog of NCBI NO: 14279437 NR Description: ethylene-induced esterase [Citrus sinensis]
  misc_feature (1)..(263): Homolog of NCBI NO: 15227865 NR Description: esterase, putative [Arabidopsis thaliana]
  misc_feature (3)..(263): Homolog of NCBI NO: 15227861 NR Description: hydrolase, alpha/beta fold family [Arabidopsis
  misc_feature (1)..(261): Homolog of NCBI NO: 27754457 NR Description: putative acetone-cyanohydrin lyase [Arabidopsis
  misc_feature (1)..(261): Homolog of NCBI NO: 15227867 NR Description: esterase, putative [Arabidopsis thaliana]
  misc_feature (1)..(263): Homolog of NCBI NO: 21554666 NR Description: putative acetone-cyanohydrin lyase [Arabidopsis
  misc_feature (1)..(260): Homolog of NCBI NO: 15227863 NR Description: hydrolase, alpha/beta fold family [Arabidopsis
MGEEKNQQHFVLVHGACHGAWCWNKVKPLLEASGHRVTALDLAASGIDTTRSITEISTCEQYSEPLIQLIASLPSDEKVVLVGHSFGGFSLAMAMDKFPDKISVSVFVTAFMPDTKHSPSFVVDKFKRDTPPEAWLGSEFKSYGSDNSGVSMSFSTEFMKHALYQLSPVEDIELGLLLKRPGSLFINDLSKVENFSDKGYGSVPRAYIVCKEDKTITKEIQWWMIDNYPTKVVKEMEDTDHMPMFCKPQLLSDYLLEIAEKLA

SEQ ID NO: 111421 - protein, 171 aa, Zea mays subsp. mays
  misc_feature (1)..(171): Ceres Seq. ID no. 15218862
  misc_feature (1)..(164): Pfam Name: alpha/beta hydrolase fold Pfam Description: alpha/beta hydrolase fold
  misc_feature (1)..(168): Homolog of NCBI NO: 6651393 NR Description: polyneuridine aldehyde esterase [Rauvolfia
  misc_feature (1)..(171): Homolog of NCBI NO: 15227859 NR Description: hydrolase, alpha/beta fold family [Arabidopsis
  misc_feature (1)..(169): Homolog of NCBI NO: 40549303 NR Description: salicylic acid-binding protein 2 [Nicotiana
  misc_feature (1)..(171): Homolog of NCBI NO: 14279437 NR Description: ethylene-induced esterase [Citrus sinensis]
  misc_feature (1)..(171): Homolog of NCBI NO: 15227865 NR Description: esterase, putative [Arabidopsis thaliana]
  misc_feature (1)..(171): Homolog of NCBI NO: 15227861 NR Description: hydrolase, alpha/beta fold family [Arabidopsis
  misc_feature (1)..(169): Homolog of NCBI NO: 27754457 NR Description: putative acetone-cyanohydrin lyase [Arabidopsis
  misc_feature (1)..(169): Homolog of NCBI NO: 15227867 NR Description: esterase, putative [Arabidopsis thaliana]
  misc_feature (1)..(171): Homolog of NCBI NO: 21554666 NR Description: putative acetone-cyanohydrin lyase [Arabidopsis
  misc_feature (1)..(168): Homolog of NCBI NO: 15227863 NR Description: hydrolase, alpha/beta fold family [Arabidopsis
MAMDKFPDKISVSVFVTAFMPDTKHSPSFVVDKFKRDTPPEAWLGSEFKSYGSDNSGVSMSFSTEFMKHALYQLSPVEDIELGLLLKRPGSLFINDLSKVENFSDKGYGSVPRAYIVCKEDKTITKEIQWWMIDNYPTKVVKEMEDTDHMPMFCKPQLLSDYLLEIAEKLA

SEQ ID NO: 111422 - DNA, 699 bp, Zea mays subsp. mays
  misc_feature (1)..(699): Ceres Seq. ID no. 13599435
aaaaacacacaaagctcatcgagagaagattcagacatttcatagcttctttattccttcccgaaggggtaccctgagatcacaaaggataacaaacaatgggcaagggagttgcagtcttgaacagcagtgagggtgttaaggggactatcttcttcacccaggaaggagacggtgtgaccactgtgactggaacagtttctggacttaaacctggtctacatggtttccatgtccatgctcttggtgacaccactaacggttgcatgtccaccggtccacatttcaaccctgatggtaaacaacacggtgccccagaggatgctaatcgtcatgctggagatctaggaaacatcattgttggagatgatggaactgccaccttcacaatcactgactgccagattcctcttagtggaccaaactctattgtcggaagggctgttgttgtccacgcagaccctgatgacctcggaaagggaggccatgaactcagcttggctaccggaaacgcaggcgggcgtgttgcttgtggtattattggtcttcagggctaagtaagctgttacttatcgaggaagggagtgatgcaataaggaggtcatatacctctagacctggctagtttgtgtgtgtatctgtgtgtactgtgtgtgtggctataatctctcctttgtggctcaatacattttatttaag

SEQ ID NO: 111423 - protein, 152 aa, Zea mays subsp. mays
  misc_feature (1)..(152): Ceres Seq. ID no. 13599436
  misc_feature (1)..(152): Pfam Name: Copper/zinc superoxide dismutase (SODC) Pfam Description: Copper/zinc superoxide dismutase (SODC)
  misc_feature (1)..(152): Homolog of NCBI NO: 134628 NR Description: Superoxide dismutase [Cu-Zn]
  misc_feature (1)..(152): Homolog of NCBI NO: 4102861 NR Description: copper/zinc-superoxide dismutase [Populus
  misc_feature (1)..(146): Homolog of NCBI NO: 9802567 NR Description: F22O13.32 [Arabidopsis thaliana]
  misc_feature (3)..(152): Homolog of NCBI NO: 134602 NR Description: SUPEROXIDE DISMUTASE [CU-ZN]
  misc_feature (1)..(152): Homolog of NCBI NO: 12230586 NR Description: Superoxide dismutase [Cu-Zn] 1
  misc_feature (1)..(152): Homolog of NCBI NO: 3288850 NR Description: cytosolic Cu/Zn superoxide dismutase
  misc_feature (1)..(152): Homolog of NCBI NO: 2305111 NR Description: Cu/Zn superoxide dismutase [Raphanus sativus]
  misc_feature (1)..(152): Homolog of NCBI NO: 12230587 NR Description: Superoxide dismutase [Cu-Zn] 2
  misc_feature (1)..(152): Homolog of NCBI NO: 15223944 NR Description: copper/zinc superoxidase dismutase (CSD1)
  misc_feature (1)..(152): Homolog of NCBI NO: 24421235 NR Description: superoxide dismutase [Brassica juncea]
MGKGVAVLNSSEGVKGTIFFTQEGDGVTTVTGTVSGLKPGLHGFHVHALGDTTNGCMSTGPHFNPDGKQHGAPEDANRHAGDLGNIIVGDDGTATFTITDCQIPLSGPNSIVGRAVVVHADPDDLGKGGHELSLATGNAGGRVACGIIGLQG

SEQ ID NO: 111424 - protein, 96 aa, Zea mays subsp. mays
  misc_feature (1)..(96): Ceres Seq. ID no. 13599437
  misc_feature (1)..(96): Pfam Name: Copper/zinc superoxide dismutase (SODC) Pfam Description: Copper/zinc superoxide dismutase (SODC)
  misc_feature (1)..(96): Homolog of NCBI NO: 134628 NR Description: Superoxide dismutase [Cu-Zn]
  misc_feature (1)..(96): Homolog of NCBI NO: 4102861 NR Description: copper/zinc-superoxide dismutase [Populus
  misc_feature (1)..(90): Homolog of NCBI NO: 9802567 NR Description: F22O13.32 [Arabidopsis thaliana]
  misc_feature (1)..(96): Homolog of NCBI NO: 134602 NR Description: SUPEROXIDE DISMUTASE [CU-ZN]
  misc_feature (1)..(96): Homolog of NCBI NO: 12230586 NR Description: Superoxide dismutase [Cu-Zn] 1
  misc_feature (1)..(96): Homolog of NCBI NO: 3288850 NR Description: cytosolic Cu/Zn superoxide dismutase
  misc_feature (1)..(96): Homolog of NCBI NO: 2305111 NR Description: Cu/Zn superoxide dismutase [Raphanus sativus]
  misc_feature (1)..(96): Homolog of NCBI NO: 12230587 NR Description: Superoxide dismutase [Cu-Zn] 2
  misc_feature (1)..(96): Homolog of NCBI NO: 15223944 NR Description: copper/zinc superoxidase dismutase (CSD1)
  misc_feature (1)..(96): Homolog of NCBI NO: 24421235 NR Description: superoxide dismutase [Brassica juncea]
MSTGPHFNPDGKQHGAPEDANRHAGDLGNIIVGDDGTATFTITDCQIPLSGPNSIVGRAVVVHADPDDLGKGGHELSLATGNAGGRVACGIIGLQG

SEQ ID NO: 111425 - DNA, 387 bp, Zea mays subsp. mays
  misc_feature (1)..(387): Ceres Seq. ID no. 13587093
cattgtcccntcaaactcgctnctggcctcgggcccgcccgtcgtgaggtccgagctcgatgcagccgatccggcggcgscaccgaggctttgcactcctctgtctctccgccgccctcctcgctgccgccactctgctccccggcgccgccgtcgcngaaggtgtcamgccctccgaggcgcgccggctccgcgacgaggtgaaagatatgttytatcatgcgtttgatggatacatgaagtatgctttcccactcgatgagctgcggcccttaagttgccaaggtgaagactcccttggtggttatgcgctcactcttatcgattctttggatacyttggctttactgggtgatmaggagaamtttggtgctgctgtggagtggg

SEQ ID NO: 111426 - protein, 109 aa, Zea mays subsp. mays
  misc_feature (1)..(109): Ceres Seq. ID no. 13587094
  misc_feature (51)..(108): Pfam Name: Glycosyl hydrolase family 47 Pfam Description: Glycosyl hydrolase family 47
  misc_feature (26)..(108): Homolog of NCBI NO: 26344459 NR Description: unnamed protein product [Mus musculus]
  misc_feature (26)..(108): Homolog of NCBI NO: 26348657 NR Description: unnamed protein product [Mus musculus]
  misc_feature (26)..(108): Homolog of NCBI NO: 21704058 NR Description: putative alpha-mannosidase [Mus musculus]
  misc_feature (26)..(108): Homolog of NCBI NO: 34859116 NR Description: similar to putative alpha-mannosidase [Rattus
  misc_feature (11)..(108): Homolog of NCBI NO: 12655043 NR Description: hypothetical protein FLJ10783 [Homo sapiens]
  misc_feature (11)..(108): Homolog of NCBI NO: 17368685 NR Description: Putative alpha-mannosidase C20orf31 precursor
  misc_feature (11)..(108): Homolog of NCBI NO: 8922667 NR Description: chromosome 20 open reading frame 31 [Homo
  misc_feature (11)..(108): Homolog of NCBI NO: 11190553 NR Description: bA42O4.1 (novel glycosyl hydrolase family 47
  misc_feature (13)..(108): Homolog of NCBI NO: 15239952 NR Description: glycoside hydrolase family 47 [Arabidopsis
  misc_feature (1)..(108): Homolog of NCBI NO: 34909972 NR Description: P0490D09.10 [Oryza sativa (japonica
MQPIRRXHRGFALLCLSAALLAAATLLPGAAVXEGVXPSEARRLRDEVKDMXYHAFDGYMKYAFPLDELRPLSCQGEDSLGGYALTLIDSLDXLALLGDXEXFGAAVEW

SEQ ID NO: 111427 - protein, 75 aa, Zea mays subsp. mays
  misc_feature (1)..(75): Ceres Seq. ID no. 13587095
IVXSNSXLASGPPVVRSELDAADPAAXPRLCTPLSLRRPPRCRHSAPRRRRRXRCXALRGAPAPRRGERYVXSCV

SEQ ID NO: 111428 - protein, 67 aa, Zea mays subsp. mays
  misc_feature (1)..(67): Ceres Seq. ID no. 13587096
HCPXKLAXGLGPARREVRARCSRSGGXTEALHSSVSPPPSSLPPLCSPAPPSXKVSXPPRRAGSATR

SEQ ID NO: 111429 - DNA, 962 bp, Zea mays subsp. mays
  misc_feature (1)..(962): Ceres Seq. ID no. 13599417
  misc_feature: MA Experiment ID: 108530 Result: Up-regulated in Transcription
  misc_feature: MA Experiment 108530 PARAMETER Experiment Name: Zm_Imbibed_Seeds_P Parameter: Age (day) Value: 6 vs. 2
  misc_feature: MA Experiment 108530 PARAMETER Experiment Name: Zm_Imbibed_Seeds_P Parameter: Organism Value: Zea mays
  misc_feature: MA Experiment 108530 PARAMETER Experiment Name: Zm_Imbibed_Seeds_P Parameter: Plant Line Value: 35A19
  misc_feature: MA Experiment 108530 PARAMETER Experiment Name: Zm_Imbibed_Seeds_P Parameter: Tissue Value: Aerial vs. Embryo
attttcccttgttcgagttttctcaggaaagctagtagagagagatactggttttgattcatacgatggctgccacagctattctccgatcgatccgccgacgcgacgtcgtctctgcgcctctttccgtctacaaatctcttgctggtaatgctcaaccttcattgggttcgtacactggtcagaactatgtaagtttgtgtagagctttcggatcgagagccggtgtgaatgaaaatgttgggactggttttggaactagcaacataagcaatgccgttagagaggagagagagcattcaaaagctactgtgaatgctatgggagctcatctgagagctcttggtgtgggaacaccaagacgtgtgttgtctacaatcgccgagggtatcaagatgacagaggaggaccagacttctccaaaaccccaaagctttcgccctctatctcctcacctcacggtttaccagcctcagaagaactcaatgttatccattttcaacagaatctcggggatttacttgaccggagtcttttatggcggctatcttctctacctgaagatgggtatgatctgcctcacttacccggctttctaccaagttcattaccatgtacagcagcaacttccggttatcacctcggttactgcattggccgcgctttaccatactatcaagagtattcactcgctcttgacccattgaagcaacatttcccctaagctcttttcgttgtttggttaagccaccagagtctccagtaagagtttccttgagatgcacaagatttaataaaagagagttagaaacgtttgttaaactctcattgtcttttgagaaagcaagtgtctagcttttgttttgggattttaggctttgaaaacttatgtttgttggctttttctttgttctaagaccttattgatggggttggaatgtaataaaatgtttaccagttct

SEQ ID NO: 111430 - protein, 213 aa, Zea mays subsp. mays
  misc_feature (1)..(213): Ceres Seq. ID no. 15218604
  misc_feature (1)..(213): Homolog of NCBI NO: 21593777 NR Description: unknown [Arabidopsis thaliana]
  misc_feature (1)..(213): Homolog of NCBI NO: 15242460 NR Description: expressed protein [Arabidopsis thaliana]
  misc_feature (1)..(213): Homolog of NCBI NO: 15236709 NR Description: expressed protein [Arabidopsis thaliana]
  misc_feature (1)..(213): Homolog of NCBI NO: 11022654 NR Description: gene_id:MTH16.1~pir||T05407~strong similarity to
MAATAILRSIRRRDVVSAPLSVYKSLAGNAQPSLGSYTGQNYVSLCRAFGSRAGVNENVGTGFGTSNISNAVREEREHSKATVNAMGAHLRALGVGTPRRVLSTIAEGIKMTEEDQTSPKPQSFRPLSPHLTVYQPQKNSMLSIFNRISGIYLTGVFYGGYLLYLKMGMICLTYPAFYQVHYHVQQQLPVITSVTALAALYHTIKSIHSLLTH

SEQ ID NO: 111431 - protein, 128 aa, Zea mays subsp. mays; identical to SEQ ID NO: 56252
  misc_feature (1)..(128): Ceres Seq. ID no. 15218605
  misc_feature (1)..(128): Homolog of NCBI NO: 21593777 NR Description: unknown [Arabidopsis thaliana]
  misc_feature (1)..(128): Homolog of NCBI NO: 15242460 NR Description: expressed protein [Arabidopsis thaliana]
  misc_feature (1)..(128): Homolog of NCBI NO: 15236709 NR Description: expressed protein [Arabidopsis thaliana]
  misc_feature (1)..(128): Homolog of NCBI NO: 11022654 NR Description: gene_id:MTH16.1~pir||T05407~strong similarity to

SEQ ID NO: 111432 - DNA, 982 bp, Zea mays subsp. mays
  misc_feature (1)..(982): Ceres Seq. ID no. 13624608
aattatcacaccactctctccctctcctcctttatattttagttatggccaagattggtttgaaacccgatccagttaacaataatgccaaggagattcgttacagaggcgttaggaagaggccatggggccgttatgccgcggagatccgagatccgggtaagaaaacccgggtctggcttggtactttcgataccgccgaagaggcggcgcgtgcttacgatgcggcggcgcgtgatttccgaggggccaaggctaagaccaatttccccaattttctcgagctgagtgagaagatgccggctgccggcggcggtttcgagcgtagcccaagccagagcagcacccttgactgcgattctcctccggcggcggttacgccggcgagtgctgggattgttccgccgcagctcgagcttcgcctcggcggctatcagatcccgatggcgcgtcctatttactttttggacgttatgggagtaggcaacggaggtcgtgctcagcctccggtggcgtcagcttttaggtcgccggtggcttgtgtggctcagagcgactctgattcgtcgtcggttgttgatttcgaaggtgtgatggagaagagatctcagctgtttgatctagatctaaacttgtctcctccgtcggaacaggcctgaacttatcgaaggtggtcgtggtcgtgttcatttccgacgcgcatgcgttttttttttgtttgggagctgagagaattcgtattctcgttagttttttattctctctcactctagaataattattattatcggtttaaaaaaaaaaagtttatcgggagagagaatataattttagctgacatggatcgttatgtacatattattacataactggagatctgaacttttgttgtgtgcttttttgcgacttggtttcaccttgttgttcctctatctgtagcctttaattttgttattgcaaattttatatcaataatttggtg

SEQ ID NO: 111433 - protein, 218 aa, Zea mays subsp. mays
  misc_feature (1)..(218): Ceres Seq. ID no. 13624609
  misc_feature (31)..(95): Pfam Name: AP2 domain Pfam Description: AP2 domain
  misc_feature (25)..(143): Homolog of NCBI NO: 4099921 NR Description: EREBP-3 homolog [Stylosanthes hamata]
  misc_feature (26)..(151): Homolog of NCBI NO: 4099914 NR Description: ethylene-responsive element binding protein
  misc_feature (18)..(157): Homolog of NCBI NO: 15219215 NR Description: ethylene responsive element binding factor 8
  misc_feature (31)..(218): Homolog of NCBI NO: 38345793 NR Description: OSJNBa0085I10.10 [Oryza sativa (japonica
  misc_feature (34)..(193): Homolog of NCBI NO: 34908900 NR Description: ethylene-responsive element binding factor 3
  misc_feature (25)..(214): Homolog of NCBI NO: 28274832 NR Description: ethylene response factor 3 [Lycopersicon
  misc_feature (25)..(214): Homolog of NCBI NO: 30526297 NR Description: ethylene response factor 2 [Lycopersicon
  misc_feature (15)..(216): Homolog of NCBI NO: 20340233 NR Description: ethylene responsive element binding factor 4-like
  misc_feature (15)..(203): Homolog of NCBI NO: 2281635 NR Description: AP2 domain containing protein RAP2.5 [Arabidopsis
  misc_feature (15)..(218): Homolog of NCBI NO: 15232526 NR Description: ethylene responsive element binding factor 4
LSHHSLPLLLYILVMAKIGLKPDPVNNNAKEIRYRGVRKRPWGRYAAEIRDPGKKTRVWLGTFDTAEEAARAYDAAARDFRGAKAKTNFPNFLELSEKMPAAGGGFERSPSQSSTLDCDSPPAAVTPASAGIVPPQLELRLGGYQIPMARPIYFLDVMGVGNGGRAQPPVASAFRSPVACVAQSDSDSSSVVDFEGVMEKRSQLFDLDLNLSPPSEQA

SEQ ID NO: 111434 - protein, 204 aa, Zea mays subsp. mays
  misc_feature (1)..(204): Ceres Seq. ID no. 13624610
  misc_feature (17)..(81): Pfam Name: AP2 domain Pfam Description: AP2 domain
  misc_feature (11)..(129): Homolog of NCBI NO: 4099921 NR Description: EREBP-3 homolog [Stylosanthes hamata]
  misc_feature (12)..(137): Homolog of NCBI NO: 4099914 NR Description: ethylene-responsive element binding protein
  misc_feature (4)..(143): Homolog of NCBI NO: 15219215 NR Description: ethylene responsive element binding factor 8
  misc_feature (17)..(204): Homolog of NCBI NO: 38345793 NR Description: OSJNBa0085I10.10 [Oryza sativa (japonica
  misc_feature (20)..(179): Homolog of NCBI NO: 34908900 NR Description: ethylene-responsive element binding factor 3
  misc_feature (11)..(200): Homolog of NCBI NO: 28274832 NR Description: ethylene response factor 3 [Lycopersicon
  misc_feature (11)..(200): Homolog of NCBI NO: 30526297 NR Description: ethylene response factor 2 [Lycopersicon
  misc_feature (1)..(202): Homolog of NCBI NO: 20340233 NR Description: ethylene responsive element binding factor 4-like
  misc_feature (1)..(189): Homolog of NCBI NO: 2281635 NR Description: AP2 domain containing protein RAP2.5 [Arabidopsis
  misc_feature (1)..(204): Homolog of NCBI NO: 15232526 NR Description: ethylene responsive element binding factor 4
MAKIGLKPDPVNNNAKEIRYRGVRKRPWGRYAAEIRDPGKKTRVWLGTFDTAEEAARAYDAAARDFRGAKAKTNFPNFLELSEKMPAAGGGFERSPSQSSTLDCDSPPAAVTPASAGIVPPQLELRLGGYQIPMARPIYFLDVMGVGNGGRAQPPVASAFRSPVACVAQSDSDSSSVVDFEGVMEKRSQLFDLDLNLSPPSEQA

SEQ ID NO: 111435 - protein, 120 aa, Zea mays subsp. mays
  misc_feature (1)..(120): Ceres Seq. ID no. 13624611
  misc_feature (1)..(120): Homolog of NCBI NO: 38345793 NR Description: OSJNBa0085I10.10 [Oryza sativa (japonica
  misc_feature (1)..(95): Homolog of NCBI NO: 34908900 NR Description: ethylene-responsive element binding factor 3
  misc_feature (1)..(116): Homolog of NCBI NO: 28274832 NR Description: ethylene response factor 3 [Lycopersicon
  misc_feature (1)..(116): Homolog of NCBI NO: 30526297 NR Description: ethylene response factor 2 [Lycopersicon
  misc_feature (1)..(118): Homolog of NCBI NO: 20340233 NR Description: ethylene responsive element binding factor 4-like
  misc_feature (1)..(105): Homolog of NCBI NO: 2281635 NR Description: AP2 domain containing protein RAP2.5 [Arabidopsis
  misc_feature (1)..(120): Homolog of NCBI NO: 15232526 NR Description: ethylene responsive element binding factor 4
  misc_feature (1)..(45): Homolog of NCBI NO: 4099921 NR Description: EREBP-3 homolog [Stylosanthes hamata]
  misc_feature (1)..(53): Homolog of NCBI NO: 4099914 NR Description: ethylene-responsive element binding protein
  misc_feature (1)..(59): Homolog of NCBI NO: 15219215 NR Description: ethylene responsive element binding factor 8
MPAAGGGFERSPSQSSTLDCDSPPAAVTPASAGIVPPQLELRLGGYQIPMARPIYFLDVMGVGNGGRAQPPVASAFRSPVACVAQSDSDSSSVVDFEGVMEKRSQLFDLDLNLSPPSEQA

SEQ ID NO: 111436 - DNA, 1265 bp, Zea mays subsp. mays
  misc_feature (1)..(1265): Ceres Seq. ID no. 13587235
tttatgaagtggagtttaaaacgagagataaaaaatgattaagccgctagagatagcctcaccggttgcatcatcgacaatcctgtacctctgtcagtctgtatcctttgcattctctggaacatgtatttcaaacgcaatcaacaatcgtgaatcgtgtgttccaaattgaaacacctgcagctgaggaacctcctgtggcctacttcgaagcacgacgtgtacctggtgcagagctactccgtgacgcactggtctgccctgctccggagaggaagagaggttctcaacgtggccggccggttggccccgacccagaacgtgaagggggctggaccgttgtcgagggttcagatcagcgctatggctgtgaaggacaacctcatggtggccggtggcttccagggagaactcatatgcaagtacgttgatagacccggggtggcattctgcaccagcctgaccggtggcagcagttccatcacgaacgccgtcgacatccaccaggcacccagcggcgccacgcgagtgatggcggcgaacaacgactgcgtcgtcaggacgttcgacgccgagagatacagccttctcacgcagctcaccttcccgtggtccgtcaacagcacgtcggtgagccccgacggcaagctgctggcggtcctgggcgacagcacggagtgcgtgttcgccgacccgcagtcgggcaaggcgctggcgacgctgcgcgggcacctggactactccttcgcgtcggcgtggcaccccgacagccgcgtcctggcgacggggaaccaggacgcgacgtgccggctgtgggacgcgcgcagcctgtcggagccgttcgccgtgctcggggcccggatcggcgccgtccggggcctccgcttctcccccgacggcaggttcctggccgcggccgaggccgccgacttcgtgcacgtgtacgacgccgcggccgggtacgccgacgccgcgcaggaggtggacgtgttcggggaggtcgccggcgccgcgttcagccccgacggcgaggcgctgttcgtgagcgtcgccgaccgtacctacggcggcctgctcgagttccggcgccggcgggcggaccgcttcctcgacgcgtgtttcttctgagggagaggcgcgcgcgcgcgccgtcagttgtgtactgtgcatgtgcctgccggcggccggcacgtatacatacttgtgtggtgtgttgtgtagtgtaaaacgcagagttttggtgcgtatcggacagcgtactggcc

SEQ ID NO: 111437 - protein, 254 aa, Zea mays subsp. mays
  misc_feature (1)..(254): Ceres Seq. ID no. 13587236
  misc_feature (18)..(69): Pfam Name: WD domain, G-beta repeat Pfam Description: WD domain, G-beta repeat
  misc_feature (1)..(251): Homolog of NCBI NO: 30696707 NR Description: WD-40 repeat protein family [Arabidopsis
  misc_feature (1)..(251): Homolog of NCBI NO: 18423837 NR Description: WD-40 repeat protein family [Arabidopsis thaliana]
  misc_feature (1)..(251): Homolog of NCBI NO: 9758639 NR Description: WD-repeat protein-like [Arabidopsis thaliana]
  misc_feature (1)..(251): Homolog of NCBI NO: 9294540 NR Description: WD domain protein-like [Arabidopsis thaliana]
  misc_feature (1)..(251): Homolog of NCBI NO: 18405485 NR Description: WD-40 repeat protein family [Arabidopsis
  misc_feature (1)..(251): Homolog of NCBI NO: 18399975 NR Description: WD-40 repeat protein family [Arabidopsis
  misc_feature (1)..(253): Homolog of NCBI NO: 12324715 NR Description: unknown protein; 4584-7806 [Arabidopsis thaliana]
  misc_feature (1)..(253): Homolog of NCBI NO: 13937195 NR Description: At1g78070/F28K19_28 [Arabidopsis thaliana]
  misc_feature (1)..(253): Homolog of NCBI NO: 18400003 NR Description: WD-40 repeat protein family [Arabidopsis thaliana]
  misc_feature (1)..(253): Homolog of NCBI NO: 21553502 NR Description: unknown [Arabidopsis thaliana]
MAVKDNLMVAGGFQGELICKYVDRPGVAFCTSLTGGSSSITNAVDIHQAPSGATRVMAANNDCVVRTFDAERYSLLTQLTFPWSVNSTSVSPDGKLLAVLGDSTECVFADPQSGKALATLRGHLDYSFASAWHPDSRVLATGNQDATCRLWDARSLSEPFAVLGARIGAVRGLRFSPDGRFLAAAEAADFVHVYDAAAGYADAAQEVDVFGEVAGAAFSPDGEALFVSVADRTYGGLLEFRRRRADRFLDACFF

SEQ ID NO: 111438 - protein, 247 aa, Zea mays subsp. mays
  misc_feature (1)..(247): Ceres Seq. ID no. 13587237
  misc_feature (11)..(62): Pfam Name: WD domain, G-beta repeat Pfam Description: WD domain, G-beta repeat
  misc_feature (1)..(244): Homolog of NCBI NO: 18423837 NR Description: WD-40 repeat protein family [Arabidopsis thaliana]
  misc_feature (1)..(244): Homolog of NCBI NO: 30696707 NR Description: WD-40 repeat protein family [Arabidopsis
  misc_feature (1)..(244): Homolog of NCBI NO: 9758639 NR Description: WD-repeat protein-like [Arabidopsis thaliana]
  misc_feature (1)..(244): Homolog of NCBI NO: 9294540 NR Description: WD domain protein-like [Arabidopsis thaliana]
  misc_feature (1)..(244): Homolog of NCBI NO: 18405485 NR Description: WD-40 repeat protein family [Arabidopsis
  misc_feature (1)..(244): Homolog of NCBI NO: 18399975 NR Description: WD-40 repeat protein family [Arabidopsis
  misc_feature (1)..(246): Homolog of NCBI NO: 12324715 NR Description: unknown protein; 4584-7806 [Arabidopsis thaliana]
  misc_feature (1)..(246): Homolog of NCBI NO: 13937195 NR Description: At1g78070/F28K19_28 [Arabidopsis thaliana]
  misc_feature (1)..(246): Homolog of NCBI NO: 18400003 NR Description: WD-40 repeat protein family [Arabidopsis thaliana]
  misc_feature (1)..(246): Homolog of NCBI NO: 21553502 NR Description: unknown [Arabidopsis thaliana]
MVAGGFQGELICKYVDRPGVAFCTSLTGGSSSITNAVDIHQAPSGATRVMAANNDCVVRTFDAERYSLLTQLTFPWSVNSTSVSPDGKLLAVLGDSTECVFADPQSGKALATLRGHLDYSFASAWHPDSRVLATGNQDATCRLWDARSLSEPFAVLGARIGAVRGLRFSPDGRFLAAAEAADFVHVYDAAAGYADAAQEVDVFGEVAGAAFSPDGEALFVSVADRTYGGLLEFRRRRADRFLDACFF

SEQ ID NO: 111439 - protein, 198 aa, Zea mays subsp. mays
  misc_feature (1)..(198): Ceres Seq. ID no. 13587238
  misc_feature (1)..(195): Homolog of NCBI NO: 30696707 NR Description: WD-40 repeat protein family [Arabidopsis
  misc_feature (1)..(195): Homolog of NCBI NO: 18423837 NR Description: WD-40 repeat protein family [Arabidopsis thaliana]
  misc_feature (1)..(195): Homolog of NCBI NO: 9758639 NR Description: WD-repeat protein-like [Arabidopsis thaliana]
  misc_feature (1)..(195): Homolog of NCBI NO: 9294540 NR Description: WD domain protein-like [Arabidopsis thaliana]
  misc_feature (1)..(195): Homolog of NCBI NO: 18405485 NR Description: WD-40 repeat protein family [Arabidopsis
  misc_feature (1)..(195): Homolog of NCBI NO: 18399975 NR Description: WD-40 repeat protein family [Arabidopsis
  misc_feature (1)..(197): Homolog of NCBI NO: 12324715 NR Description: unknown protein; 4584-7806 [Arabidopsis thaliana]
  misc_feature (1)..(197): Homolog of NCBI NO: 13937195 NR Description: At1g78070/F28K19_28 [Arabidopsis thaliana]
  misc_feature (1)..(197): Homolog of NCBI NO: 18400003 NR Description: WD-40 repeat protein family [Arabidopsis thaliana]
  misc_feature (1)..(197): Homolog of NCBI NO: 21553502 NR Description: unknown [Arabidopsis thaliana]
MAANNDCVVRTFDAERYSLLTQLTFPWSVNSTSVSPDGKLLAVLGDSTECVFADPQSGKALATLRGHLDYSFASAWHPDSRVLATGNQDATCRLWDARSLSEPFAVLGARIGAVRGLRFSPDGRFLAAAEAADFVHVYDAAAGYADAAQEVDVFGEVAGAAFSPDGEALFVSVADRTYGGLLEFRRRRADRFLDACFF

SEQ ID NO: 111440 - DNA, 789 bp, Zea mays subsp. mays
  misc_feature (1)..(789): Ceres Seq. ID no. 13599622
gaattacgcatgcatacatacgtatacgtacgcgtattaccatatactacactatccttttacaaattaaacgtactaccagtctatcacagctgtacgttgcggcttgtatgtattttacacgttgacgaagggcgcgccggtaaggtactcggtgacggcgagcgcgacgaggccgagcatggcgaggcggccgttccagagctcggcgtcggcggtcatgaaccggccgctcctgccctcggcgctctccccctggagcagcggcaccagggacgcggcggacaggacggcggcggtgtacgcgaaccacgcgaggccggcgccgttgccggcctgcgagaggatgccgtcgccgcgggtggcctcgacggcgagcgcggacacgaagcccaccatcgccagccgcccgttgatccgctccggcgcgggcccgctgaacgccagcgcgtcccagagccccagcttccgagcagccggtgccgcgctcgcgctcgtgtcggcggcagcgtcatcggcctgctgggaggccctggcgagcagcacgaggcggcgcggcggcgcggcgacacggccgcggaaccccgccggaagccgggcggcgcgcctggcgcgcgcgccgggggcggagaaggcgggggagctcgcggtcgcggaggccatcaccgtggtcgccatcggaagcgcacgttcgtacgtacgggtagttgctgggtgctgggctgctggctagctattagctgtgactgtgatactcagatcggagtagttgcggcctgcggctttttt

SEQ ID NO: 111441 - protein, 263 aa, Zea mays subsp. mays
  misc_feature (1)..(263): Ceres Seq. ID no. 13599623
  misc_feature (45)..(229): Homolog of NCBI NO: 34911494 NR Description: P0454A11.22 [Oryza sativa (japonica
ELRMHTYVYVRVLPYTTLSFYKLNVLPVYHSCTLRLVCILHVDEGRAGKVLGDGERDEAEHGEAAVPELGVGGHEPAAPALGALPLEQRHQGRGGQDGGGVREPREAGAVAGLREDAVAAGGLDGERGHEAHHRQPPVDPLRRGPAERQRVPEPQLPSSRCRARARVGGSVIGLLGGPGEQHEAARRRGDTAAEPRRKPGGAPGARAGGGEGGGARGRGGHHRGRHRKRTFVRTGSCWVLGCWLAISCDCDTQIGVVAACGFF

SEQ ID NO: 111442 - protein, 260 aa, Zea mays subsp. mays
  misc_feature (1)..(260): Ceres Seq. ID no. 13599624
  misc_feature (42)..(226): Homolog of NCBI NO: 34911494 NR Description: P0454A11.22 [Oryza sativa (japonica
MHTYVYVRVLPYTTLSFYKLNVLPVYHSCTLRLVCILHVDEGRAGKVLGDGERDEAEHGEAAVPELGVGGHEPAAPALGALPLEQRHQGRGGQDGGGVREPREAGAVAGLREDAVAAGGLDGERGHEAHHRQPPVDPLRRGPAERQRVPEPQLPSSRCRARARVGGSVIGLLGGPGEQHEAARRRGDTAAEPRRKPGGAPGARAGGGEGGGARGRGGHHRGRHRKRTFVRTGSCWVLGCWLAISCDCDTQIGVVAACGFF

SEQ ID NO: 111443 - protein, 183 aa, Zea mays subsp. mays
  misc_feature (1)..(183): Ceres Seq. ID no. 13599625
MARRPFQSSASAVMNRPLLPSALSPWSSGTRDAADRTAAVYANHARPAPLPACERMPSPRVASTASADTKPTIASRPLIRSGAGPLNASASQSPSFRAAGAALALVSAAASSACWEALASSTRRRGGAATRPRNPAGSRAARLARAPGAEKAGELAVAEAITVVAIGSARSYVRVVAGCWAAG

SEQ ID NO: 111444 - DNA, 851 bp, Zea mays subsp. mays
  misc_feature (1)..(851): Ceres Seq. ID no. 13599572
ctcacaacgatcggaccaaagaatcatacccatctcttttgaccattcaaactagtgaaaaatgggggtactcagaaagaaacacaataaaaaatccagaaggccgtcgtttaagagtgttttaacctcaatattagctacacaagccgcaatatttctcttattgctcgccggtgtttccctcgctggcacagccgtcgcatttatcgctagcatgccactattcgtagtattcagtccgattctcgtaccagcgggtgttgccactggtttactggccacgggtttagcagccgccggtagctccggtgcaatggctgtctccctcatcctttgggtcttcaagcgagtaacggggaaggagccgccaaaaatcatgtcaaaagtcttgaaaaaggtgtttcctggtggaggtgctgcagctaaactggcagcaaaaccagaagccgacccagcggccgcaccagcggcagcaccatcagccgcaccagcagctgcaccgagtacatgaaagcggtgggtaataagcaaaggatgatagataaataatccaactttaaaaaataaataataatatttacgtggggatggaagttaaattttcaaatatcactatactaatggatatcgtggaacaaaatagtaacaaatgtaagcatttttattgtataacattttaagaacgaagcgaagtgtcgttgacgttaattttattcaagttcaactaaaatgttattcaagttcttgttcaccaacgttgtcaaacgagacaatctataggcctcaaggaaccattgtaagttacatgtaaaatggggccataataattatggtcaagtaatgcccttttc

SEQ ID NO: 111445 - protein, 149 aa, Zea mays subsp. mays
  misc_feature (1)..(149): Ceres Seq. ID no. 13599573
  misc_feature (16)..(118): Pfam Name: Oleosin Pfam Description: Oleosin
  misc_feature (5)..(145): Homolog of NCBI NO: 15081220 NR Description: glycine-rich protein GRP20 [Arabidopsis thaliana]
  misc_feature (5)..(141): Homolog of NCBI NO: 15081227 NR Description: glycine-rich protein GRP20 [Arabidopsis thaliana]
  misc_feature (5)..(145): Homolog of NCBI NO: 15081213 NR Description: glycine-rich protein GRP20 [Arabidopsis thaliana]
  misc_feature (5)..(145): Homolog of NCBI NO: 15240816 NR Description: glycine-rich protein GRP20 [Arabidopsis thaliana]
  misc_feature (57)..(149): Homolog of NCBI NO: 7488470 NR Description: oleosin-like protein OLN10 - rape (fragment)
  misc_feature (1)..(148): Homolog of NCBI NO: 123952 NR Description: MICROSPORE-SPECIFIC PROTEIN I3
  misc_feature (58)..(149): Homolog of NCBI NO: 7488475 NR Description: oleosin-like protein OLN8 - rape (fragment)
  misc_feature (1)..(148): Homolog of NCBI NO: 1076452 NR Description: oleosin - rape
  misc_feature (1)..(148): Homolog of NCBI NO: 1076453 NR Description: oleosin - rape
  misc_feature (1)..(149): Homolog of NCBI NO: 7488519 NR Description: anther-specific protein BNA237 - turnip
MGVLRKKHNKKSRRPSFKSVLTSILATQAAIFLLLLAGVSLAGTAVAFIASMPLFVVFSPILVPAGVATGLLATGLAAAGSSGAMAVSLILWVFKRVTGKEPPKIMSKVLKKVFPGGGAAAKLAAKPEADPAAAPAAAPSAAPAAAPST

SEQ ID NO: 111446 - protein, 98 aa, Zea mays subsp. mays
  misc_feature (1)..(98): Ceres Seq. ID no. 13599574
  misc_feature (1)..(67): Pfam Name: Oleosin Pfam Description: Oleosin
  misc_feature (1)..(94): Homolog of NCBI NO: 15081220 NR Description: glycine-rich protein GRP20 [Arabidopsis thaliana]
  misc_feature (1)..(90): Homolog of NCBI NO: 15081227 NR Description: glycine-rich protein GRP20 [Arabidopsis thaliana]
  misc_feature (1)..(94): Homolog of NCBI NO: 15081213 NR Description: glycine-rich protein GRP20 [Arabidopsis thaliana]
  misc_feature (1)..(94): Homolog of NCBI NO: 15240816 NR Description: glycine-rich protein GRP20 [Arabidopsis thaliana]
  misc_feature (6)..(98): Homolog of NCBI NO: 7488470 NR Description: oleosin-like protein OLN10 - rape (fragment)
  misc_feature (1)..(97): Homolog of NCBI NO: 123952 NR Description: MICROSPORE-SPECIFIC PROTEIN I3
  misc_feature (7)..(98): Homolog of NCBI NO: 7488475 NR Description: oleosin-like protein OLN8 - rape (fragment)
  misc_feature (1)..(97): Homolog of NCBI NO: 1076452 NR Description: oleosin - rape
  misc_feature (1)..(97): Homolog of NCBI NO: 1076453 NR Description: oleosin - rape
  misc_feature (1)..(98): Homolog of NCBI NO: 7488519 NR Description: anther-specific protein BNA237 - turnip
MPLFVVFSPILVPAGVATGLLATGLAAAGSSGAMAVSLILWVFKRVTGKEPPKIMSKVLKKVFPGGGAAAKLAAKPEADPAAAPAAAPSAAPAAAPST

SEQ ID NO: 111447 - DNA, 717 bp, Zea mays subsp. mays
  misc_feature (1)..(717): Ceres Seq. ID no. 12635864
aagcaacagtactctctctcctacctcactcctctctctctctctccccctgcaaattcatggcgacggagaccgagtttgaacctcaacaatcaccaatggcggaggagcagccgagtcccttctctctcccaccgtatcctcagatgatcatggaagcgatcgaagcatcgaacgacgcgaacggttgcaacaagacggcgatcgcgaagcacatcgagtcaactcaggcctctctaccaccgtctcacatgacgctcctcagctaccacctcaaccagatgaaacagtccggccagatcgcgatggtgaagaacaactacatgaaaccagatccgcatgctccgcccaagcgcggccgtggccgtcctccgaaggcgaaacctcagggagattcaagccacgtggcggtcccggctcctgctcctcccgtttcctcgccgaggcctagaggtcgtcctcccaaggcgaaggaaccttcgtcggaggtggaaacgaaggttgcagaaccgagtggttccgggaggccacgtggacggccaccgtagaagcagaagacggaatccgaggcggttaaagccgatgttgaacctgcggaggctccggctggtactggggagcggagagggcgtggaaggccacccaaagcgaagcctgcgatggtgcctgttggttgctaaagttgacgcttaagcaaatcgaataagctttgattag

SEQ ID NO: 111448 - protein, 181 aa, Zea mays subsp. mays
  misc_feature (1)..(181): Ceres Seq. ID no. 12635865
  misc_feature (42)..(111): Pfam Name: linker histone H1 and H5 family Pfam Description: linker histone H1 and H5 family
  misc_feature (35)..(181): Homolog of NCBI NO: 7439663 NR Description: high mobility group protein HMGI/Y-1 - sword bean
  misc_feature (35)..(181): Homolog of NCBI NO: 4585621 NR Description: HMGI/Y protein [Zea mays]
  misc_feature (36)..(181): Homolog of NCBI NO: 2129885 NR Description: HMGI/Y protein - garden pea
  misc_feature (35)..(181): Homolog of NCBI NO: 11544762 NR Description: HMGI/Y protein [Zea mays]
  misc_feature (35)..(181): Homolog of NCBI NO: 9837562 NR Description: high mobility group I/Y-2 [Zea mays]
  misc_feature (20)..(181): Homolog of NCBI NO: 7439646 NR Description: DNA binding protein PF1 - rice
  misc_feature (49)..(181): Homolog of NCBI NO: 21536605 NR Description: linker histone protein, putative [Arabidopsis
  misc_feature (34)..(181): Homolog of NCBI NO: 1808590 NR Description: HMG-I/Y [Arabidopsis thaliana]
  misc_feature (34)..(181): Homolog of NCBI NO: 15223947 NR Description: linker histone protein, putative
  misc_feature (20)..(181): Homolog of NCBI NO: 6651027 NR Description: high mobility group protein I/Y [Brassica napus]
ATVLSLLPHSSLSLSPCKFMATETEFEPQQSPMAEEQPSPFSLPPYPQMIMEAIEASNDANGCNKTAIAKHIESTQASLPPSHMTLLSYHLNQMKQSGQIAMVKNNYMKPDPHAPPKRGRGRPPKAKPQGDSSHVAVPAPAPPVSSPRPRGRPPKAKEPSSEVETKVAEPSGSGRPRGRPP

SEQ ID NO: 111449 - protein, 162 aa, Zea mays subsp. mays
  misc_feature (1)..(162): Ceres Seq. ID no. 12635866
  misc_feature (23)..(92): Pfam Name: linker histone H1 and H5 family Pfam Description: linker histone H1 and H5 family
  misc_feature (16)..(162): Homolog of NCBI NO: 7439663 NR Description: high mobility group protein HMGI/Y-1 - sword bean
  misc_feature (16)..(162): Homolog of NCBI NO: 4585621 NR Description: HMGI/Y protein [Zea mays]
  misc_feature (17)..(162): Homolog of NCBI NO: 2129885 NR Description: HMGI/Y protein - garden pea
  misc_feature (16)..(162): Homolog of NCBI NO: 11544762 NR Description: HMGI/Y protein [Zea mays]
  misc_feature (16)..(162): Homolog of NCBI NO: 9837562 NR Description: high mobility group I/Y-2 [Zea mays]
  misc_feature (1)..(162): Homolog of NCBI NO: 7439646 NR Description: DNA binding protein PF1 - rice
  misc_feature (30)..(162): Homolog of NCBI NO: 21536605 NR Description: linker histone protein, putative [Arabidopsis
  misc_feature (15)..(162): Homolog of NCBI NO: 1808590 NR Description: HMG-I/Y [Arabidopsis thaliana]
  misc_feature (15)..(162): Homolog of NCBI NO: 15223947 NR Description: linker histone protein, putative
  misc_feature (1)..(162): Homolog of NCBI NO: 6651027 NR Description: high mobility group protein I/Y [Brassica napus]
MATETEFEPQQSPMAEEQPSPFSLPPYPQMIMEAIEASNDANGCNKTAIAKHIESTQASLPPSHMTLLSYHLNQMKQSGQIAMVKNNYMKPDPHAPPKRGRGRPPKAKPQGDSSHVAVPAPAPPVSSPRPRGRPPKAKEPSSEVETKVAEPSGSGRPRGRPP

SEQ ID NO: 111450 - protein, 149 aa, Zea mays subsp. mays
  misc_feature (1)..(149): Ceres Seq. ID no. 12635867
  misc_feature (10)..(79): Pfam Name: linker histone H1 and H5 family Pfam Description: linker histone H1 and H5 family
  misc_feature (3)..(149): Homolog of NCBI NO: 7439663 NR Description: high mobility group protein HMGI/Y-1 - sword bean
  misc_feature (3)..(149): Homolog of NCBI NO: 4585621 NR Description: HMGI/Y protein [Zea mays]
  misc_feature (4)..(149): Homolog of NCBI NO: 2129885 NR Description: HMGI/Y protein - garden pea
  misc_feature (3)..(149): Homolog of NCBI NO: 11544762 NR Description: HMGI/Y protein [Zea mays]
  misc_feature (3)..(149): Homolog of NCBI NO: 9837562 NR Description: high mobility group I/Y-2 [Zea mays]
  misc_feature (1)..(149): Homolog of NCBI NO: 7439646 NR Description: DNA binding protein PF1 - rice
  misc_feature (17)..(149): Homolog of NCBI NO: 21536605 NR Description: linker histone protein, putative [Arabidopsis
  misc_feature (2)..(149): Homolog of NCBI NO: 1808590 NR Description: HMG-I/Y [Arabidopsis thaliana]
  misc_feature (2)..(149): Homolog of NCBI NO: 15223947 NR Description: linker histone protein, putative
  misc_feature (1)..(149): Homolog of NCBI NO: 6651027 NR Description: high mobility group protein I/Y [Brassica napus]
MAEEQPSPFSLPPYPQMIMEAIEASNDANGCNKTAIAKHIESTQASLPPSHMTLLSYHLNQMKQSGQIAMVKNNYMKPDPHAPPKRGRGRPPKAKPQGDSSHVAVPAPAPPVSSPRPRGRPPKAKEPSSEVETKVAEPSGSGRPRGRPP

SEQ ID NO: 111451 - DNA, 686 bp, Zea mays subsp. mays
  misc_feature (1)..(686): Ceres Seq. ID no. 13599473
  misc_feature: MA Experiment ID: 20000535 Result: Up-regulated in Transcription
  misc_feature: MA Experiment 20000535 PARAMETER Experiment Name: Zm_Hybrid_Seed_Dev_P Parameter: DAP Value: 30 vs. 12
  misc_feature: MA Experiment 20000535 PARAMETER Experiment Name: Zm_Hybrid_Seed_Dev_P Parameter: Organism Value: Zea mays
  misc_feature: MA Experiment 20000535 PARAMETER Experiment Name: Zm_Hybrid_Seed_Dev_P Parameter: Plant Line Value: 35A19
  misc_feature: MA Experiment 20000535 PARAMETER Experiment Name: Zm_Hybrid_Seed_Dev_P Parameter: Tissue Value: Embryo vs. Unfert Floret
ccattacctagaacatcctaatcgaaaaaaaacccactcacacactgtgacgctgctgatgcgcctcatcgtccccgtccccccggcagagcccacccaccctccactccaacccacgccggcgaacccagccagccgcccacgtcgcctcccggtcccggcttagaccagactcagattcagatgcacctgctcgacgacctccgccaagaccgcggcggcgcggccgcccacaccggcagccgcagtcgcaagccgcccccgccccttgccgccgccgccgccgccgccgcgggggtcccggcgggctcctccaccgccgccaccgccacccacctgggcccggaggcggcggcgctgctggcgtgcgtcacggccacgctgctgctgcttccgctggtcctgccgcccctgccgccgccgccgccgctcctcctcctcgtgcccgtcgccatcttcgccgtcctgctactcctcgtgctcctcccctccgacgcccgcgccgccgtcgccacgcccacctcctccgcctcctacttgtagcagtagcttatacgtcttgttgtacagggtactggtacctagctagctgatcgagtgagttgagtgacagagtgagtagagtggattttggtaggcgtgcatgcaaaatgtaaataaaaccaaaccccagcgcggattcttct

SEQ ID NO: 111452 - protein, 119 aa, Zea mays subsp. mays
  misc_feature (1)..(119): Ceres Seq. ID no. 13599474
  misc_feature (49)..(103): Homolog of NCBI NO: 30695081 NR Description: expressed protein [Arabidopsis thaliana]
  misc_feature (48)..(114): Homolog of NCBI NO: 30689607 NR Description: expressed protein [Arabidopsis thaliana]
  misc_feature (1)..(109): Homolog of NCBI NO: 34907496 NR Description: B1099D03.18 [Oryza sativa (japonica
  misc_feature (6)..(103): Homolog of NCBI NO: 21742737 NR Description: OSJNBa0027P08.2 [Oryza sativa (japonica
MHLLDDLRQDRGGAAAHTGSRSRKPPPPLAAAAAAAAGVPAGSSTAATATHLGPEAAALLACVTATLLLLPLVLPPLPPPPPLLLLVPVAIFAVLLLLVLLPSDARAAVATPTSSASYL

SEQ ID NO: 111453 - DNA, 1503 bp, Zea mays subsp. mays
  misc_feature (1)..(1503): Ceres Seq. ID no. 15225158
accgagtccgccgccgccgccgcccacctttcttcttctcccaaaccctagtctccggcggcgatggcccccaagcgcgccgcgaagaaggcggcacccccgcctccgcctccgcctccggctgcctcctctgaggagagcgaatcccgctcgcgctccgaggagtcggagggcgaagacgccgagtcccctccccccgcccccaccccggcccccaagagcacgccggcgcccccgcaggagggagaggaggaggaggaggagtctgaagaggaagacgaggaggagactgatgaggagcccgcccacgcggccccagccgccgccgccacccccaagaacaagcctccgccgccgcaacagggaggtgactccgattcttcttccgacgaggaggaggaggagcccaccaaggcggcccctccctccgccctgaagaaacaacccccgccgccgccgccgccgcggcagagcgaggaatcggacgcctccgacgaggaagaagaggagggtgagtccgaggaggaggcgccgccgccgccgccgccgaagcttgctccaaagcaggcgccagagggccggaagccccaggcagcggcggagaccaagaagccggccgctttcaaccgcatctggtccaccgacgacgaggtgcgtatcctcgaggcccttgctgctcaccaaaagcagcacggcacgctgccgcagccggacgccctcgtggacgcccttgcaggaaagctcgacaaccgtgcctacggcagcaaggagctccaggggaaggtcttggccctgaggcgtcgttacctccttctcagcaagaagggcgagcccccgagcaaggagcatgaccgccgggtgctggaactttccaagatggtctgggaaggcggtgacacggccgcagctgcccctgcgaaggcggcaaatggccaggagccaaaggggttcgaggagatgtgcgagctgtatccgtacctggcggagcaggtgagggagctggatgcggcgaacccgggcatcttcaagaggcagttcgggatgatggacgacgacaaggcgcgcgcgatggacgagaagatcaagaggcagagggtggcgcagatgaaggtggagctgcgccgccacgacctggccagggaggtgaccaaggcgatcatcgacctggtcgactgatcggagcgtcatgggcttacaagttagtacaaactgaaactgtatctgtgatcacctgaagttggtgcgatgaaatgcggcgttttggtggagcaagaatgtttctgaaactatgatctagagtctgcggattgggctggctcgatgcatcagacatgtggtggaactgcaaattgtgcctcctgtttgtaagaatgcttttctcgtgtggccagagcaaatgctagaaatagcaaattaggggtgtctttatagtgtaagcatgatgagacatgtgctggaactgcaaattgtgctggtggattaagaatattttccgaagtgcgc

SEQ ID NO: 111454 - protein, 370 aa, Zea mays subsp. mays
  misc_feature (1)..(370): Ceres Seq. ID no. 15225159
  misc_feature (1)..(162): Pfam Name: Formin Homology 2 Domain Pfam Description: Formin Homology 2 Domain
  misc_feature (1)..(196): Homolog of NCBI NO: 28856212 NR Description: Unknown (protein for IMAGE:3818911) [Danio rerio]
  misc_feature (1)..(184): Homolog of NCBI NO: 12053779 NR Description: Nahoda protein [Drosophila melanogaster]
  misc_feature (1)..(195): Homolog of NCBI NO: 33416846 NR Description: Unknown (protein for IMAGE:3818638) [Danio rerio]
  misc_feature (1)..(203): Homolog of NCBI NO: 39935648 NR Description: unknown protein [Rhodopseudomonas palustris]
  misc_feature (1)..(216): Homolog of NCBI NO: 28856212 NR Description: Unknown (protein for IMAGE:3818911) [Danio rerio]
  misc_feature (12)..(188): Homolog of NCBI NO: 19072840 NR Description: EP-repeat protein precursor [Glossina palpalis
  misc_feature (5)..(165): Homolog of NCBI NO: 33359633 NR Description: nucleolin 2 [Cyprinus carpio]
  misc_feature (5)..(165): Homolog of NCBI NO: 33359635 NR Description: nucleolin 3 [Cyprinus carpio]
  misc_feature (1)..(196): Homolog of NCBI NO: 33416846 NR Description: Unknown (protein for IMAGE:3818638) [Danio rerio]
  misc_feature (5)..(261): Homolog of NCBI NO: 27804344 NR Description: nucleolin [Cyprinus carpio]
MAPKRAAKKAAPPPPPPPPAASSEESESRSRSEESEGEDAESPPPAPTPAPKSTPAPPQEGEEEEEESEEEDEEETDEEPAHAAPAAAATPKNKPPPPQQGGDSDSSSDEEEEEPTKAAPPSALKKQPPPPPPPRQSEESDASDEEEEEGESEEEAPPPPPPKLAPKQAPEGRKPQAAAETKKPAAFNRIWSTDDEVRILEALAAHQKQHGTLPQPDALVDALAGKLDNRAYGSKELQGKVLALRRRYLLLSKKGEPPSKEHDRRVLELSKMVWEGGDTAAAAPAKAANGQEPKGFEEMCELYPYLAEQVRELDAANPGIFKRQFGMMDDDKARAMDEKIKRQRVAQMKVELRRHDLAREVTKAIIDLVD

SEQ ID NO: 111455 - DNA, 795 bp, Zea mays subsp. mays
  misc_feature (1)..(795): Ceres Seq. ID no. 12635868
attttctttacactgaaccatcactgagagagtgcgcttcacacaataaacaaaaaaaaatggctaggcaatttgctattgttgcgatctgcatcgtcctcatcgccggcgtcggaggtcaagctccgtcggcaccaccaaccaccacaccagcaccacccaccacaacaactcccccgccagcagccactcctcctcctgtctcagctcctccaccagtcacaacttctcctcctccagccaccaccgctcctcctcctgctactcctcctccagtcgcttctcctcctccggccactcctcctccagtggcaactcctcctccagcaactccccctcccgtcgcatctcctcctccagcaactcctccacccgtcgcatctcctcctccagcaacgcctcctccagctcctcttgcatctcctcccgctcaggttccagctcttgctcctacgacgccagacgctccctctacatctccgtcgtctagcccgcctctcccggccactgatggccctggaccgagcgccgaagggccaggaccttccacagattcgaatgaccagaatggagcaagcaagacagtttcaagcttggtacttggatctgttctcgtttggtttatgatctaagcgcgggagcctttcgctcggtgttccttgcatttgttttcatgttgatgtttgtttgttccattgttattactttcggaaccgtattcttttggattattatcttttggagaggatattattgagacttgagatggagatatcaggantatatttcgtttgg

SEQ ID NO: 111456 - protein, 209 aa, Zea mays subsp. mays
  misc_feature (1)..(209): Ceres Seq. ID no. 12635869
  misc_feature (41)..(183): Pfam Name: Formin Homology 2 Domain Pfam Description: Formin Homology 2 Domain
  misc_feature (43)..(209): Homolog of NCBI NO: 7441828 NR Description: extensin-like cell wall protein - sea-island
  misc_feature (20)..(209): Homolog of NCBI NO: 13265426 NR Description: At2g14890 [Arabidopsis thaliana]
  misc_feature (20)..(201): Homolog of NCBI NO: 5139695 NR Description: expressed in cucumber hypocotyls [Cucumis sativus]
  misc_feature (42)..(203): Homolog of NCBI NO: 1084362 NR Description: extensin-like protein S3 - alfalfa
  misc_feature (24)..(209): Homolog of NCBI NO: 7441828 NR Description: extensin-like cell wall protein - sea-island
  misc_feature (43)..(209): Homolog of NCBI NO: 7441829 NR Description: proline-rich cell wall protein - upland cotton
  misc_feature (24)..(209): Homolog of NCBI NO: 7441829 NR Description: proline-rich cell wall protein - upland cotton
  misc_feature (26)..(175): Homolog of NCBI NO: 1084362 NR Description: extensin-like protein S3 - alfalfa
  misc_feature (41)..(181): Homolog of NCBI NO: 5917664 NR Description: extensin-like protein [Lycopersicon esculentum]
  misc_feature (20)..(209): Homolog of NCBI NO: 15226024 NR Description: arabinogalactan-protein (AGP9)
FLYTEPSLRECASHNKQKKMARQFAIVAICIVLIAGVGGQAPSAPPTTTPAPPTTTTPPPAATPPPVSAPPPVTTSPPPATTAPPPATPPPVASPPPATPPPVATPPPATPPPVASPPPATPPPVASPPPATPPPAPLASPPAQVPALAPTTPDAPSTSPSSSPPLPATDGPGPSAEGPGPSTDSNDQNGASKTVSSLVLGSVLVWFMI

SEQ ID NO: 111457 - protein, 190 aa, Zea mays subsp. mays
  misc_feature (1)..(190): Ceres Seq. ID no. 12635870
  misc_feature (22)..(164): Pfam Name: Formin Homology 2 Domain Pfam Description: Formin Homology 2 Domain
  misc_feature (22)..(162): Homolog of NCBI NO: 5917664 NR Description: extensin-like protein [Lycopersicon esculentum]
  misc_feature (1)..(182): Homolog of NCBI NO: 5139695 NR Description: expressed in cucumber hypocotyls [Cucumis sativus]
  misc_feature (7)..(156): Homolog of NCBI NO: 1084362 NR Description: extensin-like protein S3 - alfalfa
  misc_feature (23)..(184): Homolog of NCBI NO: 1084362 NR Description: extensin-like protein S3 - alfalfa
  misc_feature (5)..(190): Homolog of NCBI NO: 7441829 NR Description: proline-rich cell wall protein - upland cotton
  misc_feature (5)..(190): Homolog of NCBI NO: 7441828 NR Description: extensin-like cell wall protein - sea-island
  misc_feature (24)..(190): Homolog of NCBI NO: 7441829 NR Description: proline-rich cell wall protein - upland cotton
  misc_feature (24)..(190): Homolog of NCBI NO: 7441828 NR Description: extensin-like cell wall protein - sea-island
  misc_feature (1)..(190): Homolog of NCBI NO: 13265426 NR Description: At2g14890 [Arabidopsis thaliana]
  misc_feature (1)..(190): Homolog of NCBI NO: 15226024 NR Description: arabinogalactan-protein (AGP9)
MARQFAIVAICIVLIAGVGGQAPSAPPTTTPAPPTTTTPPPAATPPPVSAPPPVTTSPPPATTAPPPATPPPVASPPPATPPPVATPPPATPPPVASPPPATPPPVASPPPATPPPAPLASPPAQVPALAPTTPDAPSTSPSSSPPLPATDGPGPSAEGPGPSTDSNDQNGASKTVSSLVLGSVLVWFMI

SEQ ID NO: 111458 - DNA, 1331 bp, Zea mays subsp. mays
  misc_feature (1)..(1331): Ceres Seq. ID no. 15224799
atctatacaaaccaaactcgcgctccagaccacagctcaccctcacctgcgacctgcgcgcattcacagccgccggcgccacacgtgcccgcgcgccgggcgccacctctctcccatccaccagccttcctctcccgggccaggcggcgcccctcaatggccgccaccttcaccgtcgccgcccgcctcccgctgcggggccccgcgcgcgctccgtcccggccggccgtcgctgctgtaacccggcttcgaagccggcaggagcggcgcggcctagcagcgacaggcgggaggggacctgcccgggttcgggccgagactttctccggtggtggaggcgtggggcggagggaccccatggcgccgccttacaatgtcctcatcaccggctctacgaaaggtataggatatgcattggcaaggaaatttctggaggctggtgataacgttataatctgctcgagatcagctcaaaaggtagaatctgtggtcggtgacttgaaggaggagtacggagagcaacatgtgtggggaactgtctgtgatgttagaaatggaaaggatgtaaaggcacttgtggagtttgcacgtgacaaacttaagcatattgatatatggatcaacaatgctggatcaaatgcatatacatacaaaccactagtggagacctctgatgaggctctcatggaaatcatcaccactaacacccttggattgatgatatgttgtcgtgaggcgataaatatgatgaggaaccaacctcgaggtggtcacatattcaaccttgatggtgctggttctgatggaaggccaactccaagatttgctgcatatggtgcaacaaagagaagtgttgtgcatcttacgaagtcacttcaggctgaattgcagatgaatgaagtgaataatgtgatggtgcacaatctatcgcctggcatggtcacaacagatcttcttatgtctggtgcaactacaaaacaagcaaaatttttcatcaatatattagctgaacctcctgatgtggttgcagactaccttgttccaaacgtcagagaaatccctaccaagcaatccatgaagccaacctacattcgtttcctcacaggcttgaaggcctactcaagaattttttctagacttgcttttggtgctaggagaaacaagtatgttactgaagattagttatgctgccagcttccaactgaagagattaggaacaattcttttcattaagcgtcacttacttttctcataagatgggatgtattacagatgtcatctcatgagaacagtgatatactcttctgtacagtagtagcaatttttttagt

SEQ ID NO: 111459 - protein, 393 aa, Zea mays subsp. mays
  misc_feature (1)..(393): Ceres Seq. ID no. 15224800
  misc_feature (127)..(327): Homolog of NCBI NO: 17560676 NR Description: DeHydrogenase, Short chain (dhs-13)
  misc_feature (127)..(352): Homolog of NCBI NO: 22971619 NR Description: hypothetical protein [Chloroflexus aurantiacus]
  misc_feature (127)..(347): Homolog of NCBI NO: 21674585 NR Description: oxidoreductase, short-chain
  misc_feature (168)..(368): Homolog of NCBI NO: 7485669 NR Description: hypothetical protein F17N18.140 - Arabidopsis
  misc_feature (120)..(389): Homolog of NCBI NO: 21673969 NR Description: oxidoreductase, short-chain
  misc_feature (107)..(393): Homolog of NCBI NO: 34904226 NR Description: P0443E07.30 [Oryza sativa (japonica
  misc_feature (107)..(368): Homolog of NCBI NO: 18413962 NR Description: short-chain dehydrogenase/reductase family
  misc_feature (75)..(378): Homolog of NCBI NO: 10178029 NR Description: gene_id:MUG13.25~pir||T07705~similar to unknown
  misc_feature (75)..(393): Homolog of NCBI NO: 18414726 NR Description: short-chain dehydrogenase/reductase family
  misc_feature (53)..(393): Homolog of NCBI NO: 29244639 NR Description: putative oxidoreductase protein
IYTNQTRAPDHSSPSPATCAHSQPPAPHVPARRAPPLSHPPAFLSRARRRPSMAATFTVAARLPLRGPARAPSRPAVAAVTRLRSRQERRGLAATGGRGPARVRAETFSGGGGVGRRDPMAPPYNVLITGSTKGIGYALARKFLEAGDNVIICSRSAQKVESVVGDLKEEYGEQHVWGTVCDVRNGKDVKALVEFARDKLKHIDIWINNAGSNAYTYKPLVETSDEALMEIITTNTLGLMICCREAINMMRNQPRGGHIFNLDGAGSDGRPTPRFAAYGATKRSVVHLTKSLQAELQMNEVNNVMVHNLSPGMVTTDLLMSGATTKQAKFFINILAEPPDVVADYLVPNVREIPTKQSMKPTYIRFLTGLKAYSRIFSRLAFGARRNKYVTED

SEQ ID NO: 111460 - protein, 341 aa, Zea mays subsp. mays
  misc_feature (1)..(341): Ceres Seq. ID no. 15224801
  misc_feature (75)..(275): Homolog of NCBI NO: 17560676 NR Description: DeHydrogenase, Short chain (dhs-13)
  misc_feature (75)..(300): Homolog of NCBI NO: 22971619 NR Description: hypothetical protein [Chloroflexus aurantiacus]
  misc_feature (75)..(295): Homolog of NCBI NO: 21674585 NR Description: oxidoreductase, short-chain
  misc_feature (116)..(316): Homolog of NCBI NO: 7485669 NR Description: hypothetical protein F17N18.140 - Arabidopsis
  misc_feature (68)..(337): Homolog of NCBI NO: 21673969 NR Description: oxidoreductase, short-chain
  misc_feature (55)..(341): Homolog of NCBI NO: 34904226 NR Description: P0443E07.30 [Oryza sativa (japonica
  misc_feature (55)..(316): Homolog of NCBI NO: 18413962 NR Description: short-chain dehydrogenase/reductase family
  misc_feature (23)..(326): Homolog of NCBI NO: 10178029 NR Description: gene_id:MUG13.25~pir||T07705~similar to unknown
  misc_feature (23)..(341): Homolog of NCBI NO: 18414726 NR Description: short-chain dehydrogenase/reductase family
  misc_feature (1)..(341): Homolog of NCBI NO: 29244639 NR Description: putative oxidoreductase protein
MAATFTVAARLPLRGPARAPSRPAVAAVTRLRSRQERRGLAATGGRGPARVRAETFSGGGGVGRRDPMAPPYNVLITGSTKGIGYALARKFLEAGDNVIICSRSAQKVESVVGDLKEEYGEQHVWGTVCDVRNGKDVKALVEFARDKLKHIDIWINNAGSNAYTYKPLVETSDEALMEIITTNTLGLMICCREAINMMRNQPRGGHIFNLDGAGSDGRPTPRFAAYGATKRSVVHLTKSLQAELQMNEVNNVMVHNLSPGMVTTDLLMSGATTKQAKFFINILAEPPDVVADYLVPNVREIPTKQSMKPTYIRFLTGLKAYSRIFSRLAFGARRNKYVTED

SEQ ID NO: 111461 - protein, 274 aa, Zea mays subsp. mays
  misc_feature (1)..(274): Ceres Seq. ID no. 15224802
  misc_feature (8)..(208): Homolog of NCBI NO: 17560676 NR Description: DeHydrogenase, Short chain (dhs-13)
  misc_feature (8)..(233): Homolog of NCBI NO: 22971619 NR Description: hypothetical protein [Chloroflexus aurantiacus]
  misc_feature (8)..(228): Homolog of NCBI NO: 21674585 NR Description: oxidoreductase, short-chain
  misc_feature (49)..(249): Homolog of NCBI NO: 7485669 NR Description: hypothetical protein F17N18.140 - Arabidopsis
  misc_feature (1)..(270): Homolog of NCBI NO: 21673969 NR Description: oxidoreductase, short-chain
  misc_feature (1)..(274): Homolog of NCBI NO: 34904226 NR Description: P0443E07.30 [Oryza sativa (japonica
  misc_feature (1)..(249): Homolog of NCBI NO: 18413962 NR Description: short-chain dehydrogenase/reductase family
  misc_feature (1)..(259): Homolog of NCBI NO: 10178029 NR Description: gene_id:MUG13.25~pir||T07705~similar to unknown
  misc_feature (1)..(274): Homolog of NCBI NO: 18414726 NR Description: short-chain dehydrogenase/reductase family
  misc_feature (1)..(274): Homolog of NCBI NO: 29244639 NR Description: putative oxidoreductase protein
MAPPYNVLITGSTKGIGYALARKFLEAGDNVIICSRSAQKVESVVGDLKEEYGEQHVWGTVCDVRNGKDVKALVEFARDKLKHIDIWINNAGSNAYTYKPLVETSDEALMEIITTNTLGLMICCREAINMMRNQPRGGHIFNLDGAGSDGRPTPRFAAYGATKRSVVHLTKSLQAELQMNEVNNVMVHNLSPGMVTTDLLMSGATTKQAKFFINILAEPPDVVADYLVPNVREIPTKQSMKPTYIRFLTGLKAYSRIFSRLAFGARRNKYVTED

SEQ ID NO: 111462 - DNA, 1097 bp, Zea mays subsp. mays
  misc_feature (1)..(1097): Ceres Seq. ID no. 13587656
attccattcgccgttcccgttctcctctccccctgtcgcctccatagcagcagcagctccagctcgagcaagaaagaactagtttgatctgtgaaaatgttggccatcttccagaagcaggtggcgcacgcgccgcaggagctcaacagcccgcgcggcagcaccgccaagcccaagaaccccgacgagatcctccgcgacttccacgccgcccacccctccgacgccttctccacctccttcggcggcggcgccgccctcgcctgcatcgccgcgcagccccgcaacctcgccgccggcgggtaccagaggatgttctgcgggctggacgacatctactgcgtcttcatggggacgctggacaacctgagcgcgctgatgcggcagtacggcctcacgggccgctccaccaacgaggcgctgctggtgatcgaggcctaccgcaccctgcgcgaccggggcccctaccctgctgaccaggtggtgaaggacctgtcgggctccttcgccttcgtcgtcttcgacaaccgcggccggtccggctccggggcggccgtgttcgcggcgcagagcacggacggcggcgtgccgctgcactggggcgtggcggcggacgggtcggtggtgatctgcgacgaccgcgccgtggccaaggccgggtgcgggcggtcctacgcgccgttcccgcccgggtgcatgttccacagcgagggcgggctcaagagcttcgagcaccccatgaaccggctcaaggcgctcccgcgggtggacagcgagggcgtcatgtgcggcgccaacttcaaggtcgacgccttcaccaagatcaactccatgccccgcgtcggtagcgccaccaactgggccgccacctgggacgaagccgccatctgatatagccatcgtcgctccccggcgccggcgacgctcgcctagctcgtcggacttctggatttgggcttactgcattttacttatttttttctttggcaatgtacattctgaatctgatctgatctgagccgtgtgtgggcgtgggcacgctgacacgtacggttgtttgcttgtacgatggaggaataagactttgcttccagtcc

SEQ ID NO: 111463 - protein, 264 aa, Zea mays subsp. mays
  misc_feature (1)..(264): Ceres Seq. ID no. 13587657
  misc_feature (1)..(262): Homolog of NCBI NO: 542200 NR Description: hypothetical protein - garden asparagus
MLAIFQKQVAHAPQELNSPRGSTAKPKNPDEILRDFHAAHPSDAFSTSFGGGAALACIAAQPRNLAAGGYQRMFCGLDDIYCVFMGTLDNLSALMRQYGLTGRSTNEALLVIEAYRTLRDRGPYPADQVVKDLSGSFAFVVFDNRGRSGSGAAVFAAQSTDGGVPLHWGVAADGSVVICDDRAVAKAGCGRSYAPFPPGCMFHSEGGLKSFEHPMNRLKALPRVDSEGVMCGANFKVDAFTKINSMPRVGSATNWAATWDEAAI

SEQ ID NO: 111464 - protein, 192 aa, Zea mays subsp. mays
  misc_feature (1)..(192): Ceres Seq. ID no. 13587658
  misc_feature (1)..(190): Homolog of NCBI NO: 542200 NR Description: hypothetical protein - garden asparagus
MFCGLDDIYCVFMGTLDNLSALMRQYGLTGRSTNEALLVIEAYRTLRDRGPYPADQVVKDLSGSFAFVVFDNRGRSGSGAAVFAAQSTDGGVPLHWGVAADGSVVICDDRAVAKAGCGRSYAPFPPGCMFHSEGGLKSFEHPMNRLKALPRVDSEGVMCGANFKVDAFTKINSMPRVGSATNWAATWDEAAI

SEQ ID NO: 111465 - protein, 180 aa, Zea mays subsp. mays
  misc_feature (1)..(180): Ceres Seq. ID no. 13587659
  misc_feature (1)..(178): Homolog of NCBI NO: 542200 NR Description: hypothetical protein - garden asparagus
MGTLDNLSALMRQYGLTGRSTNEALLVIEAYRTLRDRGPYPADQVVKDLSGSFAFVVFDNRGRSGSGAAVFAAQSTDGGVPLHWGVAADGSVVICDDRAVAKAGCGRSYAPFPPGCMFHSEGGLKSFEHPMNRLKALPRVDSEGVMCGANFKVDAFTKINSMPRVGSATNWAATWDEAAI

SEQ ID NO: 111466 - DNA, 721 bp, Zea mays subsp. mays
  misc_feature (1)..(721): Ceres Seq. ID no. 12635879
  misc_feature: MA Experiment ID: 108528 Result: Up-regulated in Transcription
  misc_feature: MA Experiment 108528 PARAMETER Experiment Name: Zm_Imbibed_Seeds_P Parameter: Age (day) Value: 5 vs. 2
  misc_feature: MA Experiment 108528 PARAMETER Experiment Name: Zm_Imbibed_Seeds_P Parameter: Organism Value: Zea mays
  misc_feature: MA Experiment 108528 PARAMETER Experiment Name: Zm_Imbibed_Seeds_P Parameter: Plant Line Value: 35A19
  misc_feature: MA Experiment 108528 PARAMETER Experiment Name: Zm_Imbibed_Seeds_P Parameter: Tissue Value: Aerial vs. Embryo
  misc_feature: MA Experiment ID: 108547 Result: Up-regulated in Transcription
  misc_feature: MA Experiment 108547 PARAMETER Experiment Name: Zm_Imbibed_Seeds_P Parameter: Age (day) Value: 4 vs. 2
  misc_feature: MA Experiment 108547 PARAMETER Experiment Name: Zm_Imbibed_Seeds_P Parameter: Organism Value: Zea mays
  misc_feature: MA Experiment 108547 PARAMETER Experiment Name: Zm_Imbibed_Seeds_P Parameter: Plant Line Value: 35A19
  misc_feature: MA Experiment 108547 PARAMETER Experiment Name: Zm_Imbibed_Seeds_P Parameter: Tissue Value: Aerial vs. Embryo
aaacatcaccaccacttctaacacagcctcctcctcctcttcgatctctctctctctcgatcaaaatggctaacccaagagtcttcttcgacatgaccctcgacggcgcccccgccggccgcatcgtgatggagctttacaaagacacgaccccgaacaccgccgagaacttccgagccctctgcaccggcgagaaaggtgtcggaaagaaggggaagcctctccacttcaagggatcggccttccaccgcgtgatccccgggttcatgtgccagggaggcgatttcaccgccgggaacgggaccggcggggagtcgatctacggcgataagttcaaggacgagaacttcgcgaagaagcacaccggggcggggatcctctccatggcgaactctggtcccaacactaacggatctcagttttttatctgcaccgcggagacgtcgtggctcgatgggaagcacgtggtgtttgggaaggttgttgaaggtatggaggttgtgaaggcgatcgagaaggttggatcgtcttctgggacgacgaagaagaaggttgttgttgctgattgtggtcaggttgcttagatctgagtgatctgatgatgatgaatgttatcttttgcttttttaatgtttttttttctgatcgttcgagtttgtaaaaccctgagggttttttggatttgactgcctttgaataattatgaataactatgagcttg

SEQ ID NO: 111467 - protein, 193 aa, Zea mays subsp. mays
  misc_feature (1)..(193): Ceres Seq. ID no. 12635880
  misc_feature (22)..(193): Homolog of NCBI NO: 18376589 NR Description: putative cyclosporin A-binding protein [Picea
  misc_feature (22)..(193): Homolog of NCBI NO: 15234781 NR Description: peptidylprolyl isomerase ROC1
  misc_feature (22)..(193): Homolog of NCBI NO: 29124975 NR Description: cyclophilin [Populus tremuloides]
  misc_feature (22)..(192): Homolog of NCBI NO: 118103 NR Description: Peptidyl-prolyl cis-trans isomerase (PPIase)
  misc_feature (22)..(192): Homolog of NCBI NO: 68406 NR Description: peptidylprolyl isomerase (EC 5.2.1.8) - tomato
  misc_feature (22)..(193): Homolog of NCBI NO: 15236211 NR Description: peptidylprolyl isomerase (cyclophilin)
  misc_feature (22)..(192): Homolog of NCBI NO: 11270316 NR Description: peptidylprolyl isomerase (EC 5.2.1.8)
  misc_feature (22)..(192): Homolog of NCBI NO: 11270322 NR Description: peptidylprolyl isomerase (EC 5.2.1.8)
  misc_feature (22)..(193): Homolog of NCBI NO: 3334157 NR Description: Peptidyl-prolyl cis-trans isomerase (PPIase)
  misc_feature (23)..(193): Homolog of NCBI NO: 18076088 NR Description: cyclophilin [Ricinus communis]
TSPPLLTQPPPPLRSLSLSIKMANPRVFFDMTLDGAPAGRIVMELYKDTTPNTAENFRALCTGEKGVGKKGKPLHFKGSAFHRVIPGFMCQGGDFTAGNGTGGESIYGDKFKDENFAKKHTGAGILSMANSGPNTNGSQFFICTAETSWLDGKHVVFGKVVEGMEVVKAIEKVGSSSGTTKKKVVVADCGQVA

SEQ ID NO: 111468 - protein, 172 aa, Zea mays subsp. mays; identical to SEQ ID NO: 56071
  misc_feature (1)..(172): Ceres Seq. ID no. 12635881
  misc_feature (1)..(172): Homolog of NCBI NO: 18376589 NR Description: putative cyclosporin A-binding protein [Picea
  misc_feature (1)..(172): Homolog of NCBI NO: 15234781 NR Description: peptidylprolyl isomerase ROC1
  misc_feature (1)..(172): Homolog of NCBI NO: 29124975 NR Description: cyclophilin [Populus tremuloides]
  misc_feature (1)..(171): Homolog of NCBI NO: 118103 NR Description: Peptidyl-prolyl cis-trans isomerase (PPIase)
  misc_feature (1)..(171): Homolog of NCBI NO: 68406 NR Description: peptidylprolyl isomerase (EC 5.2.1.8) - tomato
  misc_feature (1)..(172): Homolog of NCBI NO: 15236211 NR Description: peptidylprolyl isomerase (cyclophilin)
  misc_feature (1)..(171): Homolog of NCBI NO: 11270316 NR Description: peptidylprolyl isomerase (EC 5.2.1.8)
  misc_feature (1)..(171): Homolog of NCBI NO: 11270322 NR Description: peptidylprolyl isomerase (EC 5.2.1.8)
  misc_feature (1)..(172): Homolog of NCBI NO: 3334157 NR Description: Peptidyl-prolyl cis-trans isomerase (PPIase)
  misc_feature (2)..(172): Homolog of NCBI NO: 18076088 NR Description: cyclophilin [Ricinus communis]

SEQ ID NO: 111469 - protein, 163 aa, Zea mays subsp. mays; identical to SEQ ID NO: 56072
  misc_feature (1)..(163): Ceres Seq. ID no. 12635882
  misc_feature (1)..(163): Homolog of NCBI NO: 18376589 NR Description: putative cyclosporin A-binding protein [Picea
  misc_feature (1)..(163): Homolog of NCBI NO: 15234781 NR Description: peptidylprolyl isomerase ROC1
  misc_feature (1)..(163): Homolog of NCBI NO: 29124975 NR Description: cyclophilin [Populus tremuloides]
  misc_feature (1)..(162): Homolog of NCBI NO: 118103 NR Description: Peptidyl-prolyl cis-trans isomerase (PPIase)
  misc_feature (1)..(162): Homolog of NCBI NO: 68406 NR Description: peptidylprolyl isomerase (EC 5.2.1.8) - tomato
  misc_feature (1)..(163): Homolog of NCBI NO: 15236211 NR Description: peptidylprolyl isomerase (cyclophilin)
  misc_feature (1)..(162): Homolog of NCBI NO: 11270316 NR Description: peptidylprolyl isomerase (EC 5.2.1.8)
  misc_feature (1)..(162): Homolog of NCBI NO: 11270322 NR Description: peptidylprolyl isomerase (EC 5.2.1.8)
  misc_feature (1)..(163): Homolog of NCBI NO: 3334157 NR Description: Peptidyl-prolyl cis-trans isomerase (PPIase)
  misc_feature (1)..(163): Homolog of NCBI NO: 18076088 NR Description: cyclophilin [Ricinus communis]

SEQ ID NO: 111470 - DNA, 1325 bp, Zea mays subsp. mays
  misc_feature (1)..(1325): Ceres Seq. ID no. 13599631
cactcgtcacgctccagctgccggccgcgacacgctccgcacgcgatctccactcgctccgtccatccggatccccttcctccctccccagccagccagcggccatgtcgtcctcgtcggacaaccccaacacggtcaccgaccgcggcctcttcagcaagagcagcaaggacgacggcgccgacaagaagaagaagcaggaggagaagaaagaggatggggaggagggcggcggcgggttcatcgacaaggtcaaggacttcatccacgacatcggggagaagatcgaggaggcggtggggttcggcaagcccagcgccgacgtggcccggatccacgtgccccacatcggcctccaccgcgccgacctcgtcgtcgacgtgctcatcaagaaccccaacccggtgcccatcccgctcgtcgacatcgactacctcatcgacagcgacggccggaagctcgtcgcggggctcatcccggacgccggcaccatccgcgcgcacggcgaggagacggtcaaggtgcccatcacgctcgacttcgacgacatccggagcacctacgcggacatcaagccgggcagcatcatcccctacctgctccgggtcatcttcctcgtggacgtgcccgtcttcggccgcatcaagatcccgctggacaagtccggggagatccccatcccgtacaagcccgacgtggacgtggacaagatcaagttccaccacttctccttcgaggagaccacggccaccatccacctgagcctggagaacaagaacgacttcgacctcgggctcaacctgctccagtacgagatgtggctcggcgacgacagcgtggtggaggcggagctcaccgactccaccaggatcgagaagcaggggatcaccaagatgcagatccccttcaccttcaggcccaaggacctgggatctgccgtctgggacatgatcaggggcaggggcaccggctacagcatcaagggcaagatcgatgtcgacaccccctttggcaacatgaagctgcccatcgacaaagtcggcggaaccactcgcctcaagaaggacgacgacgatgacgatgagtgaagtgctgttactgaacatacaagatagtcaagcagggagccagggaggatccagctgaactctttactctagcttatggtatctttgttgatggcatcatccgaacatcgtcagcgtttttatgtttcggtgctcagtgttctttgcgggaactcatccagtgtgtattctttctgtgttaactttgtcaagtggaaacagacctgaaaataaattccatcgcccctttcttgtttg

SEQ ID NO: 111471 - protein, 361 aa, Zea mays subsp. mays
  misc_feature (1)..(361): Ceres Seq. ID no. 13599632
  misc_feature (78)..(233): Pfam Name: Late embryogenesis abundant protein Pfam Description: Late embryogenesis abundant protein
  misc_feature (107)..(361): Homolog of NCBI NO: 3264769 NR Description: late embryogenesis-like protein [Prunus armeniaca]
  misc_feature (54)..(361): Homolog of NCBI NO: 34394536 NR Description: late embryogenesis abundant proteins-like
  misc_feature (35)..(361): Homolog of NCBI NO: 21592483 NR Description: similar to late embryogenesis abundant proteins
  misc_feature (35)..(361): Homolog of NCBI NO: 15224810 NR Description: late embryogenesis abundant proteins -related
LVTLQLPAATRSARDLHSLRPSGSPSSLPSQPAAMSSSSDNPNTVTDRGLFSKSSKDDGADKKKKQEEKKEDGEEGGGGFIDKVKDFIHDIGEKIEEAVGFGKPSADVARIHVPHIGLHRADLVVDVLIKNPNPVPIPLVDIDYLIDSDGRKLVAGLIPDAGTIRAHGEETVKVPITLDFDDIRSTYADIKPGSIIPYLLRVIFLVDVPVFGRIKIPLDKSGEIPIPYKPDVDVDKIKFHHFSFEETTATIHLSLENKNDFDLGLNLLQYEMWLGDDSVVEAELTDSTRIEKQGITKMQIPFTFRPKDLGSAVWDMIRGRGTGYSIKGKIDVDTPFGNMKLPIDKVGGTTRLKKDDDDDDE

SEQ ID NO: 111472 - protein, 358 aa, Zea mays subsp. mays
  misc_feature (1)..(358): Ceres Seq. ID no. 13599633
  misc_feature (28)..(329): Pfam Name: High molecular weight glutenin subunit Pfam Description: High molecular weight glutenin subunit
TRHAPAAGRDTLRTRSPLAPSIRIPFLPPQPASGHVVLVGQPQHGHRPRPLQQEQQGRRRRQEEEAGGEERGWGGGRRRVHRQGQGLHPRHRGEDRGGGGVRQAQRRRGPDPRAPHRPPPRRPRRRRAHQEPQPGAHPARRHRLPHRQRRPEARRGAHPGRRHHPRARRGDGQGAHHARLRRHPEHLRGHQAGQHHPLPAPGHLPRGRARLRPHQDPAGQVRGDPHPVQARRGRGQDQVPPLLLRGDHGHHPPEPGEQERLRPRAQPAPVRDVARRRQRGGGGAHRLHQDREAGDHQDADPLHLQAQGPGICRLGHDQGQGHRLQHQGQDRCRHPLWQHEAAHRQSRRNHSPQEGRRR

SEQ ID NO: 111473 - protein, 327 aa, Zea mays subsp. mays
  misc_feature (1)..(327): Ceres Seq. ID no. 13599634
  misc_feature (44)..(199): Pfam Name: Late embryogenesis abundant protein Pfam Description: Late embryogenesis abundant protein
  misc_feature (20)..(327): Homolog of NCBI NO: 34394536 NR Description: late embryogenesis abundant proteins-like
  misc_feature (1)..(327): Homolog of NCBI NO: 21592483 NR Description: similar to late embryogenesis abundant proteins
  misc_feature (73)..(327): Homolog of NCBI NO: 3264769 NR Description: late embryogenesis-like protein [Prunus armeniaca]
  misc_feature (1)..(327): Homolog of NCBI NO: 15224810 NR Description: late embryogenesis abundant proteins -related
MSSSSDNPNTVTDRGLFSKSSKDDGADKKKKQEEKKEDGEEGGGGFIDKVKDFIHDIGEKIEEAVGFGKPSADVARIHVPHIGLHRADLVVDVLIKNPNPVPIPLVDIDYLIDSDGRKLVAGLIPDAGTIRAHGEETVKVPITLDFDDIRSTYADIKPGSIIPYLLRVIFLVDVPVFGRIKIPLDKSGEIPIPYKPDVDVDKIKFHHFSFEETTATIHLSLENKNDFDLGLNLLQYEMWLGDDSVVEAELTDSTRIEKQGITKMQIPFTFRPKDLGSAVWDMIRGRGTGYSIKGKIDVDTPFGNMKLPIDKVGGTTRLKKDDDDDDE

SEQ ID NO: 111474 - DNA, 939 bp, Zea mays subsp. mays
  misc_feature (1)..(939): Ceres Seq. ID no. 13599628
ttgcttatctctaggatatgcttcttgccctccaagtcatgtactcctatatattctccctagaggcttaatgcaatacatcccacacattatacgcattctctccttcaggttctggtccagtatctgaaattgcaaccctgagtattataaaagaattgatatatgagtcatgacatttttctttttaatgagtgtgccttctatcattggccaatcaattgttgaggcacttgtagctttaaagattggagctaagggtcaaatgtggaatctggagacagatgggtcatacagtctttgatggtacatcgctaattatagtttttatttcatgttcaaggttcgtcttatcaaggagctctacgggaaccaaattggcgagctgttccatagtcttccttataatatgatagagtttgtattggaggattttgagtgcaaggttacaatcagtatccgatattcggatctactgcagaccctgccgagtcaggcaagggtcttggcttggccacttcgctcggccaagaaaatatctacaagaagcagcagtgcatcagctgcgcaaccagtaccctttcacctttcatatgccgaggaagcactcaaaaccttgtgtctaccagaagcatacgcagacattgtgctggagctaccccatgctttgaagaggattttatcctctcgggacagtgactaaatcgtgacctcaagatgtccagttttgttgtgcataagattcacatcttaatcgtggggcatgtttttgaagatattgttcagaatcttgtggtagtatagcctgcagttgtggactgcaattcctgtgaaagcaaggcagacatttgcgtgggccgctcgaaatattccggctacagttcctgttaaaagaatcaaaatcctaggaaggccttatggtcgaggcataatcttgcc

SEQ ID NO: 111475 - protein, 122 aa, Zea mays subsp. mays
  misc_feature (1)..(122): Ceres Seq. ID no. 13599629
  misc_feature (3)..(121): Homolog of NCBI NO: 18416357 NR Description: expressed protein [Arabidopsis thaliana]
  misc_feature (3)..(121): Homolog of NCBI NO: 13430738 NR Description: unknown protein [Arabidopsis thaliana]
  misc_feature (3)..(121): Homolog of NCBI NO: 10129649 NR Description: putative protein [Arabidopsis thaliana]
  misc_feature (3)..(122): Homolog of NCBI NO: 38346430 NR Description: OSJNBa0019J05.15 [Oryza sativa (japonica
MFKVRLIKELYGNQIGELFHSLPYNMIEFVLEDFECKVTISIRYSDLLQTLPSQARVLAWPLRSAKKISTRSSSASAAQPVPFHLSYAEEALKTLCLPEAYADIVLELPHALKRILSSRDSD

SEQ ID NO: 111476 - protein, 97 aa, Zea mays subsp. mays
  misc_feature (1)..(97): Ceres Seq. ID no. 13599630
  misc_feature (1)..(96): Homolog of NCBI NO: 13430738 NR Description: unknown protein [Arabidopsis thaliana]
  misc_feature (1)..(96): Homolog of NCBI NO: 18416357 NR Description: expressed protein [Arabidopsis thaliana]
  misc_feature (1)..(96): Homolog of NCBI NO: 10129649 NR Description: putative protein [Arabidopsis thaliana]
  misc_feature (1)..(97): Homolog of NCBI NO: 38346430 NR Description: OSJNBa0019J05.15 [Oryza sativa (japonica
MIEFVLEDFECKVTISIRYSDLLQTLPSQARVLAWPLRSAKKISTRSSSASAAQPVPFHLSYAEEALKTLCLPEAYADIVLELPHALKRILSSRDSD

SEQ ID NO: 111477 - DNA, 795 bp, Zea mays subsp. mays
  misc_feature (1)..(795): Ceres Seq. ID no. 12635883
gtagacgttgataattgtttggtagacccttaagaatcttaggtgtatctctttagtttgaaggttagattcagaatctgtagatttagtagcttctcttctctttctgttgtgtatatagttttcaaattgttttagcttgtgaaggtgaagtccttggtatggatatgaagaagcagattatggatgagtctgagaacttgtgcttcaagaagtccttgacgccgccgcctcctcctcctccaccgcttcctccatctccaggatatggatcaagaaagatcgagggagacagcataaccaataaacagatcaagaagttctggaggcagaagcagatcattgaagaggagcatctctttgctgctattaaggctgcagctcgtgtcagagcccgtaatctctctgatgaggactacaaacgctttgaagaaagcttggacatggaggatccagaaaccgaagttgacgagggaattaaagactggtggatgaagagtaagtacgcgtacttgaaccagcctgctcttggatctgcagattcactcaagagaaagaggttttcgtcttatgtaccaaactatttctcattcaagccttgcattcctctctatgcaacttcgcttaatgtcttttaactatgtgcaaattgtcttgcgtatatgtctacatatgtgtgtgtgtgtttgtgtctttgtacattcatgtgtaattgtgttccgtgttaatggatctggactttggtgtgtggttgtttggtttgtaagtgttgaataaaattcaatcttactatgg

SEQ ID NO: 111478 - protein, 158 aa, Zea mays subsp. mays
  misc_feature (1)..(158): Ceres Seq. ID no. 12635884
  misc_feature (100)..(146): Homolog of NCBI NO: 38345846 NR Description: OSJNBa0084K11.10 [Oryza sativa (japonica
  misc_feature (45)..(107): Homolog of NCBI NO: 38345846 NR Description: OSJNBa0084K11.10 [Oryza sativa (japonica
  misc_feature (8)..(158): Homolog of NCBI NO: 25371275 NR Description: hypothetical protein At2g17710 [imported] -
  misc_feature (3)..(158): Homolog of NCBI NO: 21618216 NR Description: unknown [Arabidopsis thaliana]
  misc_feature (1)..(158): Homolog of NCBI NO: 18398508 NR Description: expressed protein
MDMKKQIMDESENLCFKKSLTPPPPPPPPLPPSPGYGSRKIEGDSITNKQIKKFWRQKQIIEEEHLFAAIKAAARVRARNLSDEDYKRFEESLDMEDPETEVDEGIKDWWMKSKYAYLNQPALGSADSLKRKRFSSYVPNYFSFKPCIPLYATSLNVF

SEQ ID NO: 111479 - protein, 156 aa, Zea mays subsp. mays
  misc_feature (1)..(156): Ceres Seq. ID no. 12635885
  misc_feature (98)..(144): Homolog of NCBI NO: 38345846 NR Description: OSJNBa0084K11.10 [Oryza sativa (japonica
  misc_feature (43)..(105): Homolog of NCBI NO: 38345846 NR Description: OSJNBa0084K11.10 [Oryza sativa (japonica
  misc_feature (6)..(156): Homolog of NCBI NO: 25371275 NR Description: hypothetical protein At2g17710 [imported] -
  misc_feature (1)..(156): Homolog of NCBI NO: 21618216 NR Description: unknown [Arabidopsis thaliana]
  misc_feature (1)..(156): Homolog of NCBI NO: 18398508 NR Description: expressed protein
MKKQIMDESENLCFKKSLTPPPPPPPPLPPSPGYGSRKIEGDSITNKQIKKFWRQKQIIEEEHLFAAIKAAARVRARNLSDEDYKRFEESLDMEDPETEVDEGIKDWWMKSKYAYLNQPALGSADSLKRKRFSSYVPNYFSFKPCIPLYATSLNVF

SEQ ID NO: 111480 - protein, 151 aa, Zea mays subsp. mays
  misc_feature (1)..(151): Ceres Seq. ID no. 12635886
  misc_feature (93)..(139): Homolog of NCBI NO: 38345846 NR Description: OSJNBa0084K11.10 [Oryza sativa (japonica
  misc_feature (38)..(100): Homolog of NCBI NO: 38345846 NR Description: OSJNBa0084K11.10 [Oryza sativa (japonica
  misc_feature (1)..(151): Homolog of NCBI NO: 25371275 NR Description: hypothetical protein At2g17710 [imported] -
  misc_feature (1)..(151): Homolog of NCBI NO: 21618216 NR Description: unknown [Arabidopsis thaliana]
  misc_feature (1)..(151): Homolog of NCBI NO: 18398508 NR Description: expressed protein
MDESENLCFKKSLTPPPPPPPPLPPSPGYGSRKIEGDSITNKQIKKFWRQKQIIEEEHLFAAIKAAARVRARNLSDEDYKRFEESLDMEDPETEVDEGIKDWWMKSKYAYLNQPALGSADSLKRKRFSSYVPNYFSFKPCIPLYATSLNVF

SEQ ID NO: 111481 - DNA, 672 bp, Zea mays subsp. mays
  misc_feature (1)..(672): Ceres Seq. ID no. 13599418
agatctcccccatttctcctccacgctgccccctccgcatttcccgtgctcctctcgttccggcatggcggagcagacgcagccacaaggggaaggcggcgctagccccaagcacgagtccctgatggagaagctcgccgacaagctccacgtcggcggcggcaaggccgactcctcctcctcctcggactccgacagtgacgagcggccccgcccctcggcaccgcctgccgacgagctcaagcagccctccttctccgacgccgccgccacggcggccgccgaggccaaagccaaggtgttccgccttttcggccgcgagcagcccatccacaaggccctcggtggcggcaagcgtatggttctgtttcccacgctcccgatgctgcttgctattaggcttgagatttctagatcggatctgggtgggcctcggtgctcgggttgcgggctactagatctgactgctggagtacgttttatggaatgcgctagctagggtgttaagaacgaactggccgtttggatcacagattgggatcttgcctgctttgacaaatggaggcgactagtatgcttgatcactctaacgcttgcttcaaatttgatcaatccaagtcagtgcacttgggtacttatctgaactgtatgctgctaatatttctcaatgtt

SEQ ID NO: 111482 - protein, 165 aa, Zea mays subsp. mays
  misc_feature (1)..(165): Ceres Seq. ID no. 13599419
  misc_feature (37)..(123): Homolog of NCBI NO: 15236556 NR Description: expressed protein [Arabidopsis thaliana]
  misc_feature (22)..(123): Homolog of NCBI NO: 34904202 NR Description: P0492F05.25 [Oryza sativa (japonica
DLPHFSSTLPPPHFPCSSRSGMAEQTQPQGEGGASPKHESLMEKLADKLHVGGGKADSSSSSDSDSDERPRPSAPPADELKQPSFSDAAATAAAEAKAKVFRLFGREQPIHKALGGGKRMVLFPTLPMLLAIRLEISRSDLGGPRCSGCGLLDLTAGVRFMECAS

SEQ ID NO: 111483 - protein, 144 aa, Zea mays subsp. mays
  misc_feature (1)..(144): Ceres Seq. ID no. 13599420
  misc_feature (16)..(102): Homolog of NCBI NO: 15236556 NR Description: expressed protein [Arabidopsis thaliana]
  misc_feature (1)..(102): Homolog of NCBI NO: 34904202 NR Description: P0492F05.25 [Oryza sativa (japonica
MAEQTQPQGEGGASPKHESLMEKLADKLHVGGGKADSSSSSDSDSDERPRPSAPPADELKQPSFSDAAATAAAEAKAKVFRLFGREQPIHKALGGGKRMVLFPTLPMLLAIRLEISRSDLGGPRCSGCGLLDLTAGVRFMECAS

SEQ ID NO: 111484 - protein, 124 aa, Zea mays subsp. mays
  misc_feature (1)..(124): Ceres Seq. ID no. 13599421
  misc_feature (1)..(82): Homolog of NCBI NO: 15236556 NR Description: expressed protein [Arabidopsis thaliana]
  misc_feature (1)..(82): Homolog of NCBI NO: 34904202 NR Description: P0492F05.25 [Oryza sativa (japonica
MEKLADKLHVGGGKADSSSSSDSDSDERPRPSAPPADELKQPSFSDAAATAAAEAKAKVFRLFGREQPIHKALGGGKRMVLFPTLPMLLAIRLEISRSDLGGPRCSGCGLLDLTAGVRFMECAS

SEQ ID NO: 111485 - DNA, 943 bp, Zea mays subsp. mays
  misc_feature (1)..(943): Ceres Seq. ID no. 12635560
cctttctttcttgaggccgccgctccgcatctcgctcgccgcggaagccgctgtcgccgatgtccgccgcctccccgctcatgggcggcccctcctccgccgacgcgcccaccgacggcgagcaccggatgggcaccaccatcgtcggggtctgctacgccggcggcgtcgtcctcgccgccgactccaggaccagcaccggaatgtatgtggcaaaccgtgcttcggacaagattagtcagctcactgataatgtttatgtctgccgctctggatctgctgcggatacacaaattatctcagattatgtacgctattttctccaccaacacacaattcagcttgggcaaccagctaccgtgaaagttgcatctaacttggttaggttgctggcctatcagaacaagagcatgttacaagctgggatgatagttggtggatgggataagtatgagggaggccaaatttactcagtccctcttggtggaacgattctgaggcaaccattcgcaattggaggatctggttccagctatctgtatggattgatggaccatgaatggaaagaggggatgacccaggaagaagctgagaagtttgtggtgaaggtggtttcccttgctattgcacgtgatggtgctagtggaggggttgttcgcaccgttactataaatgaggagggcgttaagaggagcttccatcctggtgacaagctgccactgtggcatgaggagatggagccccagaactcgctcctcgacattctcgcggccgggagctctgatgccatggcccagtgagtttgctgaatgttgacttgtacctgatgatgacttgttctagatttgagccggatgttgttaagaaattgtgccgaattgttccacaccagcttattttcctccttgttattacgaattaatactagtacattccttgttcg

SEQ ID NO: 111486 - protein, 246 aa, Zea mays subsp. mays
  misc_feature (1)..(246): Ceres Seq. ID no. 12635561
  misc_feature (22)..(204): Pfam Name: Proteasome A-type and B-type Pfam Description: Proteasome A-type and B-type
  misc_feature (1)..(220): Homolog of NCBI NO: 464446 NR Description: Proteasome subunit beta type 6 precursor delta chain) (Macropain delta chain) (Multicatalytic
  misc_feature (10)..(220): Homolog of NCBI NO: 23110925 NR Description: proteasome beta 6 subunit
  misc_feature (1)..(220): Homolog of NCBI NO: 26347247 NR Description: unnamed protein product [Mus musculus]
  misc_feature (3)..(225): Homolog of NCBI NO: 2055301 NR Description: proteasome subunit Y [Lethenteron japonicum]
  misc_feature (1)..(220): Homolog of NCBI NO: 17380261 NR Description: Proteasome subunit beta type 6 precursor delta chain) (Macropain delta chain) (Multicatalytic
  misc_feature (20)..(213): Homolog of NCBI NO: 19113087 NR Description: proteasome component precursor
  misc_feature (19)..(240): Homolog of NCBI NO: 3024440 NR Description: Proteasome subunit beta type 6 precursor
  misc_feature (24)..(245): Homolog of NCBI NO: 21592365 NR Description: multicatalytic endopeptidase complex, proteasome
  misc_feature (15)..(245): Homolog of NCBI NO: 15235889 NR Description: 20S proteasome beta subunit A (PBA1)
  misc_feature (7)..(246): Homolog of NCBI NO: 8671502 NR Description: beta 1 subunit of 20S proteasome
MSAASPLMGGPSSADAPTDGEHRMGTTIVGVCYAGGVVLAADSRTSTGMYVANRASDKISQLTDNVYVCRSGSAADTQIISDYVRYFLHQHTIQLGQPATVKVASNLVRLLAYQNKSMLQAGMIVGGWDKYEGGQIYSVPLGGTILRQPFAIGGSGSSYLYGLMDHEWKEGMTQEEAEKFVVKVVSLAIARDGASGGVVRTVTINEEGVKRSFHPGDKLPLWHEEMEPQNSLLDILAAGSSDAMAQ

SEQ ID NO: 111487 - protein, 239 aa, Zea mays subsp. mays
  misc_feature (1)..(239): Ceres Seq. ID no. 12635562
  misc_feature (15)..(197): Pfam Name: Proteasome A-type and B-type Pfam Description: Proteasome A-type and B-type
  misc_feature (1)..(213): Homolog of NCBI NO: 464446 NR Description: Proteasome subunit beta type 6 precursor delta chain) (Macropain delta chain) (Multicatalytic
  misc_feature (3)..(213): Homolog of NCBI NO: 23110925 NR Description: proteasome beta 6 subunit
  misc_feature (1)..(213): Homolog of NCBI NO: 26347247 NR Description: unnamed protein product [Mus musculus]
  misc_feature (1)..(218): Homolog of NCBI NO: 2055301 NR Description: proteasome subunit Y [Lethenteron japonicum]
  misc_feature (1)..(213): Homolog of NCBI NO: 17380261 NR Description: Proteasome subunit beta type 6 precursor delta chain) (Macropain delta chain) (Multicatalytic
  misc_feature (13)..(206): Homolog of NCBI NO: 19113087 NR Description: proteasome component precursor
  misc_feature (12)..(233): Homolog of NCBI NO: 3024440 NR Description: Proteasome subunit beta type 6 precursor
  misc_feature (17)..(238): Homolog of NCBI NO: 21592365 NR Description: multicatalytic endopeptidase complex, proteasome
  misc_feature (8)..(238): Homolog of NCBI NO: 15235889 NR Description: 20S proteasome beta subunit A (PBA1)
  misc_feature (1)..(239): Homolog of NCBI NO: 8671502 NR Description: beta 1 subunit of 20S proteasome
MGGPSSADAPTDGEHRMGTTIVGVCYAGGVVLAADSRTSTGMYVANRASDKISQLTDNVYVCRSGSAADTQIISDYVRYFLHQHTIQLGQPATVKVASNLVRLLAYQNKSMLQAGMIVGGWDKYEGGQIYSVPLGGTILRQPFAIGGSGSSYLYGLMDHEWKEGMTQEEAEKFVVKVVSLAIARDGASGGVVRTVTINEEGVKRSFHPGDKLPLWHEEMEPQNSLLDILAAGSSDAMAQ

SEQ ID NO: 111488 - protein, 223 aa, Zea mays subsp. mays
  misc_feature (1)..(223): Ceres Seq. ID no. 12635563
  misc_feature (1)..(181): Pfam Name: Proteasome A-type and B-type Pfam Description: Proteasome A-type and B-type
  misc_feature (1)..(197): Homolog of NCBI NO: 464446 NR Description: Proteasome subunit beta type 6 precursor delta chain) (Macropain delta chain) (Multicatalytic
  misc_feature (1)..(197): Homolog of NCBI NO: 23110925 NR Description: proteasome beta 6 subunit
  misc_feature (1)..(197): Homolog of NCBI NO: 26347247 NR Description: unnamed protein product [Mus musculus]
  misc_feature (1)..(202): Homolog of NCBI NO: 2055301 NR Description: proteasome subunit Y [Lethenteron japonicum]
  misc_feature (1)..(197): Homolog of NCBI NO: 17380261 NR Description: Proteasome subunit beta type 6 precursor delta chain) (Macropain delta chain) (Multicatalytic
  misc_feature (1)..(190): Homolog of NCBI NO: 19113087 NR Description: proteasome component precursor
  misc_feature (1)..(217): Homolog of NCBI NO: 3024440 NR Description: Proteasome subunit beta type 6 precursor
  misc_feature (1)..(222): Homolog of NCBI NO: 21592365 NR Description: multicatalytic endopeptidase complex, proteasome
  misc_feature (1)..(222): Homolog of NCBI NO: 15235889 NR Description: 20S proteasome beta subunit A (PBA1)
  misc_feature (1)..(223): Homolog of NCBI NO: 8671502 NR Description: beta 1 subunit of 20S proteasome
MGTTIVGVCYAGGVVLAADSRTSTGMYVANRASDKISQLTDNVYVCRSGSAADTQIISDYVRYFLHQHTIQLGQPATVKVASNLVRLLAYQNKSMLQAGMIVGGWDKYEGGQIYSVPLGGTILRQPFAIGGSGSSYLYGLMDHEWKEGMTQEEAEKFVVKVVSLAIARDGASGGVVRTVTINEEGVKRSFHPGDKLPLWHEEMEPQNSLLDILAAGSSDAMAQ

SEQ ID NO: 111489 - DNA, 684 bp, Zea mays subsp. mays
  misc_feature (1)..(684): Ceres Seq. ID no. 12635564
tcaaaccacatcaaccaaccccaccgaatccacctctcgccggagtcccagcaaggagcgagcaagccaggaagatggacgccagcaagctgaagaaggtggccgggaagaagttcggcgggccgaggaagaagtcggtgaccaggtccgtcaaggccggcctccagttccccgtcggccgcatcgggcgctacctcaagaagggccgctacgcccagcgcgtcggctccggcgcccccgtctacctcgccgccgtcctcgagtacctcgccgccgaggtgctggagctggccgggaacgccgccaaggacaacaagaagacccgcatcgtgcccaggcacctgctgctggccatccgcaacgaccaggagctcgggaggctgctgtccggcgtcaccatcgcgcacggcggcgtcatccccaacatcaacccggtgctgctccccaagaagaccgccgagaaggccgagaagaccgccgccaagtcgcccaagaaggccaccaagtcccccaagaaggccaccaaggcctagatcgtagtagtgcggtgtgctgatggttccagtttggttagatgtagtagctgtttcactctgtatcctgcgcccctgatgtaatcggaatcaaaggggaagccgcttgcttcctcttgacttatgaattagtatcaactaagcgtttctg

SEQ ID NO: 111490 - protein, 184 aa, Zea mays subsp. mays
  misc_feature (1)..(184): Ceres Seq. ID no. 12635565
QTTSTNPTESTSRRSPSKERASQEDGRQQAEEGGREEVRRAEEEVGDQVRQGRPPVPRRPHRALPQEGPLRPARRLRRPRLPRRRPRVPRRRGAGAGRERRQGQQEDPHRAQAPAAGHPQRPGAREAAVRRHHRARRRHPQHQPGAAPQEDRREGREDRRQVAQEGHQVPQEGHQGLDRSSAVC

SEQ ID NO: 111491 - protein, 176 aa, Zea mays subsp. mays
  misc_feature (1)..(176): Ceres Seq. ID no. 12635566
  misc_feature (29)..(150): Pfam Name: Core histone H2A/H2B/H3/H4 Pfam Description: Core histone H2A/H2B/H3/H4
  misc_feature (34)..(176): Homolog of NCBI NO: 121965 NR Description: HISTONE H2A.1
  misc_feature (33)..(176): Homolog of NCBI NO: 1076776 NR Description: histone H2A.2 - wheat
  misc_feature (33)..(176): Homolog of NCBI NO: 2130104 NR Description: histone H2A.9 - wheat
  misc_feature (25)..(173): Homolog of NCBI NO: 7649159 NR Description: histone H2A [Euphorbia esula]
  misc_feature (33)..(176): Homolog of NCBI NO: 1076777 NR Description: histone H2A.3 - wheat
  misc_feature (29)..(173): Homolog of NCBI NO: 34914498 NR Description: putative histone H2A [Oryza sativa (japonica
  misc_feature (31)..(173): Homolog of NCBI NO: 729671 NR Description: Histone H2A
  misc_feature (27)..(173): Homolog of NCBI NO: 122007 NR Description: Histone H2A
  misc_feature (25)..(173): Homolog of NCBI NO: 121974 NR Description: HISTONE H2A.2.1
  misc_feature (25)..(173): Homolog of NCBI NO: 121982 NR Description: HISTONE H2A.2.2
KPHQPTPPNPPLAGVPARSEQARKMDASKLKKVAGKKFGGPRKKSVTRSVKAGLQFPVGRIGRYLKKGRYAQRVGSGAPVYLAAVLEYLAAEVLELAGNAAKDNKKTRIVPRHLLLAIRNDQELGRLLSGVTIAHGGVIPNINPVLLPKKTAEKAEKTAAKSPKKATKSPKKATKA

SEQ ID NO: 111492 - protein, 152 aa, Zea mays subsp. mays
  misc_feature (1)..(152): Ceres Seq. ID no. 12635567
  misc_feature (5)..(126): Pfam Name: Core histone H2A/H2B/H3/H4 Pfam Description: Core histone H2A/H2B/H3/H4
  misc_feature (10)..(152): Homolog of NCBI NO: 121965 NR Description: HISTONE H2A.1
  misc_feature (9)..(152): Homolog of NCBI NO: 1076776 NR Description: histone H2A.2 - wheat
  misc_feature (9)..(152): Homolog of NCBI NO: 2130104 NR Description: histone H2A.9 - wheat
  misc_feature (1)..(149): Homolog of NCBI NO: 7649159 NR Description: histone H2A [Euphorbia esula]
  misc_feature (9)..(152): Homolog of NCBI NO: 1076777 NR Description: histone H2A.3 - wheat
  misc_feature (5)..(149): Homolog of NCBI NO: 34914498 NR Description: putative histone H2A [Oryza sativa (japonica
  misc_feature (7)..(149): Homolog of NCBI NO: 729671 NR Description: Histone H2A
  misc_feature (3)..(149): Homolog of NCBI NO: 122007 NR Description: Histone H2A
  misc_feature (1)..(149): Homolog of NCBI NO: 121974 NR Description: HISTONE H2A.2.1
  misc_feature (1)..(149): Homolog of NCBI NO: 121982 NR Description: HISTONE H2A.2.2
MDASKLKKVAGKKFGGPRKKSVTRSVKAGLQFPVGRIGRYLKKGRYAQRVGSGAPVYLAAVLEYLAAEVLELAGNAAKDNKKTRIVPRHLLLAIRNDQELGRLLSGVTIAHGGVIPNINPVLLPKKTAEKAEKTAAKSPKKATKSPKKATKA

SEQ ID NO: 111493 - DNA, 972 bp, Zea mays subsp. mays
  misc_feature (1)..(972): Ceres Seq. ID no. 12635897
ctctcggtctcgctagggttttgggattttagcctccagcgccgccgccgccgcccagcgaattcgacaagcccccgagctcgccggatccgatggccgtcacgttctccgacctccacaccgccgacgggctcaaggccctcgaggcgcacctcgccggcaagacctacatctccggcgatgggatcaccaaggacgacgttaaggtgttcgcggcggtgcccgtgaagcccagcgccgagttcctgaacgctgcccgctggtacgacgccgtcgccgcggccgtttcttcaaggttccctggccaggcctctggggtgagtgcatcctcggctcctgctgcagctgctcctgctgcttccaaggatgaagatgatgacgatgacatggatctgttcggcgatgagaccgaggaggacaagaaagcagcagctgagcgtgaggctgccaagcctgcaaagaagaaagaaagtggcaaatcctccgtcctcatggacatcaagccatgggacgatgagactgacatgaagaagttggaggaggctgtccgcagtgttcaaatggagggtctcacctggggtgcatctaagcttatgcctgtgggttatggcatcaagaagctccagatcatgctgacgatcatcgacgaccttgtgtctgtcgacacccttattgaggaagtgctctgtgaggcgcccatcaacgagtatgtccagtcgtgtgacatcgttgccttcaacaagatctagaatctttgttcgcccacctgttgctgctggattcttggtactgggattggttgatctggaaaacattatgtcgtcccatttagttacccctcttacagaaatgctactggttttgtttttgagtgatgccctggtcttgaatgcctgctacctttaaatagttgaattgctgagcggtttgtaatggcgaaacatctatcatgtggagtaaaatcagtctttg

SEQ ID NO: 111494 - protein, 218 aa, Zea mays subsp. mays
  misc_feature (1)..(218): Ceres Seq. ID no. 12635898
  misc_feature (129)..(218): Pfam Name: EF-1 guanine nucleotide exchange domain Pfam Description: EF-1 guanine nucleotide exchange domain
  misc_feature (1)..(218): Homolog of NCBI NO: 15239877 NR Description: elongation factor 1B alpha-subunit
  misc_feature (1)..(218): Homolog of NCBI NO: 30687350 NR Description: elongation factor 1B alpha-subunit [Arabidopsis
  misc_feature (1)..(218): Homolog of NCBI NO: 34899162 NR Description: putative translation elongation factor eEF-1
  misc_feature (1)..(218): Homolog of NCBI NO: 3894214 NR Description: elongation factor 1 beta 2
  misc_feature (20)..(218): Homolog of NCBI NO: 27754711 NR Description: putative elongation factor 1B alpha-subunit
  misc_feature (1)..(218): Homolog of NCBI NO: 6015063 NR Description: ELONGATION FACTOR 1-BETA (EF-1-BETA)
  misc_feature (1)..(218): Homolog of NCBI NO: 38232568 NR Description: translational elongation factor 1 subunit Bbeta
  misc_feature (1)..(218): Homolog of NCBI NO: 232031 NR Description: ELONGATION FACTOR 1-BETA' (EF-1-BETA')
  misc_feature (1)..(218): Homolog of NCBI NO: 38175744 NR Description: putative translation elongation factor eEF-1
  misc_feature (1)..(218): Homolog of NCBI NO: 232033 NR Description: ELONGATION FACTOR 1-BETA' (EF-1-BETA')
MAVTFSDLHTADGLKALEAHLAGKTYISGDGITKDDVKVFAAVPVKPSAEFLNAARWYDAVAAAVSSRFPGQASGVSASSAPAAAAPAASKDEDDDDDMDLFGDETEEDKKAAAEREAAKPAKKKESGKSSVLMDIKPWDDETDMKKLEEAVRSVQMEGLTWGASKLMPVGYGIKKLQIMLTIIDDLVSVDTLIEEVLCEAPINEYVQSCDIVAFNKI

SEQ ID NO: 111495 - protein, 120 aa, Zea mays subsp. mays
  misc_feature (1)..(120): Ceres Seq. ID no. 12635899
  misc_feature (31)..(120): Pfam Name: EF-1 guanine nucleotide exchange domain Pfam Description: EF-1 guanine nucleotide exchange domain
  misc_feature (1)..(120): Homolog of NCBI NO: 3894214 NR Description: elongation factor 1 beta 2
  misc_feature (1)..(120): Homolog of NCBI NO: 38232568 NR Description: translational elongation factor 1 subunit Bbeta
  misc_feature (1)..(120): Homolog of NCBI NO: 27754711 NR Description: putative elongation factor 1B alpha-subunit
  misc_feature (1)..(120): Homolog of NCBI NO: 6015063 NR Description: ELONGATION FACTOR 1-BETA (EF-1-BETA)
  misc_feature (1)..(120): Homolog of NCBI NO: 15239877 NR Description: elongation factor 1B alpha-subunit
  misc_feature (1)..(120): Homolog of NCBI NO: 30687350 NR Description: elongation factor 1B alpha-subunit [Arabidopsis
  misc_feature (1)..(120): Homolog of NCBI NO: 34899162 NR Description: putative translation elongation factor eEF-1
  misc_feature (1)..(120): Homolog of NCBI NO: 232031 NR Description: ELONGATION FACTOR 1-BETA' (EF-1-BETA')
  misc_feature (1)..(120): Homolog of NCBI NO: 38175744 NR Description: putative translation elongation factor eEF-1
  misc_feature (1)..(120): Homolog of NCBI NO: 232033 NR Description: ELONGATION FACTOR 1-BETA' (EF-1-BETA')
MDLFGDETEEDKKAAAEREAAKPAKKKESGKSSVLMDIKPWDDETDMKKLEEAVRSVQMEGLTWGASKLMPVGYGIKKLQIMLTIIDDLVSVDTLIEEVLCEAPINEYVQSCDIVAFNKI

SEQ ID NO: 111496 - DNA, 1446 bp, Zea mays subsp. mays
  misc_feature (1)..(1446): Ceres Seq. ID no. 13599626
  misc_feature: MA Experiment ID: 20000535 Result: Up-regulated in Transcription
  misc_feature: MA Experiment 20000535 PARAMETER Experiment Name: Zm_Hybrid_Seed_Dev_P Parameter: DAP Value: 30 vs. 12
  misc_feature: MA Experiment 20000535 PARAMETER Experiment Name: Zm_Hybrid_Seed_Dev_P Parameter: Organism Value: Zea mays
  misc_feature: MA Experiment 20000535 PARAMETER Experiment Name: Zm_Hybrid_Seed_Dev_P Parameter: Plant Line Value: 35A19
  misc_feature: MA Experiment 20000535 PARAMETER Experiment Name: Zm_Hybrid_Seed_Dev_P Parameter: Tissue Value: Embryo vs. Unfert Floret
ctagaacatcctaatcgaaaaacagtcacagactcacagcacacgcagccaccgaggactgcattgctagcatccatcgccatcagtcgccatatcgatctgcatggatcgggtgccgccgccggtctccatgcaggtggctgcgatgcagcgacatcagcagcagcagcagttcgtccaccacctgcagcaggtccaccagcaaggtacgcagcacgagcaaccgccgccaccgcaccagaacggcagcagcagcagcggcaggaccggcggcggccgcaagtgctgcccgctgcggcggtcgcgcaaggggtgcatgaagggcaagggcgggccggacaaccagcagtgccccttccgcggcgtccggcagcgcacctggggcaagtgggtggccgagatccgcgagcccaaccgcggcgcgcgcctctggctcggcaccttcggcagcgcgctcgaggccgcgcgcgcctacgacgccgcggccaggacgctctacggcgactgcgctcgcctaaacctgcagctagtgcctccgtcggcggctgcggcagccgccggaggaggaggaccggcggtcgtcgcgtctccgtcccctgacaccgtggctggccctgctgctgctggtggtggtggtggacacaactgccatcaccagtacctgcagcagcagcacgccatggcggcgcctatgatgatgatgcactcctcctgctgctccgccgacgggtcgtcgtcaaactccgattccatttccaactcctgctcgtcaccggtgaccacggcggcctcgccagcctacagccaccaccagacgacgttccaggcacctgcaccgccgccgtcatgcggcgcaatgacgatggcggccgctgcgccgcatgtgcagggcttccacgtcggcgacgacgacactaccaccgcgatggcgatgcaccgtcatcagcagatgatgcgcgagctggcggaggcgcctctgcaccaggaggcagacgacttcgaggacttcgtgacgcggctgcccaaggcggaggacttcggcctgcagggcttccaggaggtggccctcgaggtgttcgacgacgccgccggcatctgggaccacgcggccgcctgggagccccccaccatgatgatcgactctggcgcccagccccagcagcagctcgtcgtccctctttgactcgctcgtcgatgacgccgcgcgccctgcaccagctactgcttcgttcccagctgcatcgaactggccggtgtacgtggcggagtgatacgacgcgcgcgccatgcatgacaccactgcacaggtggttcctgcatgtgttgcttacgcctcgagacgtacgtacataataccagtatgtatgtaccggatggttactctgatatgactgtatttctcctagttattcgtgagtttcatttggataatgtttcaggttttgt

SEQ ID NO: 111497 - protein, 359 aa, Zea mays subsp. mays
  misc_feature (1)..(359): Ceres Seq. ID no. 15218863
  misc_feature (83)..(140): Pfam Name: AP2 domain Pfam Description: AP2 domain
  misc_feature (59)..(168): Homolog of NCBI NO: 25989383 NR Description: DREB1 [Oryza sativa]
  misc_feature (59)..(168): Homolog of NCBI NO: 22594971 NR Description: DRE binding protein 2 [Oryza sativa]
  misc_feature (67)..(167): Homolog of NCBI NO: 15222261 NR Description: DRE binding transcription factor, putative
  misc_feature (67)..(167): Homolog of NCBI NO: 9369375 NR Description: F10A5.29 [Arabidopsis thaliana]
  misc_feature (56)..(144): Homolog of NCBI NO: 15226661 NR Description: AP2 domain transcription factor, putative (DREB2)
  misc_feature (57)..(172): Homolog of NCBI NO: 38099059 NR Description: dehydration-responsive element binding protein 2
  misc_feature (57)..(238): Homolog of NCBI NO: 15488459 NR Description: AP2-containing protein [Triticum aestivum]
  misc_feature (63)..(169): Homolog of NCBI NO: 25992100 NR Description: dehydration responsive element binding protein
  misc_feature (57)..(140): Homolog of NCBI NO: 8346773 NR Description: AP2-domain DNA-binding protein [Catharanthus
  misc_feature (46)..(193): Homolog of NCBI NO: 28071316 NR Description: P0705A05.24 [Oryza sativa (japonica
MDRVPPPVSMQVAAMQRHQQQQQFVHHLQQVHQQGTQHEQPPPPHQNGSSSSGRTGGGRKCCPLRRSRKGCMKGKGGPDNQQCPFRGVRQRTWGKWVAEIREPNRGARLWLGTFGSALEAARAYDAAARTLYGDCARLNLQLVPPSAAAAAAGGGGPAVVASPSPDTVAGPAAAGGGGGHNCHHQYLQQQHAMAAPMMMMHSSCCSADGSSSNSDSISNSCSSPVTTAASPAYSHHQTTFQAPAPPPSCGAMTMAAAAPHVQGFHVGDDDTTTAMAMHRHQQMMRELAEAPLHQEADDFEDFVTRLPKAEDFGLQGFQEVALEVFDDAAGIWDHAAAWEPPTMMIDSGAQPQQQLVVPL

SEQ ID NO: 111498 - protein, 350 aa, Zea mays subsp. mays
  misc_feature (1)..(350): Ceres Seq. ID no. 15218864
  misc_feature (74)..(131): Pfam Name: AP2 domain Pfam Description: AP2 domain
  misc_feature (50)..(159): Homolog of NCBI NO: 25989383 NR Description: DREB1 [Oryza sativa]
  misc_feature (50)..(159): Homolog of NCBI NO: 22594971 NR Description: DRE binding protein 2 [Oryza sativa]
  misc_feature (58)..(158): Homolog of NCBI NO: 15222261 NR Description: DRE binding transcription factor, putative
  misc_feature (58)..(158): Homolog of NCBI NO: 9369375 NR Description: F10A5.29 [Arabidopsis thaliana]
  misc_feature (47)..(135): Homolog of NCBI NO: 15226661 NR Description: AP2 domain transcription factor, putative (DREB2)
  misc_feature (48)..(163): Homolog of NCBI NO: 38099059 NR Description: dehydration-responsive element binding protein 2
  misc_feature (48)..(229): Homolog of NCBI NO: 15488459 NR Description: AP2-containing protein [Triticum aestivum]
  misc_feature (54)..(160): Homolog of NCBI NO: 25992100 NR Description: dehydration responsive element binding protein
  misc_feature (48)..(131): Homolog of NCBI NO: 8346773 NR Description: AP2-domain DNA-binding protein [Catharanthus
  misc_feature (37)..(184): Homolog of NCBI NO: 28071316 NR Description: P0705A05.24 [Oryza sativa (japonica
MQVAAMQRHQQQQQFVHHLQQVHQQGTQHEQPPPPHQNGSSSSGRTGGGRKCCPLRRSRKGCMKGKGGPDNQQCPFRGVRQRTWGKWVAEIREPNRGARLWLGTFGSALEAARAYDAAARTLYGDCARLNLQLVPPSAAAAAAGGGGPAVVASPSPDTVAGPAAAGGGGGHNCHHQYLQQQHAMAAPMMMMHSSCCSADGSSSNSDSISNSCSSPVTTAASPAYSHHQTTFQAPAPPPSCGAMTMAAAAPHVQGFHVGDDDTTTAMAMHRHQQMMRELAEAPLHQEADDFEDFVTRLPKAEDFGLQGFQEVALEVFDDAAGIWDHAAAWEPPTMMIDSGAQPQQQLVVPL

SEQ ID NO: 111499 - protein, 345 aa, Zea mays subsp. mays
  misc_feature (1)..(345): Ceres Seq. ID no. 15218865
  misc_feature (69)..(126): Pfam Name: AP2 domain Pfam Description: AP2 domain
  misc_feature (45)..(154): Homolog of NCBI NO: 25989383 NR Description: DREB1 [Oryza sativa]
  misc_feature (45)..(154): Homolog of NCBI NO: 22594971 NR Description: DRE binding protein 2 [Oryza sativa]
  misc_feature (53)..(153): Homolog of NCBI NO: 15222261 NR Description: DRE binding transcription factor, putative
  misc_feature (53)..(153): Homolog of NCBI NO: 9369375 NR Description: F10A5.29 [Arabidopsis thaliana]
  misc_feature (42)..(130): Homolog of NCBI NO: 15226661 NR Description: AP2 domain transcription factor, putative (DREB2)
  misc_feature (43)..(158): Homolog of NCBI NO: 38099059 NR Description: dehydration-responsive element binding protein 2
  misc_feature (43)..(224): Homolog of NCBI NO: 15488459 NR Description: AP2-containing protein [Triticum aestivum]
  misc_feature (49)..(155): Homolog of NCBI NO: 25992100 NR Description: dehydration responsive element binding protein
  misc_feature (43)..(126): Homolog of NCBI NO: 8346773 NR Description: AP2-domain DNA-binding protein [Catharanthus
  misc_feature (32)..(179): Homolog of NCBI NO: 28071316 NR Description: P0705A05.24 [Oryza sativa (japonica
MQRHQQQQQFVHHLQQVHQQGTQHEQPPPPHQNGSSSSGRTGGGRKCCPLRRSRKGCMKGKGGPDNQQCPFRGVRQRTWGKWVAEIREPNRGARLWLGTFGSALEAARAYDAAARTLYGDCARLNLQLVPPSAAAAAAGGGGPAVVASPSPDTVAGPAAAGGGGGHNCHHQYLQQQHAMAAPMMMMHSSCCSADGSSSNSDSISNSCSSPVTTAASPAYSHHQTTFQAPAPPPSCGAMTMAAAAPHVQGFHVGDDDTTTAMAMHRHQQMMRELAEAPLHQEADDFEDFVTRLPKAEDFGLQGFQEVALEVFDDAAGIWDHAAAWEPPTMMIDSGAQPQQQLVVPL

SEQ ID NO: 111500 - DNA, 1090 bp, Zea mays subsp. mays
  misc_feature (1)..(1090): Ceres Seq. ID no. 13599627
agctagcttacacagaagggcgattcgatcgaggccgccgccccgccgccgccgccgccggagacgatcccctgcagtcagttagttaagctacaaaatggcctcgctggacaccgtcagaggagatcttggcctggttgttttgtacctaagcaaggctgaggcaagagataagatctgtagagctatacaatatggatccaagttcctgagcaacggacaaccarggacctgcacagaatgtcgacaaatcaactagtctagctcggaaagttttccgactgtttaagtttgttaatgatctccaagctctgattagcccccctgccaaaggaactccacttccgctgatcttacttggaaagtcgaagaacgcgatgctgtcaactttcctctttctggaccaaattgtttgggctgggagaacaggagtatacaagaacaaggagcgagcagagtttcttggcaggatagcattttattgctttctcggatccaatacctgtactactatcatcgagctagccgagcttcagcggctttccaaatcgatgaagaagttagagaaggacctcaagcaccaagagctgtacaagaacgagcagtatcggatgaagctgaagaagtccaacgagaggctgctcgccctcatcaaatcgagcctcgacatagtcgtcgccgtggggctgctgcaactggcaccaaaaaaggtcactcctcgcgtcacgggtgcgtttgggttcgctagctcgctcatcgcctgttaccagttgcttccagccccagccaaatccaagtgatctgcctgcccacctcgggccaggcagctggtgcattgattggtgaaacggcggttgctgtcgccccttgttgtcgctgatactgataagaaataaatctggaccgaactgtccgtccccgtaggatataaccaaggattattgctgtgcatgctggcattgccgagggccatctcatagcctggttgatctgccttgccttagacttgatcatgtagcacgcttgtatttgtatggtccggtgtgccactatcatactacaactgttgcgaaataattagaaatttcat

SEQ ID NO: 111501 - protein, 140 aa, Zea mays subsp. mays; identical to SEQ ID NO: 64461
  misc_feature (1)..(140): Ceres Seq. ID no. 15218866
  misc_feature (1)..(133): Pfam Name: Peroxisomal biogenesis factor 11 (PEX11) Pfam Description: Peroxisomal biogenesis factor 11 (PEX11)
  misc_feature (38)..(140): Homolog of NCBI NO: 14335058 NR Description: At2g45740/F4I18.28 [Arabidopsis thaliana]
  misc_feature (1)..(140): Homolog of NCBI NO: 11358250 NR Description: hypothetical protein T27I15_160 - Arabidopsis
  misc_feature (1)..(140): Homolog of NCBI NO: 30695340 NR Description: expressed protein [Arabidopsis thaliana]
  misc_feature (1)..(140): Homolog of NCBI NO: 8489788 NR Description: unknown [Lycopersicon esculentum]
  misc_feature (1)..(140): Homolog of NCBI NO: 18378887 NR Description: expressed protein [Arabidopsis thaliana]
  misc_feature (1)..(132): Homolog of NCBI NO: 7486466 NR Description: hypothetical protein At2g45740 [imported] -
  misc_feature (1)..(140): Homolog of NCBI NO: 18406877 NR Description: expressed protein [Arabidopsis thaliana]
  misc_feature (1)..(136): Homolog of NCBI NO: 34898026 NR Description: ESTs AU064537(E31904),AU082147(E31904) correspond a region of the predicted gene.~Similar to Arabidopsis thaliana
  misc_feature (1)..(140): Homolog of NCBI NO: 25553559 NR Description: OSJNBa0038F22.7 [Oryza sativa (japonica

SEQ ID NO: 111502 - protein, 82 aa, Zea mays subsp. mays
  misc_feature (1)..(82): Ceres Seq. ID no. 15218867
  misc_feature (1)..(75): Pfam Name: Peroxisomal biogenesis factor 11 (PEX11) Pfam Description: Peroxisomal biogenesis factor 11 (PEX11)
  misc_feature (1)..(82): Homolog of NCBI NO: 14335058 NR Description: At2g45740/F4I18.28 [Arabidopsis thaliana]
  misc_feature (1)..(82): Homolog of NCBI NO: 11358250 NR Description: hypothetical protein T27I15_160 - Arabidopsis
  misc_feature (1)..(82): Homolog of NCBI NO: 30695340 NR Description: expressed protein [Arabidopsis thaliana]
  misc_feature (1)..(82): Homolog of NCBI NO: 8489788 NR Description: unknown [Lycopersicon esculentum]
  misc_feature (1)..(82): Homolog of NCBI NO: 18378887 NR Description: expressed protein [Arabidopsis thaliana]
  misc_feature (1)..(74): Homolog of NCBI NO: 7486466 NR Description: hypothetical protein At2g45740 [imported] -
  misc_feature (1)..(82): Homolog of NCBI NO: 18406877 NR Description: expressed protein [Arabidopsis thaliana]
  misc_feature (1)..(78): Homolog of NCBI NO: 34898026 NR Description: ESTs AU064537(E31904),AU082147(E31904) correspond a region of the predicted gene.~Similar to Arabidopsis thaliana
  misc_feature (1)..(82): Homolog of NCBI NO: 25553559 NR Description: OSJNBa0038F22.7 [Oryza sativa (japonica
MKKLEKDLKHQELYKNEQYRMKLKKSNERLLALIKSSLDIVVAVGLLQLAPKKVTPRVTGAFGFASSLIACYQLLPAPAKSK

SEQ ID NO: 111503 - DNA, 778 bp, Zea mays subsp. mays
  misc_feature (1)..(778): Ceres Seq. ID no. 13623093
attttcctttctcctccgttttttctctgccctttctctcctctcttatctcctgcggtagaagaaccatggcttcaaccaccgatttcacaaagtctttactatctcccttctcccaacatggctttaattcccagagaggaagtagcagacagaacaagaacgcgacatggccgaatcagcacaagcccaataggtctcttcgtgtgaacgggttgttcggaggtggaaacaacaaagataataataatactgaggatggacagtcaaaggcaggaggaatctttggtaatatgcagaatatgtatgagactgtcaagaaagctcaaatggttgttcaagttgaggcggttcgtgttcaaaaagagttagctgccgcagagtttgatggttattgtgaaggcgagcttgtcaaggttacgttatcaggtaaccagcaaccgatccgaactgatataacagaggcagcaatggagttaggctctgagaaactttcactgttggtcacggaggcttacaaggacgcgcacgcgaagagtgtcgtggctatgaaagaaagaatgagtgaccttgcgcagagcttaggcatgccacctggcctcagcgaaggaatgaagtaaagaaactgtttttgttgtttgtcacgactcaagtttcagttgtgagtttttctctatttatcatcagtcaggcagagaagcaaaaacctttgtactaatactattatggaatcagatatttttctcattaccctgagtatggtctataatttcaacgc

SEQ ID NO: 111504 - protein, 205 aa, Zea mays subsp. mays
  misc_feature (1)..(205): Ceres Seq. ID no. 13623094
  misc_feature (105)..(197): Pfam Name: Uncharacterised BCR, YbaB family COG0718 Pfam Description: Uncharacterised BCR, YbaB family COG0718
  misc_feature (87)..(200): Homolog of NCBI NO: 22298265 NR Description: ORF_ID:tlr0723~hypothetical protein
  misc_feature (82)..(197): Homolog of NCBI NO: 23040346 NR Description: hypothetical protein [Trichodesmium erythraeum
  misc_feature (84)..(197): Homolog of NCBI NO: 23124992 NR Description: hypothetical protein [Nostoc punctiforme]
  misc_feature (84)..(197): Homolog of NCBI NO: 17232559 NR Description: hypothetical protein [Nostoc sp. PCC 7120]
  misc_feature (75)..(200): Homolog of NCBI NO: 24414799 NR Description: hypothetical protein [Synechococcus sp. PCC 7942]
  misc_feature (49)..(199): Homolog of NCBI NO: 28207763 NR Description: CR084 protein [Chlamydomonas reinhardtii]
  misc_feature (24)..(205): Homolog of NCBI NO: 21553866 NR Description: unknown [Arabidopsis thaliana]
  misc_feature (24)..(205): Homolog of NCBI NO: 15234797 NR Description: expressed protein [Arabidopsis thaliana]
  misc_feature (23)..(205): Homolog of NCBI NO: 25412184 NR Description: hypothetical protein At2g24020 [imported] -
  misc_feature (22)..(205): Homolog of NCBI NO: 18400436 NR Description: expressed protein [Arabidopsis thaliana]
FPFSSVFSLPFLSSLISCGRRTMASTTDFTKSLLSPFSQHGFNSQRGSSRQNKNATWPNQHKPNRSLRVNGLFGGGNNKDNNNTEDGQSKAGGIFGNMQNMYETVKKAQMVVQVEAVRVQKELAAAEFDGYCEGELVKVTLSGNQQPIRTDITEAAMELGSEKLSLLVTEAYKDAHAKSVVAMKERMSDLAQSLGMPPGLSEGMK

SEQ ID NO: 111505 - protein, 183 aa, Zea mays subsp. mays
  misc_feature (1)..(183): Ceres Seq. ID no. 13623095
  misc_feature (83)..(175): Pfam Name: Uncharacterised BCR, YbaB family COG0718 Pfam Description: Uncharacterised BCR, YbaB family COG0718
  misc_feature (65)..(178): Homolog of NCBI NO: 22298265 NR Description: ORF_ID:tlr0723~hypothetical protein
  misc_feature (60)..(175): Homolog of NCBI NO: 23040346 NR Description: hypothetical protein [Trichodesmium erythraeum
  misc_feature (62)..(175): Homolog of NCBI NO: 23124992 NR Description: hypothetical protein [Nostoc punctiforme]
  misc_feature (62)..(175): Homolog of NCBI NO: 17232559 NR Description: hypothetical protein [Nostoc sp. PCC 7120]
  misc_feature (53)..(178): Homolog of NCBI NO: 24414799 NR Description: hypothetical protein [Synechococcus sp. PCC 7942]
  misc_feature (27)..(177): Homolog of NCBI NO: 28207763 NR Description: CR084 protein [Chlamydomonas reinhardtii]
  misc_feature (2)..(183): Homolog of NCBI NO: 21553866 NR Description: unknown [Arabidopsis thaliana]
  misc_feature (2)..(183): Homolog of NCBI NO: 15234797 NR Description: expressed protein [Arabidopsis thaliana]
  misc_feature (1)..(183): Homolog of NCBI NO: 25412184 NR Description: hypothetical protein At2g24020 [imported] -
  misc_feature (1)..(183): Homolog of NCBI NO: 18400436 NR Description: expressed protein [Arabidopsis thaliana]
MASTTDFTKSLLSPFSQHGFNSQRGSSRQNKNATWPNQHKPNRSLRVNGLFGGGNNKDNNNTEDGQSKAGGIFGNMQNMYETVKKAQMVVQVEAVRVQKELAAAEFDGYCEGELVKVTLSGNQQPIRTDITEAAMELGSEKLSLLVTEAYKDAHAKSVVAMKERMSDLAQSLGMPPGLSEGMK

SEQ ID NO: 111506 - protein, 108 aa, Zea mays subsp. mays
  misc_feature (1)..(108): Ceres Seq. ID no. 13623096
  misc_feature (8)..(100): Pfam Name: Uncharacterised BCR, YbaB family COG0718 Pfam Description: Uncharacterised BCR, YbaB family COG0718
  misc_feature (1)..(103): Homolog of NCBI NO: 22298265 NR Description: ORF_ID:tlr0723~hypothetical protein
  misc_feature (1)..(100): Homolog of NCBI NO: 23040346 NR Description: hypothetical protein [Trichodesmium erythraeum
  misc_feature (1)..(100): Homolog of NCBI NO: 23124992 NR Description: hypothetical protein [Nostoc punctiforme]
  misc_feature (1)..(100): Homolog of NCBI NO: 17232559 NR Description: hypothetical protein [Nostoc sp. PCC 7120]
  misc_feature (1)..(103): Homolog of NCBI NO: 24414799 NR Description: hypothetical protein [Synechococcus sp. PCC 7942]
  misc_feature (1)..(102): Homolog of NCBI NO: 28207763 NR Description: CR084 protein [Chlamydomonas reinhardtii]
  misc_feature (1)..(108): Homolog of NCBI NO: 21553866 NR Description: unknown [Arabidopsis thaliana]
  misc_feature (1)..(108): Homolog of NCBI NO: 15234797 NR Description: expressed protein [Arabidopsis thaliana]
  misc_feature (1)..(108): Homolog of NCBI NO: 25412184 NR Description: hypothetical protein At2g24020 [imported] -
  misc_feature (1)..(108): Homolog of NCBI NO: 18400436 NR Description: expressed protein [Arabidopsis thaliana]
MQNMYETVKKAQMVVQVEAVRVQKELAAAEFDGYCEGELVKVTLSGNQQPIRTDITEAAMELGSEKLSLLVTEAYKDAHAKSVVAMKERMSDLAQSLGMPPGLSEGMK

SEQ ID NO: 111507 - DNA, 1707 bp, Zea mays subsp. mays
  misc_feature (1)..(1707): Ceres Seq. ID no. 13623196
  misc_feature: MA Experiment ID: 108535 Result: Up-regulated in Transcription
  misc_feature: MA Experiment 108535 PARAMETER Experiment Name: Zm_Meristem_P Parameter: Age (day) Value: 8
  misc_feature: MA Experiment 108535 PARAMETER Experiment Name: Zm_Meristem_P Parameter: Organism Value: Zea mays
  misc_feature: MA Experiment 108535 PARAMETER Experiment Name: Zm_Meristem_P Parameter: Plant Line Value: 35A19
  misc_feature: MA Experiment 108535 PARAMETER Experiment Name: Zm_Meristem_P Parameter: Tissue Value: Root Meristem vs. Above Root Meristem
tagtgcaactgaaataaaggaggggcaaaatgtggaatttatatggtttagtcccctttagtcaccccttgagggactagagactaaaacaatttagtccatgttttagtcccgccgtttggcaatttagagactaaatatgactaaaatgaagggactaatctttagtccctcaaaccaaacgggacctaaaaaactaaagagttcctagtgttttacgtagtcaactttgatcatgaattatgtgggatcacatgtaatctcccccatttctattttttttagaattttgggaagtatgtggaaagtgcataggtttaaaccaggtggaacagccaataaactgctcaatttaaaaggctaattctattgcagcttaaaagcattcgagtttgtgggcctagatattggcctcaggtgataaaacttgcacctgaaggtatagtacttatcctgaatacttcacaacttgtcaaaaaaagttgcattatattcttatcataattctcaaatagacaagccatggtggagatctggagacaagacaaatccattcaatgggggagtactctacataaagcgaaaagttggatcttgctcctactctgacgatccaattggatgtcaatcgttaatttcacgggcaatgcatgaggtttatgtttttttacaactgbtgttatatcttagtttattgactatgtgttatattgacttataattttacttttcttacatgaaacttcaggtctgtgatgcaccatctgctagttgcagtaatcaaccaaacagcactaatggtagctacttcagagttgatcagctagtaagcactttctcggccaatccaagcttgattgcttttgcaaaactctgctccgtgtcatggaagagcagatgcaatagcaattttcaggagttctgttctcaagtgctatatgaatgtatgagcaaagatagaccatcactgttacaggcctatatcagtttttacacaacaatagagttaatgtgggagcatttgaagactgggaattttcctttttataattcccttttccttcccaacttgaaggtcgctttggcctacaacgaagcattagttgattctagaatcacaaatggaggaattattcattcgacattcttggagtcacttatgaagcgagtgggagacatctttgcggagctgccaaacctcaaggacaacctccaccgatacttgagcacgggcacatggcctgacacacaaaacgacgtggtggttctctcgtggtacctccaatggtacaatataccacctgcccatgttgtggcttctgcagttgagaaggtcagaccgagagtccctgccggtgtatctatgctcccactgctttcgcatcctgctgccaaccacacaccttgtgggactgatggagatcgagaaggtacagattgtcatggaatgctaaaggatgagcgtggaaaattcaatcaaccttctctgcatgcgggttacttgtgatgaacggtagcaagtattgcttagtgcacttgtgatgaaatctgccagggactaagctgttctgaattaagtttgagacaaaagaatcccataatttttattgtgctttgctttagattcatattttvtgcatgaattgtttcgattctacccaygagaagtactccctctgtccttatcagaggtcaaacactctaagt

SEQ ID NO: 111508 - protein, 256 aa, Zea mays subsp. mays
  misc_feature (1)..(256): Ceres Seq. ID no. 15219311
  misc_feature (113)..(214): Homolog of NCBI NO: 15239171 NR Description: E3 ubiquitin ligase APC1, putative [Arabidopsis
  misc_feature (27)..(53): Homolog of NCBI NO: 15239171 NR Description: E3 ubiquitin ligase APC1, putative [Arabidopsis
MKLQVCDAPSASCSNQPNSTNGSYFRVDQLVSTFSANPSLIAFAKLCSVSWKSRCNSNFQEFCSQVLYECMSKDRPSLLQAYISFYTTIELMWEHLKTGNFPFYNSLFLPNLKVALAYNEALVDSRITNGGIIHSTFLESLMKRVGDIFAELPNLKDNLHRYLSTGTWPDTQNDVVVLSWYLQWYNIPPAHVVASAVEKVRPRVPAGVSMLPLLSHPAANHTPCGTDGDREGTDCHGMLKDERGKFNQPSLHAGYL

SEQ ID NO: 111509 - protein, 186 aa, Zea mays subsp. mays
  misc_feature (1)..(186): Ceres Seq. ID no. 15219312
  misc_feature (43)..(144): Homolog of NCBI NO: 15239171 NR Description: E3 ubiquitin ligase APC1, putative [Arabidopsis
MSKDRPSLLQAYISFYTTIELMWEHLKTGNFPFYNSLFLPNLKVALAYNEALVDSRITNGGIIHSTFLESLMKRVGDIFAELPNLKDNLHRYLSTGTWPDTQNDVVVLSWYLQWYNIPPAHVVASAVEKVRPRVPAGVSMLPLLSHPAANHTPCGTDGDREGTDCHGMLKDERGKFNQPSLHAGYL

SEQ ID NO: 111510 - protein, 165 aa, Zea mays subsp. mays
  misc_feature (1)..(165): Ceres Seq. ID no. 15219313
  misc_feature (22)..(123): Homolog of NCBI NO: 15239171 NR Description: E3 ubiquitin ligase APC1, putative [Arabidopsis
MWEHLKTGNFPFYNSLFLPNLKVALAYNEALVDSRITNGGIIHSTFLESLMKRVGDIFAELPNLKDNLHRYLSTGTWPDTQNDVVVLSWYLQWYNIPPAHVVASAVEKVRPRVPAGVSMLPLLSHPAANHTPCGTDGDREGTDCHGMLKDERGKFNQPSLHAGYL

SEQ ID NO: 111511 - DNA, 2008 bp, Zea mays subsp. mays
  misc_feature (1)..(2008): Ceres Seq. ID no. 15224811
ttccagtaccggcgccgctggccgactcccgtggcgacaacctgagaccggagcgccataatcctccggattcgagacaccgagcgcaccgcgagctttatctgctgtgtttggagctgaaaatgagtgaggcgaatactactcagcttgaccttgagaaaggattttctcaagtgtctaatgataatgattcgagtagccctgcgaccatgcacaagatgaaagttgagacagaagatggtggaagtgagattgaatcacccactccagaaaaacgtgaatctagaagcaaaagggtcgttgtgagttcactggcaaggaatttgcttgcagagaggtacagagacagattttcaaatcagctggtggaagatgagggtcagacagatgatgaagactataatggaagtgtttcgcctagtggtagccaatcacttttttcagaaagcattgaactgcttgataaacacaaggatttgctgagtcttttcaatagaatggagagttctattagattgcttcacctgcgtaagaagatggctacatttaataatattgccacccaggtggagattctcacaaaaaggaagttattatacagtcatttggcccagatgaagcatttattgccagaggcaatccagataaagaggatactagtacatgatgagaagagcctatgcatgtatgctgatatggaaatcacacttttaatggatgttgtggaatgcacaagtcctgatcagtctccatccatgacaatttgtgaggctttttactcaaagctattgagttttttggatgctcatcataagggtgcagacattcctgaggcaatcctaccggaactctttaattcaaagccaagggagaagttatatcttgaggcagtacacaatggatatgctgctgagtcacctctgcagggtgccactgaggagagattcataaatgcttcccactttccacaatcttttcgaaaactcatgtcgcagaaaatcattgctgatggaattcaaaagactcaattgctgtctgatccagcagatttgagttctgtgattgcttatggtacaaaagggtcaaacggaaaccctaaaaaggaagatgaacatgctccagttccagggaagtatgaaatttctgctactccaagccgccatttgatctcttgttgtcaagagggtacgccaaaacaagggacctcagagtcaccattgttctctggaacacctgtaatgcagacaccaaaaaggcaattgccgacttcacttgacaaacccaaggccacatgtggacacattagtgaaccatgttcagccagttctgcccgcagatcactaaatacattgttaaagtttgaagtaggaagcccttattatgatggagtggaacatacggatacaactaaaaagggcatgatctcagaagactcatcgtattttaacaagtcatttgaggaagatagtcctgtcttatttattgataaagacaaaatcgacgaagtagactcagtggatagccaggaaaagatagcttcgctacataccacatttgacatagtctgcgacatttctcatcctaccaagaattcacttatcacgaaacaggaacttttccataatattcttgccaacaacttggagatagaagaaattggggagatagaagagcagctgaatattttagaggatctggctcctgatttgatatcaaagaagatgataaatggaggagaaatactttatagcatccaacctatatcagatcaaaattcagttcgggctaggcttgtagaacctgtatgagatagctacagttggttcaaagctgaagaaattctttatatgtatgtaccactgatgaaacccacattagctaattaacatcatggaagcatctgcatcagcagcatcgctcttgtctgattggacttgaaatctatattttttgttgaccctgctcaatgctgaaattttaatgaaacttaaatttgcactagctgctc

SEQ ID NO: 111512 - protein, 601 aa, Zea mays subsp. mays
  misc_feature (1)..(601): Ceres Seq. ID no. 15224812
  misc_feature (142)..(354): Homolog of NCBI NO: 15232570 NR Description: hypothetical protein [Arabidopsis thaliana]
  misc_feature (380)..(599): Homolog of NCBI NO: 15232570 NR Description: hypothetical protein [Arabidopsis thaliana]
  misc_feature (82)..(599): Homolog of NCBI NO: 22530894 NR Description: hypothetical protein [Arabidopsis thaliana]
  misc_feature (82)..(599): Homolog of NCBI NO: 38567811 NR Description: CDT1a protein [Arabidopsis thaliana]
  misc_feature (82)..(599): Homolog of NCBI NO: 15224645 NR Description: expressed protein [Arabidopsis thaliana]
  misc_feature (85)..(597): Homolog of NCBI NO: 38344618 NR Description: OSJNBb0003A12.4 [Oryza sativa (japonica
  misc_feature (41)..(601): Homolog of NCBI NO: 40539114 NR Description: expressed protein [Oryza sativa (japonica
PVPAPLADSRGDNLRPERHNPPDSRHRAHRELYLLCLELKMSEANTTQLDLEKGFSQVSNDNDSSSPATMHKMKVETEDGGSEIESPTPEKRESRSKRVVVSSLARNLLAERYRDRFSNQLVEDEGQTDDEDYNGSVSPSGSQSLFSESIELLDKHKDLLSLFNRMESSIRLLHLRKKMATFNNIATQVEILTKRKLLYSHLAQMKHLLPEAIQIKRILVHDEKSLCMYADMEITLLMDVVECTSPDQSPSMTICEAFYSKLLSFLDAHHKGADIPEAILPELFNSKPREKLYLEAVHNGYAAESPLQGATEERFINASHFPQSFRKLMSQKIIADGIQKTQLLSDPADLSSVIAYGTKGSNGNPKKEDEHAPVPGKYEISATPSRHLISCCQEGTPKQGTSESPLFSGTPVMQTPKRQLPTSLDKPKATCGHISEPCSASSARRSLNTLLKFEVGSPYYDGVEHTDTTKKGMISEDSSYFNKSFEEDSPVLFIDKDKIDEVDSVDSQEKIASLHTTFDIVCDISHPTKNSLITKQELFHNILANNLEIEEIGEIEEQLNILEDLAPDLISKKMINGGEILYSIQPISDQNSVRARLVEPV

SEQ ID NO: 111513 - protein, 561 aa, Zea mays subsp. mays
  misc_feature (1)..(561): Ceres Seq. ID no. 15224813
  misc_feature (102)..(314): Homolog of NCBI NO: 15232570 NR Description: hypothetical protein [Arabidopsis thaliana]
  misc_feature (340)..(559): Homolog of NCBI NO: 15232570 NR Description: hypothetical protein [Arabidopsis thaliana]
  misc_feature (42)..(559): Homolog of NCBI NO: 22530894 NR Description: hypothetical protein [Arabidopsis thaliana]
  misc_feature (42)..(559): Homolog of NCBI NO: 38567811 NR Description: CDT1a protein [Arabidopsis thaliana]
  misc_feature (42)..(559): Homolog of NCBI NO: 15224645 NR Description: expressed protein [Arabidopsis thaliana]
  misc_feature (45)..(557): Homolog of NCBI NO: 38344618 NR Description: OSJNBb0003A12.4 [Oryza sativa (japonica
  misc_feature (1)..(561): Homolog of NCBI NO: 40539114 NR Description: expressed protein [Oryza sativa (japonica
MSEANTTQLDLEKGFSQVSNDNDSSSPATMHKMKVETEDGGSEIESPTPEKRESRSKRVVVSSLARNLLAERYRDRFSNQLVEDEGQTDDEDYNGSVSPSGSQSLFSESIELLDKHKDLLSLFNRMESSIRLLHLRKKMATFNNIATQVEILTKRKLLYSHLAQMKHLLPEAIQIKRILVHDEKSLCMYADMEITLLMDVVECTSPDQSPSMTICEAFYSKLLSFLDAHHKGADIPEAILPELFNSKPREKLYLEAVHNGYAAESPLQGATEERFINASHFPQSFRKLMSQKIIADGIQKTQLLSDPADLSSVIAYGTKGSNGNPKKEDEHAPVPGKYEISATPSRHLISCCQEGTPKQGTSESPLFSGTPVMQTPKRQLPTSLDKPKATCGHISEPCSASSARRSLNTLLKFEVGSPYYDGVEHTDTTKKGMISEDSSYFNKSFEEDSPVLFIDKDKIDEVDSVDSQEKIASLHTTFDIVCDISHPTKNSLITKQELFHNILANNLEIEEIGEIEEQLNILEDLAPDLISKKMINGGEILYSIQPISDQNSVRARLVEPV

SEQ ID NO: 111514 - protein, 532 aa, Zea mays subsp. mays
  misc_feature (1)..(532): Ceres Seq. ID no. 15224814
  misc_feature (73)..(285): Homolog of NCBI NO: 15232570 NR Description: hypothetical protein [Arabidopsis thaliana]
  misc_feature (311)..(530): Homolog of NCBI NO: 15232570 NR Description: hypothetical protein [Arabidopsis thaliana]
  misc_feature (13)..(530): Homolog of NCBI NO: 22530894 NR Description: hypothetical protein [Arabidopsis thaliana]
  misc_feature (13)..(530): Homolog of NCBI NO: 38567811 NR Description: CDT1a protein [Arabidopsis thaliana]
  misc_feature (13)..(530): Homolog of NCBI NO: 15224645 NR Description: expressed protein [Arabidopsis thaliana]
  misc_feature (16)..(528): Homolog of NCBI NO: 38344618 NR Description: OSJNBb0003A12.4 [Oryza sativa (japonica
  misc_feature (1)..(532): Homolog of NCBI NO: 40539114 NR Description: expressed protein [Oryza sativa (japonica
MHKMKVETEDGGSEIESPTPEKRESRSKRVVVSSLARNLLAERYRDRFSNQLVEDEGQTDDEDYNGSVSPSGSQSLFSESIELLDKHKDLLSLFNRMESSIRLLHLRKKMATFNNIATQVEILTKRKLLYSHLAQMKHLLPEAIQIKRILVHDEKSLCMYADMEITLLMDVVECTSPDQSPSMTICEAFYSKLLSFLDAHHKGADIPEAILPELFNSKPREKLYLEAVHNGYAAESPLQGATEERFINASHFPQSFRKLMSQKIIADGIQKTQLLSDPADLSSVIAYGTKGSNGNPKKEDEHAPVPGKYEISATPSRHLISCCQEGTPKQGTSESPLFSGTPVMQTPKRQLPTSLDKPKATCGHISEPCSASSARRSLNTLLKFEVGSPYYDGVEHTDTTKKGMISEDSSYFNKSFEEDSPVLFIDKDKIDEVDSVDSQEKIASLHTTFDIVCDISHPTKNSLITKQELFHNILANNLEIEEIGEIEEQLNILEDLAPDLISKKMINGGEILYSIQPISDQNSVRARLVEPV

SEQ ID NO: 111515 - DNA, 3495 bp, Zea mays subsp. mays
  misc_feature (1)..(3495): Ceres Seq. ID no. 14308925
  misc_feature: MA Experiment ID: 108523 Result: Up-regulated in Transcription
  misc_feature: MA Experiment 108523 PARAMETER Experiment Name: Zm_42deg_Heat_P Parameter: Age (day) Value: 8
  misc_feature: MA Experiment 108523 PARAMETER Experiment Name: Zm_42deg_Heat_P Parameter: Organism Value: Zea mays
  misc_feature: MA Experiment 108523 PARAMETER Experiment Name: Zm_42deg_Heat_P Parameter: Plant Line Value: 35A19
  misc_feature: MA Experiment 108523 PARAMETER Experiment Name: Zm_42deg_Heat_P Parameter: Temperature (deg C) Value: 42 vs. 22
  misc_feature: MA Experiment 108523 PARAMETER Experiment Name: Zm_42deg_Heat_P Parameter: Timepoint (hr) Value: 6
  misc_feature: MA Experiment 108523 PARAMETER Experiment Name: Zm_42deg_Heat_P Parameter: Tissue Value: Aerial
  misc_feature: MA Experiment ID: 108530 Result: Down-regulated in Transcription
  misc_feature: MA Experiment 108530 PARAMETER Experiment Name: Zm_Imbibed_Seeds_P Parameter: Age (day) Value: 6 vs. 2
  misc_feature: MA Experiment 108530 PARAMETER Experiment Name: Zm_Imbibed_Seeds_P Parameter: Organism Value: Zea mays
  misc_feature: MA Experiment 108530 PARAMETER Experiment Name: Zm_Imbibed_Seeds_P Parameter: Plant Line Value: 35A19
  misc_feature: MA Experiment 108530 PARAMETER Experiment Name: Zm_Imbibed_Seeds_P Parameter: Tissue Value: Aerial vs. Embryo
  misc_feature: MA Experiment ID: 108559 Result: Up-regulated in Transcription
  misc_feature: MA Experiment 108559 PARAMETER Experiment Name: Zm_5mM_NO_P Parameter: Age (day) Value: 8
  misc_feature: MA Experiment 108559 PARAMETER Experiment Name: Zm_5mM_NO_P Parameter: Organism Value: Zea mays
  misc_feature: MA Experiment 108559 PARAMETER Experiment Name: Zm_5mM_NO_P Parameter: Plant Line Value: 35A19
  misc_feature: MA Experiment 108559 PARAMETER Experiment Name: Zm_5mM_NO_P Parameter: Timepoint (hr) Value: 12
  misc_feature: MA Experiment 108559 PARAMETER Experiment Name: Zm_5mM_NO_P Parameter: Tissue Value: Aerial
  misc_feature: MA Experiment 108559 PARAMETER Experiment Name: Zm_5mM_NO_P Parameter: Treatment Value: 5mM NO vs. No Treatment
  misc_feature: MA Experiment ID: 108597 Result: Up-regulated in Transcription
  misc_feature: MA Experiment 108597 PARAMETER Experiment Name: Zm_100uM_ABA_P Parameter: Age (day) Value: 9
  misc_feature: MA Experiment 108597 PARAMETER Experiment Name: Zm_100uM_ABA_P Parameter: Organism Value: Zea mays
  misc_feature: MA Experiment 108597 PARAMETER Experiment Name: Zm_100uM_ABA_P Parameter: Plant Line Value: 35A19
  misc_feature: MA Experiment 108597 PARAMETER Experiment Name: Zm_100uM_ABA_P Parameter: Timepoint (hr) Value: 24
  misc_feature: MA Experiment 108597 PARAMETER Experiment Name: Zm_100uM_ABA_P Parameter: Tissue Value: Aerial
  misc_feature: MA Experiment 108597 PARAMETER Experiment Name: Zm_100uM_ABA_P Parameter: Treatment Value: 100uM ABA vs. No Treatment
  misc_feature: MA Experiment ID: 20000535 Result: Up-regulated in Transcription
  misc_feature: MA Experiment 20000535 PARAMETER Experiment Name: Zm_Hybrid_Seed_Dev_P Parameter: DAP Value: 30 vs. 12
  misc_feature: MA Experiment 20000535 PARAMETER Experiment Name: Zm_Hybrid_Seed_Dev_P Parameter: Organism Value: Zea mays
  misc_feature: MA Experiment 20000535 PARAMETER Experiment Name: Zm_Hybrid_Seed_Dev_P Parameter: Plant Line Value: 35A19
  misc_feature: MA Experiment 20000535 PARAMETER Experiment Name: Zm_Hybrid_Seed_Dev_P Parameter: Tissue Value: Embryo vs. Unfert Floret
tcgtcgtttgtgccgagtgggttggttatcgagagcgtaagtggttcatctgactagactattttagctgtccgatcgaaagcggtgatggccgagtgcccgctgtgcgggacggcgtcgcgccgaattcatagccgatacgccagacaagtcgcggacctgccctgcgcgggtaggcagatacgtctgtgggtgatcgcgcgacggttcctgtgcgagattccgcattgtcgtcggagaattttcgccgagcggttcggtcaggatgtcgtcccggtgcagtcacgccgaacagccaggttggaatgcatcgtcgtcgccggcattgatgattgggccttccggaacaaccattgctacggaacaatcgtttgcgatctggagcgacggcggatcgtgaggttgctgctcaatcgcgagattgcaacggtgcaggcttggctatccgaccatcccgggatcaaaataagtatcgcgcgatcgtggcggcggctatggcgaggctgccgcaaaggcgctgcctgaggtcatccaggttgccgatcgctggcacctgatggaaaacgcgagcgcagccttcctcggtgccgtgcgccggtcgatgcgcgtgatctgtacggcaatcggcgctacgatgatcaatccagagttgctcacctgtgcggaacgactgcaatataacggctatctgcggcgcgaggagaccaacgccgcgatcatggcgctcgtcaaggatggcgtgccgcttaaggagatcgtccgtcgaaccgggtacagccgtaaactcactcgtcaggtcagtcgaggcgagagcacggatatcttccgaacgcggcagagcacgctcaacgcgcacttacccttcatcgatgcccaatgggctacgggctgccgtaacggcgcggagctctggcgtcgtctgcaggctcacggcttccgaggctagttacgtgtcgtcagcgaatggacgacacggcggcgacgtgcggagaaggcaaccaacaaacaactgcaaaaggtgccttctgcgcgaacgatcgtacgattgacaaggaagggcaggcgcaagggttcgaccccaagagattgatggtcggcacaagcgcctttcactctcgaaaatgaagctgttgtttcgggcgggagatcgaagcgactgcgcgatcgacgcggcaaaagcgccagactgatcagacgcgacgtagctctgtgcttcgcgatgagaagctttttccgccccctcaacccggttgctatcagcattgagccacgaaggaagctttcaacataggcaagggagtgataagcctacattgcgaaattccctgacagctggcccagcatcggtctcgatgacgaggaattgcgtgtttaattccgcaacggcatgacaagggcatgggacatgggcttaggttggtgccgaacccaagagtgatttcgacccccttcggacaatatgtttgggaaggacaagcagattctggttcttataccattagagaggaaaaagacccggagcagctcattcctaggggaactcgccttactctctatctcaagtgtgatgataagggttttgctcaccctgagaggattcaaaaacttctaaagacttactctcagtttgtttcctttcccatttacacatgggaagagaaaggcttcacaaaagaggtcgaggttgatgaagatccagcggaagcccaaaaaaaaggtgatgattcagcggaaaccaaaactgagcctaagaaaaagaccaaaactgttattgagaagtattgggattgggagctttcaaatgagacacaacctatttggcttcggaaccccaaagaggtttcaactgaggaatacaatgattttttcaagaaaaccttcaatgagtacttgggccctttggcatcatcacacttcactacagagggtgaggtagaatttaggtcaattctttttgttcctgctacaaggaaggaagatgtaactgctgatagtaggaagaccaagaatatcagactatatgttaagcgtgtattcatatcagatgactttgatggagaattgttcccaagatatttgagctttgtgaagggtgttgttgactcaaatgaccttccattgaatgtttctcgtgagaatcttcaagaaagtcgaattgttcgtataatgagaaaaaggctggtgcggaaagcctttgatatgatacttggcatttcttgcagtgaaaatagagatgattatgaaaggttctgggagaactttggaaaatttttaaagctgggtgccatggaagataaggaaaatcacaagagaattgctcctttgttgcgcttcttctcttctcaaagcaacaatgaattaattagcttggatgaatatgtggaaaacatgaaacctgagcagaaggacatttacttcattgctgcagatagtatgagcagtgccataaatgctcctttcttagagagactaacagaaaaagactatgaggttctacttttggtcgaccctatggatgaattggctatccagaatctgagctcctacaaggataagaaatttgtggacattagcaaagaagatttggatttaggtgataacaatgaggaaagagagaaggagataaagcaggagttcagccaagcctgtgactggataaagaatcgcttgggtgacaaggttgcacgtgttgacatatctaatcgtctcaggtcatcgccatgtgttcttgttgcagcgaagtttggttggtcagccaatatggaaaggctgatgagagcacagtctatgggtgatacagcctctttggatttcatgcgttcgaggaaagtttttgaaataaacccagagcatgagataatcaaggccttgaatgtggcatgcaggaataaccctgatgatcctgaagccctaaaggctctggatgttctctttgaaactgctatgatttcaagtggcttttcgcctgacaacccggcggagctcagtgggaagatttacgagatgatgacctctgccatcgctggcaaatggtcctcacagccacaggcgcaggcgcaacctgccgacccaatcccacagcacgacgcacctgtgaggtcagacgagccgcttgaagctcaagtggtggaggcagagcccgttgaggctggtcagcagaagtgagggcctgttcgtgcagaatctttgtacggagtagttttgaaccgttgtgcacaacatggctgagaatttcgagtatatgttttgacggcctgtatctgtgtcatgagctgttactggtaatgtaagacgtattggttagaaattagatgattaggaataattgggtagctggactacttgaactggttcctgaaccatcaggagggttatggactcatggttagcttctactgcgtccttgggggcagtagtaattttgaagccaattcgttgttttgtaggctctatttctgtttggctttaatacttatcggtttctactgtttctac

SEQ ID NO: 111516 - protein, 588 aa, Zea mays subsp. mays
  misc_feature (1)..(588): Ceres Seq. ID no. 14308926
  misc_feature (61)..(542): Pfam Name: Hsp90 protein Pfam Description: Hsp90 protein
  misc_feature (1)..(537): Homolog of NCBI NO: 26454635 NR Description: Heat shock protein 81-1 (HSP81-1) (Heat shock
  misc_feature (1)..(537): Homolog of NCBI NO: 15237214 NR Description: heat shock protein 81-1 (HSP81-1/heat shock
  misc_feature (1)..(537): Homolog of NCBI NO: 33326375 NR Description: heat shock protein [Hevea brasiliensis]
  misc_feature (1)..(537): Homolog of NCBI NO: 1708314 NR Description: Heat shock protein 83
  misc_feature (1)..(580): Homolog of NCBI NO: 30678090 NR Description: heat shock protein, putative [Arabidopsis
  misc_feature (20)..(580): Homolog of NCBI NO: 1906830 NR Description: heat shock protein [Arabidopsis thaliana]
  misc_feature (1)..(554): Homolog of NCBI NO: 1076758 NR Description: heat-shock protein, 82K, precursor - rye
  misc_feature (1)..(580): Homolog of NCBI NO: 20453106 NR Description: At2g04030/F3C11.14 [Arabidopsis thaliana]
  misc_feature (1)..(580): Homolog of NCBI NO: 15228059 NR Description: heat shock protein, putative [Arabidopsis
  misc_feature (1)..(588): Homolog of NCBI NO: 15231505 NR Description: heat shock protein -related [Arabidopsis
MGHGLRLVPNPRVISTPFGQYVWEGQADSGSYTIREEKDPEQLIPRGTRLTLYLKCDDKGFAHPERIQKLLKTYSQFVSFPIYTWEEKGFTKEVEVDEDPAEAQKKGDDSAETKTEPKKKTKTVIEKYWDWELSNETQPIWLRNPKEVSTEEYNDFFKKTFNEYLGPLASSHFTTEGEVEFRSILFVPATRKEDVTADSRKTKNIRLYVKRVFISDDFDGELFPRYLSFVKGVVDSNDLPLNVSRENLQESRIVRIMRKRLVRKAFDMILGISCSENRDDYERFWENFGKFLKLGAMEDKENHKRIAPLLRFFSSQSNNELISLDEYVENMKPEQKDIYFIAADSMSSAINAPFLERLTEKDYEVLLLVDPMDELAIQNLSSYKDKKFVDISKEDLDLGDNNEEREKEIKQEFSQACDWIKNRLGDKVARVDISNRLRSSPCVLVAAKFGWSANMERLMRAQSMGDTASLDFMRSRKVFEINPEHEIIKALNVACRNNPDDPEALKALDVLFETAMISSGFSPDNPAELSGKIYEMMTSAIAGKWSSQPQAQAQPADPIPQHDAPVRSDEPLEAQVVEAEPVEAGQQK

SEQ ID NO: 111517 - protein, 332 aa, Zea mays subsp. mays
  misc_feature (1)..(332): Ceres Seq. ID no. 14308927
  misc_feature (1)..(286): Pfam Name: Hsp90 protein Pfam Description: Hsp90 protein
  misc_feature (1)..(281): Homolog of NCBI NO: 26454635 NR Description: Heat shock protein 81-1 (HSP81-1) (Heat shock
  misc_feature (1)..(281): Homolog of NCBI NO: 15237214 NR Description: heat shock protein 81-1 (HSP81-1/heat shock
  misc_feature (1)..(281): Homolog of NCBI NO: 33326375 NR Description: heat shock protein [Hevea brasiliensis]
  misc_feature (1)..(281): Homolog of NCBI NO: 1708314 NR Description: Heat shock protein 83
  misc_feature (1)..(324): Homolog of NCBI NO: 30678090 NR Description: heat shock protein, putative [Arabidopsis
  misc_feature (1)..(324): Homolog of NCBI NO: 1906830 NR Description: heat shock protein [Arabidopsis thaliana]
  misc_feature (1)..(298): Homolog of NCBI NO: 1076758 NR Description: heat-shock protein, 82K, precursor - rye
  misc_feature (1)..(324): Homolog of NCBI NO: 20453106 NR Description: At2g04030/F3C11.14 [Arabidopsis thaliana]
  misc_feature (1)..(324): Homolog of NCBI NO: 15228059 NR Description: heat shock protein, putative [Arabidopsis
  misc_feature (1)..(332): Homolog of NCBI NO: 15231505 NR Description: heat shock protein -related [Arabidopsis
MRKRLVRKAFDMILGISCSENRDDYERFWENFGKFLKLGAMEDKENHKRIAPLLRFFSSQSNNELISLDEYVENMKPEQKDIYFIAADSMSSAINAPFLERLTEKDYEVLLLVDPMDELAIQNLSSYKDKKFVDISKEDLDLGDNNEEREKEIKQEFSQACDWIKNRLGDKVARVDISNRLRSSPCVLVAAKFGWSANMERLMRAQSMGDTASLDFMRSRKVFEINPEHEIIKALNVACRNNPDDPEALKALDVLFETAMISSGFSPDNPAELSGKIYEMMTSAIAGKWSSQPQAQAQPADPIPQHDAPVRSDEPLEAQVVEAEPVEAGQQK

SEQ ID NO: 111518 - protein, 321 aa, Zea mays subsp. mays
  misc_feature (1)..(321): Ceres Seq. ID no. 14308928
  misc_feature (1)..(275): Pfam Name: Hsp90 protein Pfam Description: Hsp90 protein
  misc_feature (1)..(270): Homolog of NCBI NO: 26454635 NR Description: Heat shock protein 81-1 (HSP81-1) (Heat shock
  misc_feature (1)..(270): Homolog of NCBI NO: 15237214 NR Description: heat shock protein 81-1 (HSP81-1/heat shock
  misc_feature (1)..(270): Homolog of NCBI NO: 33326375 NR Description: heat shock protein [Hevea brasiliensis]
  misc_feature (1)..(270): Homolog of NCBI NO: 1708314 NR Description: Heat shock protein 83
  misc_feature (1)..(313): Homolog of NCBI NO: 30678090 NR Description: heat shock protein, putative [Arabidopsis
  misc_feature (1)..(313): Homolog of NCBI NO: 1906830 NR Description: heat shock protein [Arabidopsis thaliana]
  misc_feature (1)..(287): Homolog of NCBI NO: 1076758 NR Description: heat-shock protein, 82K, precursor - rye
  misc_feature (1)..(313): Homolog of NCBI NO: 20453106 NR Description: At2g04030/F3C11.14 [Arabidopsis thaliana]
  misc_feature (1)..(313): Homolog of NCBI NO: 15228059 NR Description: heat shock protein, putative [Arabidopsis
  misc_feature (1)..(321): Homolog of NCBI NO: 15231505 NR Description: heat shock protein -related [Arabidopsis
MILGISCSENRDDYERFWENFGKFLKLGAMEDKENHKRIAPLLRFFSSQSNNELISLDEYVENMKPEQKDIYFIAADSMSSAINAPFLERLTEKDYEVLLLVDPMDELAIQNLSSYKDKKFVDISKEDLDLGDNNEEREKEIKQEFSQACDWIKNRLGDKVARVDISNRLRSSPCVLVAAKFGWSANMERLMRAQSMGDTASLDFMRSRKVFEINPEHEIIKALNVACRNNPDDPEALKALDVLFETAMISSGFSPDNPAELSGKIYEMMTSAIAGKWSSQPQAQAQPADPIPQHDAPVRSDEPLEAQVVEAEPVEAGQQK

SEQ ID NO: 111519 - DNA, 1949 bp, Zea mays subsp. mays
  misc_feature (1)..(1949): Ceres Seq. ID no. 15226156
gccgaccgccgactcccgccgcgaaatcctgcgtcagaagcgccgattctcggacgtcctccggatctgagacaccgagcgcactacgagctgtagctgtagtgacctgaaaatgagtgagggggatgctactcagcttgcccttgagaaaggattaccacaagtgtctaatgatgatggttcgagtagtcctgcaactatgcacaagttgaaagttgacacagaagatgctggaagcaaaattgaatcacccactccagagaagcttgaatctagaagcaaaggggttgttgtgagttcgttggcaaggaatttacttgcagagaggtacaaagatagatttgcaaatcagttcctggaagatgagggtgacatagatgatgaagactataatgacagtatttcgccaggcatgagccgatctcagagatcaagaagcattgaacttctggagaagcacaaggatttactgaatctttttaatagaatggagagttctataaggttgctgcgcctacggaagaggatggctacatttaataatattgccacccaggtggaaatactcgcaaaaaggaagttatcgtactgtcatttggcccaaatgaagtatttgtttccagaagcaatccagattaagagggtacttctacatgacgagaaaagcctatgcatgtatgctgatatggaaatcatacttgtaatggatgttgtggaatacacaagtcctgatcactctccatccatggcaatttgcgatgctttttactcgaagcttttgacatttttggatgctcatcataagggtacagacattccagaggcaatcttaccagaaccctttaacttgaggtcaaggggccagttaaatcttgaggcatcaaataatggacatgctgctgagccacatctgcaaggcaccactaaggatggattctcaaatgcttcccacttcccacaatcttttcgaaagctaatgtcccagaaagtcattactgatggagctgaaagaactcaattgctacttgatccaacaaaactgagctctgtgagtgcttatgatacagaaggaacaaacagaagccctaaaaagcaagacaaacatgcttcagttacagtgaactctgaaatttctgctactccaagccgtcatttgatctctcgttgtcaagagggtacgccaaaacaagagacctcagaatcaccattgttggctcaaacaccagcaactcagacacccaaaaggcaattgcccactccacttgagaaacttgaggccacatgtggacacatttctgaaccacgttcagctagttctgcccgcagatcactaaatacatctttaaaatttgaagggggaagcccttcttatcatgatagaatggaacatgtggctacatctaaaattggaattttctcagaagattcatctagtttcaacaagtcattagaggagaatggtcctgtcttctttactgatagagagaaaatcaatctggcagacccagtgggtgtccaggaaaagatggcttcgttacgttccacatttggcatcgtctgcgatatttctcattctatcaagaattcgctaattacaaaacaggagcttttccataatattcttgccaacaacttggagatagaacagatgggagagatagaagagcagctacatattttagaggatctggctcccgattggatatctaaggtgataaatggaggagaaatattttacagctttgaaactatagcagatcagaattcagtgtgggaaaggcttgtagaagctgtgtgaggtgtggaatagctgggattggtttaaagctaaagaatcagccacatagtactatgtatgtaacgctaacggaacccatcaaacagccacattttctcataatggaatcctcaggattgctcttgtcttattcaatttcaattttttcttc

SEQ ID NO: 111520 - protein, 561 aa, Zea mays subsp. mays
  misc_feature (1)..(561): Ceres Seq. ID no. 15226157
  misc_feature (102)..(249): Homolog of NCBI NO: 15232570 NR Description: hypothetical protein [Arabidopsis thaliana]
  misc_feature (302)..(560): Homolog of NCBI NO: 15232570 NR Description: hypothetical protein [Arabidopsis thaliana]
  misc_feature (42)..(559): Homolog of NCBI NO: 22530894 NR Description: hypothetical protein [Arabidopsis thaliana]
  misc_feature (42)..(559): Homolog of NCBI NO: 38567811 NR Description: CDT1a protein [Arabidopsis thaliana]
  misc_feature (42)..(559): Homolog of NCBI NO: 15224645 NR Description: expressed protein [Arabidopsis thaliana]
  misc_feature (57)..(560): Homolog of NCBI NO: 38344618 NR Description: OSJNBb0003A12.4 [Oryza sativa (japonica
  misc_feature (1)..(561): Homolog of NCBI NO: 40539114 NR Description: expressed protein [Oryza sativa (japonica
MSEGDATQLALEKGLPQVSNDDGSSSPATMHKLKVDTEDAGSKIESPTPEKLESRSKGVVVSSLARNLLAERYKDRFANQFLEDEGDIDDEDYNDSISPGMSRSQRSRSIELLEKHKDLLNLFNRMESSIRLLRLRKRMATFNNIATQVEILAKRKLSYCHLAQMKYLFPEAIQIKRVLLHDEKSLCMYADMEIILVMDVVEYTSPDHSPSMAICDAFYSKLLTFLDAHHKGTDIPEAILPEPFNLRSRGQLNLEASNNGHAAEPHLQGTTKDGFSNASHFPQSFRKLMSQKVITDGAERTQLLLDPTKLSSVSAYDTEGTNRSPKKQDKHASVTVNSEISATPSRHLISRCQEGTPKQETSESPLLAQTPATQTPKRQLPTPLEKLEATCGHISEPRSASSARRSLNTSLKFEGGSPSYHDRMEHVATSKIGIFSEDSSSFNKSLEENGPVFFTDREKINLADPVGVQEKMASLRSTFGIVCDISHSIKNSLITKQELFHNILANNLEIEQMGEIEEQLHILEDLAPDWISKVINGGEIFYSFETIADQNSVWERLVEAV

SEQ ID NO: 111521 - protein, 532 aa, Zea mays subsp. mays
  misc_feature (1)..(532): Ceres Seq. ID no. 15226158
  misc_feature (73)..(220): Homolog of NCBI NO: 15232570 NR Description: hypothetical protein [Arabidopsis thaliana]
  misc_feature (273)..(531): Homolog of NCBI NO: 15232570 NR Description: hypothetical protein [Arabidopsis thaliana]
  misc_feature (13)..(530): Homolog of NCBI NO: 22530894 NR Description: hypothetical protein [Arabidopsis thaliana]
  misc_feature (13)..(530): Homolog of NCBI NO: 38567811 NR Description: CDT1a protein [Arabidopsis thaliana]
  misc_feature (13)..(530): Homolog of NCBI NO: 15224645 NR Description: expressed protein [Arabidopsis thaliana]
  misc_feature (28)..(531): Homolog of NCBI NO: 38344618 NR Description: OSJNBb0003A12.4 [Oryza sativa (japonica
  misc_feature (1)..(532): Homolog of NCBI NO: 40539114 NR Description: expressed protein [Oryza sativa (japonica
MHKLKVDTEDAGSKIESPTPEKLESRSKGVVVSSLARNLLAERYKDRFANQFLEDEGDIDDEDYNDSISPGMSRSQRSRSIELLEKHKDLLNLFNRMESSIRLLRLRKRMATFNNIATQVEILAKRKLSYCHLAQMKYLFPEAIQIKRVLLHDEKSLCMYADMEIILVMDVVEYTSPDHSPSMAICDAFYSKLLTFLDAHHKGTDIPEAILPEPFNLRSRGQLNLEASNNGHAAEPHLQGTTKDGFSNASHFPQSFRKLMSQKVITDGAERTQLLLDPTKLSSVSAYDTEGTNRSPKKQDKHASVTVNSEISATPSRHLISRCQEGTPKQETSESPLLAQTPATQTPKRQLPTPLEKLEATCGHISEPRSASSARRSLNTSLKFEGGSPSYHDRMEHVATSKIGIFSEDSSSFNKSLEENGPVFFTDREKINLADPVGVQEKMASLRSTFGIVCDISHSIKNSLITKQELFHNILANNLEIEQMGEIEEQLHILEDLAPDWISKVINGGEIFYSFETIADQNSVWERLVEAV

SEQ ID NO: 111522 - protein, 461 aa, Zea mays subsp. mays
  misc_feature (1)..(461): Ceres Seq. ID no. 15226159
  misc_feature (2)..(149): Homolog of NCBI NO: 15232570 NR Description: hypothetical protein [Arabidopsis thaliana]
  misc_feature (202)..(460): Homolog of NCBI NO: 15232570 NR Description: hypothetical protein [Arabidopsis thaliana]
  misc_feature (1)..(459): Homolog of NCBI NO: 22530894 NR Description: hypothetical protein [Arabidopsis thaliana]
  misc_feature (1)..(459): Homolog of NCBI NO: 38567811 NR Description: CDT1a protein [Arabidopsis thaliana]
  misc_feature (1)..(459): Homolog of NCBI NO: 15224645 NR Description: expressed protein [Arabidopsis thaliana]
  misc_feature (1)..(460): Homolog of NCBI NO: 38344618 NR Description: OSJNBb0003A12.4 [Oryza sativa (japonica
  misc_feature (1)..(461): Homolog of NCBI NO: 40539114 NR Description: expressed protein [Oryza sativa (japonica
MSRSQRSRSIELLEKHKDLLNLFNRMESSIRLLRLRKRMATFNNIATQVEILAKRKLSYCHLAQMKYLFPEAIQIKRVLLHDEKSLCMYADMEIILVMDVVEYTSPDHSPSMAICDAFYSKLLTFLDAHHKGTDIPEAILPEPFNLRSRGQLNLEASNNGHAAEPHLQGTTKDGFSNASHFPQSFRKLMSQKVITDGAERTQLLLDPTKLSSVSAYDTEGTNRSPKKQDKHASVTVNSEISATPSRHLISRCQEGTPKQETSESPLLAQTPATQTPKRQLPTPLEKLEATCGHISEPRSASSARRSLNTSLKFEGGSPSYHDRMEHVATSKIGIFSEDSSSFNKSLEENGPVFFTDREKINLADPVGVQEKMASLRSTFGIVCDISHSIKNSLITKQELFHNILANNLEIEQMGEIEEQLHILEDLAPDWISKVINGGEIFYSFETIADQNSVWERLVEAV

SEQ ID NO: 111523 - DNA, 2581 bp, Zea mays subsp. mays
  misc_feature (1)..(2581): Ceres Seq. ID no. 13599779
  misc_feature: MA Experiment ID: 108543 Result: Up-regulated in Transcription
  misc_feature: MA Experiment ID: 20000480 Result: Down-regulated in Transcription
  misc_feature: MA Experiment 20000480 PARAMETER Experiment Name: Zm_Drought_P Parameter: Age (day) Value: 11
  misc_feature: MA Experiment 20000480 PARAMETER Experiment Name: Zm_Drought_P Parameter: Organism Value: Zea mays
  misc_feature: MA Experiment 20000480 PARAMETER Experiment Name: Zm_Drought_P Parameter: Plant Line Value: 35A19
  misc_feature: MA Experiment 20000480 PARAMETER Experiment Name: Zm_Drought_P Parameter: Timepoint (hr) Value: 72
  misc_feature: MA Experiment 20000480 PARAMETER Experiment Name: Zm_Drought_P Parameter: Tissue Value: Aerial
  misc_feature: MA Experiment 20000480 PARAMETER Experiment Name: Zm_Drought_P Parameter: Treatment Value: Drought vs. No Drought
  misc_feature: MA Experiment ID: 20001610 Result: Up-regulated in Transcription
  misc_feature: MA Experiment 20001610 PARAMETER Experiment Name: Zm_50ppm_KNO3_L-to-H_P Parameter: Age (day) Value: 19
  misc_feature: MA Experiment 20001610 PARAMETER Experiment Name: Zm_50ppm_KNO3_L-to-H_P Parameter: Organism Value: Zea mays
  misc_feature: MA Experiment 20001610 PARAMETER Experiment Name: Zm_50ppm_KNO3_L-to-H_P Parameter: Plant Line Value: 35A19
  misc_feature: MA Experiment 20001610 PARAMETER Experiment Name: Zm_50ppm_KNO3_L-to-H_P Parameter: Timepoint (hr) Value: 2
  misc_feature: MA Experiment 20001610 PARAMETER Experiment Name: Zm_50ppm_KNO3_L-to-H_P Parameter: Tissue Value: Roots
  misc_feature: MA Experiment 20001610 PARAMETER Experiment Name: Zm_50ppm_KNO3_L-to-H_P Parameter: Treatment Value: 50ppm KNO3 vs. 50ppm KCl
ccccccccatttcccgcccgccccactgccattgtgcgcccccggaatggcgtcacgcggaggagatccggtaaaccaactctagctgaagtgacgagtggcagcattgttcaaccgtgcggcttctgcttgactggaattgtgatggatccagaaaaacaaaatgaaatgagcttgatggacaagagacaactagtatacgaagttgcaagatggccgcaaggtgccgtggagattcttaagtgctggactcgaagggaacttcttgagcttatctgtgttgagctgggcaaagagaggaagtataccaatgtcccaaaagctaagatgatcgcttatctcttgaaattagtttcacgaaagagtggaaagaatgggcaactcaaggatgataatgcaaatgttatgttattagagcaggataacaaagatgaaacacaaatgaaggaatctgaggaacaatcacgaccactcaaaactgcaaactctgactcatcaatacgtagagaggctcatgcctgttgttcagtggtgtgcagcaatgttgcatgccaagccacacggaatgcaggagataattattgcaaacgttgctcttgctgcatttgcaataaatatgatgataacaaagaccctagcttgtggttggtttgcagctctgataatccatacagtggttgttcatgtggtgtctcttgtcacctaaactgtgctctaaagaataaaaaggctggcattgtcaataatggctgcaacaagttagactgtagtttctactgtgttagctgtgggaaaatcaactggctaatgaggagtttgcagaaacaacttgcaattgctagggaggcaagaagagttgatgtgctttgtgagaggctgtcattgagccataaaatggtaaaaggatctgaacgttataaggaaataacgagcataatcagctcagctgcgaaaacacttgaaaaagaagttggtggtgcattagatcaggtttctgcgatcaccgggcgtggcattgttaaccggcttacttgtggtgctgaagttcagaagctttgttcaagtgcattagaaattgtagactctacagtggatagcatcttggagttcgagtcgaataatagtccaaaactcttaggtccccagccccaaatcctttttgatgagatcactccattttctgtggtaattgtgttgaactatcaggatagcatcggtaaggagcaggttgatggttccaaagtttggcaccgaagtgccaaggtttgcaaatattcatcggagcccacatgccacatactgaggccaaatactaggagcctggtttctggtctgagcccttcaactgaatacttcttcaaggttttgccttttagcagcgtacaggggtttactgagtgggaggcaaaatgcagtacacgcagcctggaccatggcagcagccagtgctcaactcagaactctgagagcatgtgcctcaaagaggatccaatgaagcatcagaaaaaggatttgaatgtgcagaatcatcagagaaccattcaatatgattcacctaaggggtctacaaattcaagtgagaacaatttattatgtgaccggtattccaagcgggctaaggttgcaaggctagatggtgcaagtgacaacgacgaaagccagttgccgccaacttctgaagttttaccgtttgcaagctccaactactctccttccgaagctccaagtaaacctgacttgcttattggcaccccagattcggcctccaagaactatgtggagcagcagtacgagtactgtgtgaaggtggtcagatggttggagcatgaagggcacatggacaatgacttccgtgtgaagttcctcacttggttcagcctgaaggcaacatcgcaggacaggcgaatcgtgggtgccttagtagatgttcttatcggtgatcctgcaagcttggttgcccaactggttgatgcattcaaggatatcatctacaccaaggagaagccctttcaaacacaacagaaggatgcacgctgcaagatttggcactagaaaccttcataactgctctgtgtcgctgtgtgacatcatttttctggtaattttctggcgactgaatgatgaactattgaagttatatcacctagcagattgcgtgcggattctgttgagatggatattgtgcactctcttaaaggttataagatgctgtagatgctccatttggcattcaggtccatcagatctctcatttattcattcaaattcagtccgtaggcagactattaatccatgaagacaatcatggtggaaccatgtgctggtaatcatgaaccggttctgagtttaggtttcaactagtaagtagttgaagcttgttagcagacaagcaactgtattcatatgtggaatgctatggtggatctgcaagctaactattgtgaattcatatcatgacttaaaaaaaaaaaaaaaaaaaaaaaaaaaaaaaaaaaaaaaaaaaaaaaaaargaaaaaaaaaaaaaaaaaaaactcgagggggggcccggwacccaattcccccaatagggagccgaataac

SEQ ID NO: 111524 - protein, 683 aa, Zea mays subsp. mays
  misc_feature (1)..(683): Ceres Seq. ID no. 15219245
  misc_feature (199)..(265): Pfam Name: PHD-finger Pfam Description: PHD-finger
  misc_feature (176)..(477): Homolog of NCBI NO: 15230113 NR Description: expressed protein [Arabidopsis thaliana]
  misc_feature (53)..(124): Homolog of NCBI NO: 15242117 NR Description: hypothetical protein [Arabidopsis thaliana]
  misc_feature (155)..(683): Homolog of NCBI NO: 15242117 NR Description: hypothetical protein [Arabidopsis thaliana]
  misc_feature (544)..(683): Homolog of NCBI NO: 30688585 NR Description: coiled-coil protein [Arabidopsis thaliana]
  misc_feature (57)..(555): Homolog of NCBI NO: 30688585 NR Description: coiled-coil protein [Arabidopsis thaliana]
  misc_feature (586)..(666): Homolog of NCBI NO: 15230113 NR Description: expressed protein [Arabidopsis thaliana]
  misc_feature (544)..(683): Homolog of NCBI NO: 15234667 NR Description: coiled-coil protein [Arabidopsis thaliana]
  misc_feature (384)..(555): Homolog of NCBI NO: 15234667 NR Description: coiled-coil protein [Arabidopsis thaliana]
  misc_feature (44)..(391): Homolog of NCBI NO: 15234667 NR Description: coiled-coil protein [Arabidopsis thaliana]
  misc_feature (49)..(683): Homolog of NCBI NO: 38637254 NR Description: putative coiled-coil protein
PPPFPARPTAIVRPRNGVTRRRSGKPTLAEVTSGSIVQPCGFCLTGIVMDPEKQNEMSLMDKRQLVYEVARWPQGAVEILKCWTRRELLELICVELGKERKYTNVPKAKMIAYLLKLVSRKSGKNGQLKDDNANVMLLEQDNKDETQMKESEEQSRPLKTANSDSSIRREAHACCSVVCSNVACQATRNAGDNYCKRCSCCICNKYDDNKDPSLWLVCSSDNPYSGCSCGVSCHLNCALKNKKAGIVNNGCNKLDCSFYCVSCGKINWLMRSLQKQLAIAREARRVDVLCERLSLSHKMVKGSERYKEITSIISSAAKTLEKEVGGALDQVSAITGRGIVNRLTCGAEVQKLCSSALEIVDSTVDSILEFESNNSPKLLGPQPQILFDEITPFSVVIVLNYQDSIGKEQVDGSKVWHRSAKVCKYSSEPTCHILRPNTRSLVSGLSPSTEYFFKVLPFSSVQGFTEWEAKCSTRSLDHGSSQCSTQNSESMCLKEDPMKHQKKDLNVQNHQRTIQYDSPKGSTNSSENNLLCDRYSKRAKVARLDGASDNDESQLPPTSEVLPFASSNYSPSEAPSKPDLLIGTPDSASKNYVEQQYEYCVKVVRWLEHEGHMDNDFRVKFLTWFSLKATSQDRRIVGALVDVLIGDPASLVAQLVDAFKDIIYTKEKPFQTQQKDARCKIWH

SEQ ID NO: 111525 - protein, 635 aa, Zea mays subsp. mays
  misc_feature (1)..(635): Ceres Seq. ID no. 15219246
  misc_feature (151)..(217): Pfam Name: PHD-finger Pfam Description: PHD-finger
  misc_feature (538)..(618): Homolog of NCBI NO: 15230113 NR Description: expressed protein [Arabidopsis thaliana]
  misc_feature (128)..(429): Homolog of NCBI NO: 15230113 NR Description: expressed protein [Arabidopsis thaliana]
  misc_feature (5)..(76): Homolog of NCBI NO: 15242117 NR Description: hypothetical protein [Arabidopsis thaliana]
  misc_feature (107)..(635): Homolog of NCBI NO: 15242117 NR Description: hypothetical protein [Arabidopsis thaliana]
  misc_feature (496)..(635): Homolog of NCBI NO: 30688585 NR Description: coiled-coil protein [Arabidopsis thaliana]
  misc_feature (9)..(507): Homolog of NCBI NO: 30688585 NR Description: coiled-coil protein [Arabidopsis thaliana]
  misc_feature (496)..(635): Homolog of NCBI NO: 15234667 NR Description: coiled-coil protein [Arabidopsis thaliana]
  misc_feature (336)..(507): Homolog of NCBI NO: 15234667 NR Description: coiled-coil protein [Arabidopsis thaliana]
  misc_feature (1)..(343): Homolog of NCBI NO: 15234667 NR Description: coiled-coil protein [Arabidopsis thaliana]
  misc_feature (1)..(635): Homolog of NCBI NO: 38637254 NR Description: putative coiled-coil protein
MDPEKQNEMSLMDKRQLVYEVARWPQGAVEILKCWTRRELLELICVELGKERKYTNVPKAKMIAYLLKLVSRKSGKNGQLKDDNANVMLLEQDNKDETQMKESEEQSRPLKTANSDSSIRREAHACCSVVCSNVACQATRNAGDNYCKRCSCCICNKYDDNKDPSLWLVCSSDNPYSGCSCGVSCHLNCALKNKKAGIVNNGCNKLDCSFYCVSCGKINWLMRSLQKQLAIAREARRVDVLCERLSLSHKMVKGSERYKEITSIISSAAKTLEKEVGGALDQVSAITGRGIVNRLTCGAEVQKLCSSALEIVDSTVDSILEFESNNSPKLLGPQPQILFDEITPFSVVIVLNYQDSIGKEQVDGSKVWHRSAKVCKYSSEPTCHILRPNTRSLVSGLSPSTEYFFKVLPFSSVQGFTEWEAKCSTRSLDHGSSQCSTQNSESMCLKEDPMKHQKKDLNVQNHQRTIQYDSPKGSTNSSENNLLCDRYSKRAKVARLDGASDNDESQLPPTSEVLPFASSNYSPSEAPSKPDLLIGTPDSASKNYVEQQYEYCVKVVRWLEHEGHMDNDFRVKFLTWFSLKATSQDRRIVGALVDVLIGDPASLVAQLVDAFKDIIYTKEKPFQTQQKDARCKIWH

SEQ ID NO: 111526 - protein, 627 aa, Zea mays subsp. mays
  misc_feature (1)..(627): Ceres Seq. ID no. 15219247
  misc_feature (143)..(209): Pfam Name: PHD-finger Pfam Description: PHD-finger
  misc_feature (530)..(610): Homolog of NCBI NO: 15230113 NR Description: expressed protein [Arabidopsis thaliana]
  misc_feature (120)..(421): Homolog of NCBI NO: 15230113 NR Description: expressed protein [Arabidopsis thaliana]
  misc_feature (1)..(68): Homolog of NCBI NO: 15242117 NR Description: hypothetical protein [Arabidopsis thaliana]
  misc_feature (99)..(627): Homolog of NCBI NO: 15242117 NR Description: hypothetical protein [Arabidopsis thaliana]
  misc_feature (488)..(627): Homolog of NCBI NO: 30688585 NR Description: coiled-coil protein [Arabidopsis thaliana]
  misc_feature (1)..(499): Homolog of NCBI NO: 30688585 NR Description: coiled-coil protein [Arabidopsis thaliana]
  misc_feature (488)..(627): Homolog of NCBI NO: 15234667 NR Description: coiled-coil protein [Arabidopsis thaliana]
  misc_feature (328)..(499): Homolog of NCBI NO: 15234667 NR Description: coiled-coil protein [Arabidopsis thaliana]
  misc_feature (1)..(335): Homolog of NCBI NO: 15234667 NR Description: coiled-coil protein [Arabidopsis thaliana]
  misc_feature (1)..(627): Homolog of NCBI NO: 38637254 NR Description: putative coiled-coil protein
MSLMDKRQLVYEVARWPQGAVEILKCWTRRELLELICVELGKERKYTNVPKAKMIAYLLKLVSRKSGKNGQLKDDNANVMLLEQDNKDETQMKESEEQSRPLKTANSDSSIRREAHACCSVVCSNVACQATRNAGDNYCKRCSCCICNKYDDNKDPSLWLVCSSDNPYSGCSCGVSCHLNCALKNKKAGIVNNGCNKLDCSFYCVSCGKINWLMRSLQKQLAIAREARRVDVLCERLSLSHKMVKGSERYKEITSIISSAAKTLEKEVGGALDQVSAITGRGIVNRLTCGAEVQKLCSSALEIVDSTVDSILEFESNNSPKLLGPQPQILFDEITPFSVVIVLNYQDSIGKEQVDGSKVWHRSAKVCKYSSEPTCHILRPNTRSLVSGLSPSTEYFFKVLPFSSVQGFTEWEAKCSTRSLDHGSSQCSTQNSESMCLKEDPMKHQKKDLNVQNHQRTIQYDSPKGSTNSSENNLLCDRYSKRAKVARLDGASDNDESQLPPTSEVLPFASSNYSPSEAPSKPDLLIGTPDSASKNYVEQQYEYCVKVVRWLEHEGHMDNDFRVKFLTWFSLKATSQDRRIVGALVDVLIGDPASLVAQLVDAFKDIIYTKEKPFQTQQKDARCKIWH

SEQ ID NO: 111527 - DNA, 2143 bp, Zea mays subsp. mays
  misc_feature (1)..(2143): Ceres Seq. ID no. 14303282
  misc_feature: MA Experiment ID: 108522 Result: Up-regulated in Transcription
  misc_feature: MA Experiment 108522 PARAMETER Experiment Name: Zm_42deg_Heat_P Parameter: Age (day) Value: 8
  misc_feature: MA Experiment 108522 PARAMETER Experiment Name: Zm_42deg_Heat_P Parameter: Organism Value: Zea mays
  misc_feature: MA Experiment 108522 PARAMETER Experiment Name: Zm_42deg_Heat_P Parameter: Plant Line Value: 35A19
  misc_feature: MA Experiment 108522 PARAMETER Experiment Name: Zm_42deg_Heat_P Parameter: Temperature (deg C) Value: 42 vs. 22
  misc_feature: MA Experiment 108522 PARAMETER Experiment Name: Zm_42deg_Heat_P Parameter: Timepoint (hr) Value: 1
  misc_feature: MA Experiment 108522 PARAMETER Experiment Name: Zm_42deg_Heat_P Parameter: Tissue Value: Aerial
  misc_feature: MA Experiment ID: 108523 Result: Up-regulated in Transcription
  misc_feature: MA Experiment 108523 PARAMETER Experiment Name: Zm_42deg_Heat_P Parameter: Age (day) Value: 8
  misc_feature: MA Experiment 108523 PARAMETER Experiment Name: Zm_42deg_Heat_P Parameter: Organism Value: Zea mays
  misc_feature: MA Experiment 108523 PARAMETER Experiment Name: Zm_42deg_Heat_P Parameter: Plant Line Value: 35A19
  misc_feature: MA Experiment 108523 PARAMETER Experiment Name: Zm_42deg_Heat_P Parameter: Temperature (deg C) Value: 42 vs. 22
  misc_feature: MA Experiment 108523 PARAMETER Experiment Name: Zm_42deg_Heat_P Parameter: Timepoint (hr) Value: 6
  misc_feature: MA Experiment 108523 PARAMETER Experiment Name: Zm_42deg_Heat_P Parameter: Tissue Value: Aerial
gagagagagagagagcatagtagtccccccccccccacgatcccccagtcccctcccctcacggctgcatgcccgcatccggattccggtccatccggcagccagacgctgccgccgtaaattccccttccgcgtctgtctggccggtggccgctgtggttttgtaggctagtgcgtgccgtcctcggacctctcctctcgtcctccaccaccatgactgaggcccagtctccactatccgccaccatggcgaaggaggcccagtcgtcgccgtccgccaccgtagcgcaggcgacggctctgccgcagctcgtattattcaactccttgacgaagagggaggagcccttccagccccgggtggaggggaaggtagggatgtacgtctgtggcgtcactccctacgactttagccacatcggccacgcgcgtgcctacgtcgccttcgacgtcctctacaggtacctgaaattcttggggtatgaagttgaatatgtccgtaatttcacggatatcgacgacaagattattaagcgtgcaaatgaacgcggtgaaacagttacaagtttgagtagccggtttatcaatgaatttcttcttgatatgactgagctccagtgtttacctcctacctgtgagccacgtgtaacagagcacattgagcatattatagagttgataaccaagataatggagaatgacaaagcctatgctatggaaggagatgtttacttttcagtcgaaagttttcctgaatatctcagtttatctggaagaaaattcgatcaaaatcaggcaggggcacgggttgcttttgatacacgaaagcgtaatcctgcagactttgcactctggaaggctgcaaaggagggcgaacctttttgggatagcccttggggccgtggaagaccgggatggcatattgaatgcagcgcaatgagtgctcactatttaggacatctattcgatattcatggtggggggaaagatttgatttttcctcatcatgagaatgagcttgcacaaagccgagctgcttatcctgagagtgaggtgaagtgctggatgcataatggctttgttaacaaggatgataaaaaaatggcaaaatcagataataactttttcacgattagagatatcactgctctttaccatccattggctttaagatttttcttgatgcgcactcattatagatcagatgtgaaccattctgatcaagcacttgagattgcatctgatcgtgtctattacatttttcagactctatatgactgcgaggaagtattagctacatatcgtgaagagggtatttctctctcagtgccgttcgaggagcaaaatctgattgataagcaccattcagaattcttgaaatatatgtcgaatgatcttaaaaccacagatgttctggatcgttgcttcatggagctgctgaaggccataaacagcagtttgaatgatttgaagaaactgcaacagaaaatagaacagcaaaagaagaaacagcaacagcagaagaagcagcaacagaagcaacagcaattgcaaaaacagccagaacattatattcaagctctgattgcactggaaatagaacttaaaaataaactgtctatacttggtctgatgccatcttcatctttggcagaggtactgaagcaattgaaggacaaagcactaaagagagcggggctgactgaagaaaaattgcaagagcagattgagcagagaaacgttgcaaggaagaataaacagtttgagatatctgatggaatcaggaaaaaccttgctaccaagggcatcgccctgatggatgaaccttctggtacagtgtggagaccatgcgaaccagaggggccgcacccactcaacaaatgatggtaaaatgagatttttgcctgagggcagctacacattttgaactaacaaaatcaccatctctggatgcagtattcttcactcaggggtagggggtccaggttgactcgccagtcgccagttgaaacttgcatttctggttgtgtaagaagcaatggaccccatatatatactttactccttgcgaggtttgagttttggttttggatataagacttggcaattccatttcaatgaaacagatgaaattttgcttggt

SEQ ID NO: 111528 - protein, 556 aa, Zea mays subsp. mays
  misc_feature (1)..(556): Ceres Seq. ID no. 14303283
  misc_feature (63)..(173): Pfam Name: tRNA synthetases class I (I, L, M and V) Pfam Description: tRNA synthetases class I (I, L, M and V)
  misc_feature (32)..(511): Homolog of NCBI NO: 9758060 NR Description: cysteine-tRNA ligase [Arabidopsis thaliana]
  misc_feature (418)..(548): Homolog of NCBI NO: 15228880 NR Description: cysteine-tRNA ligase-related protein [Arabidopsis
  misc_feature (31)..(347): Homolog of NCBI NO: 15228880 NR Description: cysteine-tRNA ligase-related protein [Arabidopsis
  misc_feature (32)..(511): Homolog of NCBI NO: 15241557 NR Description: cysteine-tRNA ligase -related protein
  misc_feature (455)..(548): Homolog of NCBI NO: 18402580 NR Description: cysteinyl-tRNA synthetase -related [Arabidopsis
  misc_feature (39)..(431): Homolog of NCBI NO: 18402580 NR Description: cysteinyl-tRNA synthetase -related [Arabidopsis
  misc_feature (455)..(548): Homolog of NCBI NO: 25293240 NR Description: probable cysteinyl-tRNA synthetase
  misc_feature (32)..(431): Homolog of NCBI NO: 25293240 NR Description: probable cysteinyl-tRNA synthetase
  misc_feature (414)..(549): Homolog of NCBI NO: 37535144 NR Description: putative cysteinyl-tRNA synthetase
  misc_feature (12)..(444): Homolog of NCBI NO: 37535144 NR Description: putative cysteinyl-tRNA synthetase
MTEAQSPLSATMAKEAQSSPSATVAQATALPQLVLFNSLTKREEPFQPRVEGKVGMYVCGVTPYDFSHIGHARAYVAFDVLYRYLKFLGYEVEYVRNFTDIDDKIIKRANERGETVTSLSSRFINEFLLDMTELQCLPPTCEPRVTEHIEHIIELITKIMENDKAYAMEGDVYFSVESFPEYLSLSGRKFDQNQAGARVAFDTRKRNPADFALWKAAKEGEPFWDSPWGRGRPGWHIECSAMSAHYLGHLFDIHGGGKDLIFPHHENELAQSRAAYPESEVKCWMHNGFVNKDDKKMAKSDNNFFTIRDITALYHPLALRFFLMRTHYRSDVNHSDQALEIASDRVYYIFQTLYDCEEVLATYREEGISLSVPFEEQNLIDKHHSEFLKYMSNDLKTTDVLDRCFMELLKAINSSLNDLKKLQQKIEQQKKKQQQQKKQQQKQQQLQKQPEHYIQALIALEIELKNKLSILGLMPSSSLAEVLKQLKDKALKRAGLTEEKLQEQIEQRNVARKNKQFEISDGIRKNLATKGIALMDEPSGTVWRPCEPEGPHPLNK

SEQ ID NO: 111529 - protein, 545 aa, Zea mays subsp. mays
  misc_feature (1)..(545): Ceres Seq. ID no. 14303284
  misc_feature (52)..(162): Pfam Name: tRNA synthetases class I (I, L, M and V) Pfam Description: tRNA synthetases class I (I, L, M and V)
  misc_feature (21)..(500): Homolog of NCBI NO: 9758060 NR Description: cysteine-tRNA ligase [Arabidopsis thaliana]
  misc_feature (407)..(537): Homolog of NCBI NO: 15228880 NR Description: cysteine-tRNA ligase-related protein [Arabidopsis
  misc_feature (20)..(336): Homolog of NCBI NO: 15228880 NR Description: cysteine-tRNA ligase-related protein [Arabidopsis
  misc_feature (21)..(500): Homolog of NCBI NO: 15241557 NR Description: cysteine-tRNA ligase -related protein
  misc_feature (444)..(537): Homolog of NCBI NO: 18402580 NR Description: cysteinyl-tRNA synthetase -related [Arabidopsis
  misc_feature (28)..(420): Homolog of NCBI NO: 18402580 NR Description: cysteinyl-tRNA synthetase -related [Arabidopsis
  misc_feature (444)..(537): Homolog of NCBI NO: 25293240 NR Description: probable cysteinyl-tRNA synthetase
  misc_feature (21)..(420): Homolog of NCBI NO: 25293240 NR Description: probable cysteinyl-tRNA synthetase
  misc_feature (403)..(538): Homolog of NCBI NO: 37535144 NR Description: putative cysteinyl-tRNA synthetase
  misc_feature (1)..(433): Homolog of NCBI NO: 37535144 NR Description: putative cysteinyl-tRNA synthetase
MAKEAQSSPSATVAQATALPQLVLFNSLTKREEPFQPRVEGKVGMYVCGVTPYDFSHIGHARAYVAFDVLYRYLKFLGYEVEYVRNFTDIDDKIIKRANERGETVTSLSSRFINEFLLDMTELQCLPPTCEPRVTEHIEHIIELITKIMENDKAYAMEGDVYFSVESFPEYLSLSGRKFDQNQAGARVAFDTRKRNPADFALWKAAKEGEPFWDSPWGRGRPGWHIECSAMSAHYLGHLFDIHGGGKDLIFPHHENELAQSRAAYPESEVKCWMHNGFVNKDDKKMAKSDNNFFTIRDITALYHPLALRFFLMRTHYRSDVNHSDQALEIASDRVYYIFQTLYDCEEVLATYREEGISLSVPFEEQNLIDKHHSEFLKYMSNDLKTTDVLDRCFMELLKAINSSLNDLKKLQQKIEQQKKKQQQQKKQQQKQQQLQKQPEHYIQALIALEIELKNKLSILGLMPSSSLAEVLKQLKDKALKRAGLTEEKLQEQIEQRNVARKNKQFEISDGIRKNLATKGIALMDEPSGTVWRPCEPEGPHPLNK

SEQ ID NO: 111530 - protein, 501 aa, Zea mays subsp. mays
  misc_feature (1)..(501): Ceres Seq. ID no. 14303285
  misc_feature (8)..(118): Pfam Name: tRNA synthetases class I (I, L, M and V) Pfam Description: tRNA synthetases class I (I, L, M and V)
  misc_feature (1)..(456): Homolog of NCBI NO: 9758060 NR Description: cysteine-tRNA ligase [Arabidopsis thaliana]
  misc_feature (363)..(493): Homolog of NCBI NO: 15228880 NR Description: cysteine-tRNA ligase-related protein [Arabidopsis
  misc_feature (1)..(292): Homolog of NCBI NO: 15228880 NR Description: cysteine-tRNA ligase-related protein [Arabidopsis
  misc_feature (1)..(456): Homolog of NCBI NO: 15241557 NR Description: cysteine-tRNA ligase -related protein
  misc_feature (400)..(493): Homolog of NCBI NO: 18402580 NR Description: cysteinyl-tRNA synthetase -related [Arabidopsis
  misc_feature (1)..(376): Homolog of NCBI NO: 18402580 NR Description: cysteinyl-tRNA synthetase -related [Arabidopsis
  misc_feature (400)..(493): Homolog of NCBI NO: 25293240 NR Description: probable cysteinyl-tRNA synthetase
  misc_feature (1)..(376): Homolog of NCBI NO: 25293240 NR Description: probable cysteinyl-tRNA synthetase
  misc_feature (359)..(494): Homolog of NCBI NO: 37535144 NR Description: putative cysteinyl-tRNA synthetase
  misc_feature (1)..(389): Homolog of NCBI NO: 37535144 NR Description: putative cysteinyl-tRNA synthetase
MYVCGVTPYDFSHIGHARAYVAFDVLYRYLKFLGYEVEYVRNFTDIDDKIIKRANERGETVTSLSSRFINEFLLDMTELQCLPPTCEPRVTEHIEHIIELITKIMENDKAYAMEGDVYFSVESFPEYLSLSGRKFDQNQAGARVAFDTRKRNPADFALWKAAKEGEPFWDSPWGRGRPGWHIECSAMSAHYLGHLFDIHGGGKDLIFPHHENELAQSRAAYPESEVKCWMHNGFVNKDDKKMAKSDNNFFTIRDITALYHPLALRFFLMRTHYRSDVNHSDQALEIASDRVYYIFQTLYDCEEVLATYREEGISLSVPFEEQNLIDKHHSEFLKYMSNDLKTTDVLDRCFMELLKAINSSLNDLKKLQQKIEQQKKKQQQQKKQQQKQQQLQKQPEHYIQALIALEIELKNKLSILGLMPSSSLAEVLKQLKDKALKRAGLTEEKLQEQIEQRNVARKNKQFEISDGIRKNLATKGIALMDEPSGTVWRPCEPEGPHPLNK

SEQ ID NO: 111531 - DNA, 701 bp, Zea mays subsp. mays
  misc_feature (1)..(701): Ceres Seq. ID no. 13666107
agaagcaggaaccgaaagttcgacaaatggtcaccaagctgggaaggcccttacaggatcacacaggtaatagctggtaatgcctacatgcttcaaactttgcaaggtgaggacctacctaagacgctaaatggtcgtttcttgaagcaataccatcctagtatgtggcaagatgcttaagaaagctgatgttgtcatatcgagttgattccaaccgcaccagtgcttttgtttcgctcagcgtccccaaaaggcagagggcatgtgttgagcacctattgtggcactgggcgcagtcggacggttcggccttgaggcccggacggtctgcaataggattagatcatgcggttaagctcctttctcctcgtgtgtttatccttctaaactcgtgggagctgttggagaacgcataggaacgggttcagacctccccttatatatttgaaggggtacggctgattgcgggcatccacaatcgaaccaatcaatatacttgtcgttcttctacctttcatgccctaggagtagcagtaacttagccttcgcatctctactttcacctctgtgcgactctacgtcgtatggagacgtcttgggnngtattgttgatcccaagaaaatcctaggatctctcctccctgactagggatggcagcaagtcgggttgtgttcgggtatgataataccgacccgatatc

SEQ ID NO: 111532 - protein, 75 aa, Zea mays subsp. mays
  misc_feature (1)..(75): Ceres Seq. ID no. 13666108
MLSYRVDSNRTSAFVSLSVPKRQRACVEHLLWHWAQSDGSALRPGRSAIGLDHAVKLLSPRVFILLNSWELLENA

SEQ ID NO: 111533 - protein, 59 aa, Zea mays subsp. mays
  misc_feature (1)..(59): Ceres Seq. ID no. 13666109
  misc_feature (2)..(59): Homolog of NCBI NO: 37991877 NR Description: putative polyprotein [Oryza sativa (japonica
  misc_feature (2)..(59): Homolog of NCBI NO: 34901308 NR Description: OSJNBb0015I22.3 [Oryza sativa (japonica
  misc_feature (2)..(59): Homolog of NCBI NO: 34913608 NR Description: retrotransposon-like protein
  misc_feature (2)..(59): Homolog of NCBI NO: 34900196 NR Description: similar to retrotransposon
  misc_feature (2)..(59): Homolog of NCBI NO: 37532418 NR Description: putative retroelement [Oryza sativa (japonica
  misc_feature (2)..(59): Homolog of NCBI NO: 19881654 NR Description: putative pol polyprotein [Oryza sativa]
  misc_feature (2)..(58): Homolog of NCBI NO: 34015263 NR Description: putative integrase [Oryza sativa (japonica
  misc_feature (2)..(59): Homolog of NCBI NO: 39546230 NR Description: OSJNBa0029L02.20 [Oryza sativa (japonica
  misc_feature (2)..(59): Homolog of NCBI NO: 38347560 NR Description: OSJNBb0093G06.1 [Oryza sativa (japonica
  misc_feature (2)..(59): Homolog of NCBI NO: 34896510 NR Description: putative integrase [Oryza sativa (japonica
RSRNRKFDKWSPSWEGPYRITQVIAGNAYMLQTLQGEDLPKTLNGRFLKQYHPSMWQDA

SEQ ID NO: 111534 - DNA, 738 bp, Zea mays subsp. mays
  misc_feature (1)..(738): Ceres Seq. ID no. 13623344
ggcgacgacttggcggtccccgctgccgccgtgcccaggcctctacttcgggagttcgggaccttcaccggcgacgagcacccatcgggttgcttcgcaaaacttccaacatccaggatacaattaattacgattccttcaactttatctcgatttataggaggttgcacagagcccatccaacagggtgtctcagacatactgatggatggggtgcccaatatccttgagaaatcatcacatgaatgcatgtactcttggtacttcaccagggaagaactagagaaattttctccatcaaggaaagatggtattactgaaaacaaggaatcagaaattcggcatttatattgttcatttatccgggatgttggcatcaggctgaagctacctcagatgacactagcaacagcagtcatgctttgccatcgcttctatttacaccagtcccttgccaaaaatggatggcagacagttgcaacagtatgtgtatttctggcgtcgaaagttgaagatactccttgtcccctggaccatgtagttagagtggcctatgaaacaatgtataggcgggacactgctgcggctcaaaggatccgtcagaaggatgtttttgagaagcagaaagcgctcattttgatcggagagagattgcttcttacaactattcgatttgatttcaacattcagcatccttatagaccacttcttgatgccatgcaaaatcttggcatcaat

SEQ ID NO: 111535 - protein, 246 aa, Zea mays subsp. mays
  misc_feature (1)..(246): Ceres Seq. ID no. 13623345
  misc_feature (87)..(228): Pfam Name: Cyclin, N-terminal domain Pfam Description: Cyclin, N-terminal domain
  misc_feature (87)..(241): Homolog of NCBI NO: 2981196 NR Description: cyclin T1 [Homo sapiens]
  misc_feature (139)..(243): Homolog of NCBI NO: 6693016 NR Description: T22C5.8 [Arabidopsis thaliana]
  misc_feature (87)..(241): Homolog of NCBI NO: 15235087 NR Description: cyclin family [Arabidopsis thaliana]
  misc_feature (86)..(238): Homolog of NCBI NO: 15219592 NR Description: cyclin family [Arabidopsis thaliana]
  misc_feature (87)..(245): Homolog of NCBI NO: 7486085 NR Description: hypothetical protein F24J7.161 - Arabidopsis
  misc_feature (74)..(243): Homolog of NCBI NO: 21618277 NR Description: putative cyclin [Arabidopsis thaliana]
  misc_feature (74)..(243): Homolog of NCBI NO: 15217663 NR Description: cyclin family [Arabidopsis thaliana]
  misc_feature (78)..(245): Homolog of NCBI NO: 9759604 NR Description: contains similarity to cyclin~gene_id:K18C1.7
  misc_feature (87)..(245): Homolog of NCBI NO: 30684822 NR Description: cyclin family [Arabidopsis thaliana]
  misc_feature (78)..(245): Homolog of NCBI NO: 30694715 NR Description: cyclin family [Arabidopsis thaliana]
GDDLAVPAAAVPRPLLREFGTFTGDEHPSGCFAKLPTSRIQLITIPSTLSRFIGGCTEPIQQGVSDILMDGVPNILEKSSHECMYSWYFTREELEKFSPSRKDGITENKESEIRHLYCSFIRDVGIRLKLPQMTLATAVMLCHRFYLHQSLAKNGWQTVATVCVFLASKVEDTPCPLDHVVRVAYETMYRRDTAAAQRIRQKDVFEKQKALILIGERLLLTTIRFDFNIQHPYRPLLDAMQNLGIN

SEQ ID NO: 111536 - protein, 178 aa, Zea mays subsp. mays
  misc_feature (1)..(178): Ceres Seq. ID no. 13623346
  misc_feature (19)..(160): Pfam Name: Cyclin, N-terminal domain Pfam Description: Cyclin, N-terminal domain
  misc_feature (19)..(177): Homolog of NCBI NO: 7486085 NR Description: hypothetical protein F24J7.161 - Arabidopsis
  misc_feature (6)..(175): Homolog of NCBI NO: 21618277 NR Description: putative cyclin [Arabidopsis thaliana]
  misc_feature (6)..(175): Homolog of NCBI NO: 15217663 NR Description: cyclin family [Arabidopsis thaliana]
  misc_feature (19)..(173): Homolog of NCBI NO: 2981196 NR Description: cyclin T1 [Homo sapiens]
  misc_feature (19)..(173): Homolog of NCBI NO: 15235087 NR Description: cyclin family [Arabidopsis thaliana]
  misc_feature (18)..(170): Homolog of NCBI NO: 15219592 NR Description: cyclin family [Arabidopsis thaliana]
  misc_feature (71)..(175): Homolog of NCBI NO: 6693016 NR Description: T22C5.8 [Arabidopsis thaliana]
  misc_feature (10)..(177): Homolog of NCBI NO: 9759604 NR Description: contains similarity to cyclin~gene_id:K18C1.7
  misc_feature (19)..(177): Homolog of NCBI NO: 30684822 NR Description: cyclin family [Arabidopsis thaliana]
  misc_feature (10)..(177): Homolog of NCBI NO: 30694715 NR Description: cyclin family [Arabidopsis thaliana]
MDGVPNILEKSSHECMYSWYFTREELEKFSPSRKDGITENKESEIRHLYCSFIRDVGIRLKLPQMTLATAVMLCHRFYLHQSLAKNGWQTVATVCVFLASKVEDTPCPLDHVVRVAYETMYRRDTAAAQRIRQKDVFEKQKALILIGERLLLTTIRFDFNIQHPYRPLLDAMQNLGIN

SEQ ID NO: 111537 - protein, 163 aa, Zea mays subsp. mays
  misc_feature (1)..(163): Ceres Seq. ID no. 13623347
  misc_feature (4)..(145): Pfam Name: Cyclin, N-terminal domain Pfam Description: Cyclin, N-terminal domain
  misc_feature (4)..(158): Homolog of NCBI NO: 2981196 NR Description: cyclin T1 [Homo sapiens]
  misc_feature (56)..(160): Homolog of NCBI NO: 6693016 NR Description: T22C5.8 [Arabidopsis thaliana]
  misc_feature (4)..(158): Homolog of NCBI NO: 15235087 NR Description: cyclin family [Arabidopsis thaliana]
  misc_feature (3)..(155): Homolog of NCBI NO: 15219592 NR Description: cyclin family [Arabidopsis thaliana]
  misc_feature (4)..(162): Homolog of NCBI NO: 7486085 NR Description: hypothetical protein F24J7.161 - Arabidopsis
  misc_feature (1)..(160): Homolog of NCBI NO: 21618277 NR Description: putative cyclin [Arabidopsis thaliana]
  misc_feature (1)..(160): Homolog of NCBI NO: 15217663 NR Description: cyclin family [Arabidopsis thaliana]
  misc_feature (1)..(162): Homolog of NCBI NO: 9759604 NR Description: contains similarity to cyclin~gene_id:K18C1.7
  misc_feature (4)..(162): Homolog of NCBI NO: 30684822 NR Description: cyclin family [Arabidopsis thaliana]
  misc_feature (1)..(162): Homolog of NCBI NO: 30694715 NR Description: cyclin family [Arabidopsis thaliana]
MYSWYFTREELEKFSPSRKDGITENKESEIRHLYCSFIRDVGIRLKLPQMTLATAVMLCHRFYLHQSLAKNGWQTVATVCVFLASKVEDTPCPLDHVVRVAYETMYRRDTAAAQRIRQKDVFEKQKALILIGERLLLTTIRFDFNIQHPYRPLLDAMQNLGIN

SEQ ID NO: 111538 - DNA, 1761 bp, Zea mays subsp. mays
  misc_feature (1)..(1761): Ceres Seq. ID no. 13624708
ccccccccccccccaataataagagccttgataagcacctttctgatatggctgcagcagttccagaaccacaagtgggtgatctcaccaatttgttcatttaaatgttcctatacagctgaatctcatggggttgagtggcatatcagatatgagataatcaaaggaatttgccatggtttgcattaccttcacacagattgccaaattgtccatttggacctaaagcctgagaatatattgctagatgacaacatggagccaaaaattacagattttggtatgtccaggctctttggtctacaacaatccaaaatcatcaccaaaacttgtggaggaacacttggatacatggcaccagaatacttactaaaagggttgatttcagtgaaggccgacatattcagtttgggcgttataatcatagaggtgatgaccggaggccggaattatcccacttgtgaaaaatcttgcgagcaattcgctgttgatgtggttggacgttggaggaagaggttattggaggaggcaggaaggtacacacccttggaaaaatacgttgagcaagtagagacatgcatcttgataggattgatgtgtgtcgatgatgatcctaacaaaaggcccacgacattggacattatcgaaaggcttaccaaagtagatgtcacgaacacggacagagggccacccaaaactctggaggccgcgacagggcttacaggccaccccaacctcgcaactagatcatttcttgacaggttccgccgaaccatcgtgatagggatgctgaagaaggccctgaaaatccaggacgtatcgcagttggagcagctcctggccaaggaggtgctgctggagctccacaaaatcggcacgaatgcaactggaaacagatcgttcctggagaggctccacgcaagcatcaccatggctacgctggttcaggcgctgcattccttggacttggatccatcggcggcgctgcgtatggaggtgctgttcttggcgctggagaatatgcgtggaaaaaacaactcaaggcgaagaagcgaggacgtccttgagctggaggagcggccagagcagatccggtcggtgctggaggctggcaccagggccaggctcagtgatgaggaacacatgccgtcggtgtctgtgcaggctgaagaccaggcctttcccaaaccgaagttggccaaagtacgcgccaccgccccggtgtgcgtgtcagcagtgtggttggcggccggcataggattcctgtgtggattcaccctaggagagatgaggggattaaggcggacgagggtccacgaacgcacgtgatgccaatgtgcccacatgacatggccagaaaatgtcactgcggtggaccatgcatgcacgaattaaggagcaccagttagaatacgtattctagattcattttacaaattctgtatttaaaaggaacttgtgcattgtgacagaggcggcggactggatcaggttgtattgtttctgctggtgtcctggcgtatgtataagccacggagtgtatcggatgaaattgaacagagaaatgtgcaatatagaaccgtgttgagggcnnnaaaaaaaaaaaaaaaaaaaaaaaaaaaaaaaaaaaaaaaaaaaaaaaaaaaaaaaaaaaaaaaaaaaaaaaaaaaaaaaaaaaaaaaaaaaaaaaaaaaaaaccccgggggggggcccggaacccaattcccccaaaaggggggcgaaaaaaaattcccggggcgg

SEQ ID NO: 111539 - protein, 442 aa, Zea mays subsp. mays
  misc_feature (1)..(442): Ceres Seq. ID no. 13624709
  misc_feature (39)..(230): Homolog of NCBI NO: 21728344 NR Description: stem rust resistance protein Rpg1
  misc_feature (39)..(230): Homolog of NCBI NO: 21929729 NR Description: barley stem rust resistance protein
  misc_feature (45)..(249): Homolog of NCBI NO: 34393202 NR Description: putative serine/threonine-specific protein kinase
  misc_feature (39)..(239): Homolog of NCBI NO: 34394941 NR Description: putative serine/threonine-specific protein
  misc_feature (45)..(277): Homolog of NCBI NO: 33146545 NR Description: putative receptor-like protein kinase 4
  misc_feature (41)..(226): Homolog of NCBI NO: 34395229 NR Description: putative serine/threonine kinase -related protein
  misc_feature (45)..(249): Homolog of NCBI NO: 34395235 NR Description: putative serine/threonine kinase
  misc_feature (39)..(230): Homolog of NCBI NO: 21724199 NR Description: stem rust resistance protein [Hordeum vulgare
  misc_feature (41)..(222): Homolog of NCBI NO: 38344521 NR Description: OSJNBa0016N04.14 [Oryza sativa (japonica
  misc_feature (41)..(218): Homolog of NCBI NO: 37532178 NR Description: putative receptor-like protein kinase
PPPPPIIRALISTFLIWLQQFQNHKWVISPICSFKCSYTAESHGVEWHIRYEIIKGICHGLHYLHTDCQIVHLDLKPENILLDDNMEPKITDFGMSRLFGLQQSKIITKTCGGTLGYMAPEYLLKGLISVKADIFSLGVIIIEVMTGGRNYPTCEKSCEQFAVDVVGRWRKRLLEEAGRYTPLEKYVEQVETCILIGLMCVDDDPNKRPTTLDIIERLTKVDVTNTDRGPPKTLEAATGLTGHPNLATRSFLDRFRRTIVIGMLKKALKIQDVSQLEQLLAKEVLLELHKIGTNATGNRSFLERLHASITMATLVQALHSLDLDPSAALRMEVLFLALENMRGKNNSRRRSEDVLELEERPEQIRSVLEAGTRARLSDEEHMPSVSVQAEDQAFPKPKLAKVRATAPVCVSAVWLAAGIGFLCGFTLGEMRGLRRTRVHERT

SEQ ID NO: 111540 - protein, 357 aa, Zea mays subsp. mays
  misc_feature (1)..(357): Ceres Seq. ID no. 13624710
  misc_feature (1)..(145): Homolog of NCBI NO: 21728344 NR Description: stem rust resistance protein Rpg1
  misc_feature (1)..(145): Homolog of NCBI NO: 21929729 NR Description: barley stem rust resistance protein
  misc_feature (1)..(164): Homolog of NCBI NO: 34393202 NR Description: putative serine/threonine-specific protein kinase
  misc_feature (1)..(154): Homolog of NCBI NO: 34394941 NR Description: putative serine/threonine-specific protein
  misc_feature (1)..(192): Homolog of NCBI NO: 33146545 NR Description: putative receptor-like protein kinase 4
  misc_feature (1)..(141): Homolog of NCBI NO: 34395229 NR Description: putative serine/threonine kinase -related protein
  misc_feature (1)..(164): Homolog of NCBI NO: 34395235 NR Description: putative serine/threonine kinase
  misc_feature (1)..(145): Homolog of NCBI NO: 21724199 NR Description: stem rust resistance protein [Hordeum vulgare
  misc_feature (1)..(137): Homolog of NCBI NO: 38344521 NR Description: OSJNBa0016N04.14 [Oryza sativa (japonica
  misc_feature (1)..(133): Homolog of NCBI NO: 37532178 NR Description: putative receptor-like protein kinase
MEPKITDFGMSRLFGLQQSKIITKTCGGTLGYMAPEYLLKGLISVKADIFSLGVIIIEVMTGGRNYPTCEKSCEQFAVDVVGRWRKRLLEEAGRYTPLEKYVEQVETCILIGLMCVDDDPNKRPTTLDIIERLTKVDVTNTDRGPPKTLEAATGLTGHPNLATRSFLDRFRRTIVIGMLKKALKIQDVSQLEQLLAKEVLLELHKIGTNATGNRSFLERLHASITMATLVQALHSLDLDPSAALRMEVLFLALENMRGKNNSRRRSEDVLELEERPEQIRSVLEAGTRARLSDEEHMPSVSVQAEDQAFPKPKLAKVRATAPVCVSAVWLAAGIGFLCGFTLGEMRGLRRTRVHERT

SEQ ID NO: 111541 - protein, 348 aa, Zea mays subsp. mays
  misc_feature (1)..(348): Ceres Seq. ID no. 13624711
  misc_feature (1)..(136): Homolog of NCBI NO: 21728344 NR Description: stem rust resistance protein Rpg1
  misc_feature (1)..(136): Homolog of NCBI NO: 21929729 NR Description: barley stem rust resistance protein
  misc_feature (1)..(155): Homolog of NCBI NO: 34393202 NR Description: putative serine/threonine-specific protein kinase
  misc_feature (1)..(145): Homolog of NCBI NO: 34394941 NR Description: putative serine/threonine-specific protein
  misc_feature (1)..(183): Homolog of NCBI NO: 33146545 NR Description: putative receptor-like protein kinase 4
  misc_feature (1)..(132): Homolog of NCBI NO: 34395229 NR Description: putative serine/threonine kinase -related protein
  misc_feature (1)..(155): Homolog of NCBI NO: 34395235 NR Description: putative serine/threonine kinase
  misc_feature (1)..(136): Homolog of NCBI NO: 21724199 NR Description: stem rust resistance protein [Hordeum vulgare
  misc_feature (1)..(128): Homolog of NCBI NO: 38344521 NR Description: OSJNBa0016N04.14 [Oryza sativa (japonica
  misc_feature (1)..(124): Homolog of NCBI NO: 37532178 NR Description: putative receptor-like protein kinase
MSRLFGLQQSKIITKTCGGTLGYMAPEYLLKGLISVKADIFSLGVIIIEVMTGGRNYPTCEKSCEQFAVDVVGRWRKRLLEEAGRYTPLEKYVEQVETCILIGLMCVDDDPNKRPTTLDIIERLTKVDVTNTDRGPPKTLEAATGLTGHPNLATRSFLDRFRRTIVIGMLKKALKIQDVSQLEQLLAKEVLLELHKIGTNATGNRSFLERLHASITMATLVQALHSLDLDPSAALRMEVLFLALENMRGKNNSRRRSEDVLELEERPEQIRSVLEAGTRARLSDEEHMPSVSVQAEDQAFPKPKLAKVRATAPVCVSAVWLAAGIGFLCGFTLGEMRGLRRTRVHERT

SEQ ID NO: 111542 - DNA, 2517 bp, Zea mays subsp. mays
  misc_feature (1)..(2517): Ceres Seq. ID no. 13623350
atcctgtcatccaccctcgcccaaccgacggctaccggttgtaagattggaatcgtttgatggccgccgccgccgcttcgcctccggttcctttaggacccgatgcctccgatctactggacggggatctccgtctcaagcccgctgtggcaatctcatgggattccgaagcactacacagccatgcagaaaggtgtgagatagagtcaaaagtgtgtgtcattgatccttctctgcttccagctctagatgatttattgcaggacatctatgaatcattgcaaccacagccagtggactatgaacaccgaaaccttatggttaatgttttcaacaaaattgttggagaaatttttggtaaaaataatgagcttccaattgtggaaccatttggatctttcacaatggatctatttactcctcaaagtgacctggacctctctgtgaacttcaatactgatgcaaatgatcagtatcctcgcaagaacaagatttctgctattaggaagcttgcacatgttctattttctcatcagcgtcatggtcgctgttatggtgtttcacctattgtgactgctagagttcctgtactgaaggttattgataagggaactggtgtagagtgtgatatttcagtagaaaacaaagacggcatgtcaagatcagccatatttaaatttatttcatcaattgataaaagattccggatactttgttatctgatgaagttctgggctaaggtacatgatgtgaactgccccaaagatcgaacaatgagctctatggcaattatttctttagtttcttttcatttacagactcggtgtcctccaatattacctgcattttctgccgtattgaaagatggtacagattttgcaagtattgagaagaatgtatcactattccagggttttgggcacagcaataaagagtctattgctgaactttttgtatcactaatgagtaaactagtgtcagtggagggtttatgggagcaagggctctgtgctagcaattttgaagggacatggatatcgaagacctgggcgaagggtgttggcaacttgaatgttgaggacttcttggaccgatctcagaattttgccagatcggtaggggtgaaggagatgcagaaaatatgtgaatgcctaagggctagcgtttctgatttgagcaagttttctaagggtgaaattgctgcgcccaagctaaaggccctgttgtttaagcctttgaaccaggttaacccagtcattaaaccccatcagaaaactattaagaggaagcgtactaatccaaataagaccagaactaaccctattcagaaaaatgctaagaaaaagaaggcccttgagcaggataaattagccatttctcctggtcagaaagatggtaagaagacccttgatcaagagaagtcagttagttctcccattcagaaaggtgctaagaagaccaaaccccttaaccaggataagttagtcatttctcccggccaggaagatgacaagaagccccttgtgcaggatgagccaatagtagtgtctcccatccagaagaataacaataagtatgttgatcaggagaagtcccttcagcaggagaagcaaatcatctctcccggacagaaagatgataagaagagcagcaaggtgggacctgactcagcatgtaatcatgtgcaacagaagaaagtgaaggctactgtatctaccggccgtgctgctaatactcatgtttctagttccaggcctcgctctgtttttatcccccaagcacattggcccagccagccaattgttgatcggtttgcgcatatacctgagcacctgatcagcccttctgcttttagttatgggttgccacaaccacttatgcatccagcctatcctcatcctcattctcatcagggattggtaggtcaaggacagggtaatttccttcatttcaatcctggtattgagctgcagcatcaaggccaggctttcttcggtcctccagctgtctaccaccccatggtgaatgggtttcacccattcggtatcaatggtgctcagcaagtgcagtacatcgacaataggatggtgcagaggccaccatatggttttggcccaggtttctggggatgatggttgcagcctgaggaaaggttggttgctaactagtgggggtttgaggtgaaagttgtcagttcaaagaaaaaaaaagctgttgtgtctaatatactcaaagatttagctttaaataggggccagtggaaaatagctaaccatgtgtctgaaccttgatttgtggtttttgttcggtttcagctctagcttaccttagaagtaaaatgttctgttgatgttggattttaactctagcctatcctgggattaaaaggttttgttgttgttgttgtaagttgtaattgtaactgttaggtttgtactctagtctgatttaaaagtaaaaaggctatattgttgttgttgtatctagacctgtacaaggagaaataatcaaataagg

SEQ ID NO: 111543 - protein, 690 aa, Zea mays subsp. mays
  misc_feature (1)..(690): Ceres Seq. ID no. 13623351
  misc_feature (111)..(206): Pfam Name: Nucleotidyltransferase domain Pfam Description: Nucleotidyltransferase domain
  misc_feature (55)..(356): Homolog of NCBI NO: 16550803 NR Description: unnamed protein product [Homo sapiens]
  misc_feature (1)..(488): Homolog of NCBI NO: 23956302 NR Description: hypothetical protein MGC38585 [Mus musculus]
  misc_feature (55)..(490): Homolog of NCBI NO: 37539639 NR Description: similar to KIAA1711 protein [Homo sapiens]
  misc_feature (70)..(353): Homolog of NCBI NO: 18406841 NR Description: expressed protein [Arabidopsis thaliana]
  misc_feature (63)..(317): Homolog of NCBI NO: 34908258 NR Description: P0446B05.18 [Oryza sativa (japonica
  misc_feature (61)..(319): Homolog of NCBI NO: 15225547 NR Description: expressed protein [Arabidopsis thaliana]
  misc_feature (337)..(409): Homolog of NCBI NO: 15231232 NR Description: hypothetical protein [Arabidopsis thaliana]
  misc_feature (48)..(221): Homolog of NCBI NO: 15231232 NR Description: hypothetical protein [Arabidopsis thaliana]
  misc_feature (55)..(406): Homolog of NCBI NO: 15231229 NR Description: expressed protein [Arabidopsis thaliana]
  misc_feature (55)..(406): Homolog of NCBI NO: 30793987 NR Description: unknown protein [Arabidopsis thaliana]
MAAAAASPPVPLGPDASDLLDGDLRLKPAVAISWDSEALHSHAERCEIESKVCVIDPSLLPALDDLLQDIYESLQPQPVDYEHRNLMVNVFNKIVGEIFGKNNELPIVEPFGSFTMDLFTPQSDLDLSVNFNTDANDQYPRKNKISAIRKLAHVLFSHQRHGRCYGVSPIVTARVPVLKVIDKGTGVECDISVENKDGMSRSAIFKFISSIDKRFRILCYLMKFWAKVHDVNCPKDRTMSSMAIISLVSFHLQTRCPPILPAFSAVLKDGTDFASIEKNVSLFQGFGHSNKESIAELFVSLMSKLVSVEGLWEQGLCASNFEGTWISKTWAKGVGNLNVEDFLDRSQNFARSVGVKEMQKICECLRASVSDLSKFSKGEIAAPKLKALLFKPLNQVNPVIKPHQKTIKRKRTNPNKTRTNPIQKNAKKKKALEQDKLAISPGQKDGKKTLDQEKSVSSPIQKGAKKTKPLNQDKLVISPGQEDDKKPLVQDEPIVVSPIQKNNNKYVDQEKSLQQEKQIISPGQKDDKKSSKVGPDSACNHVQQKKVKATVSTGRAANTHVSSSRPRSVFIPQAHWPSQPIVDRFAHIPEHLISPSAFSYGLPQPLMHPAYPHPHSHQGLVGQGQGNFLHFNPGIELQHQGQAFFGPPAVYHPMVNGFHPFGINGAQQVQYIDNRMVQRPPYGFGPGFWG

SEQ ID NO: 111544 - protein, 604 aa, Zea mays subsp. mays
  misc_feature (1)..(604): Ceres Seq. ID no. 13623352
  misc_feature (25)..(120): Pfam Name: Nucleotidyltransferase domain Pfam Description: Nucleotidyltransferase domain
  misc_feature (1)..(270): Homolog of NCBI NO: 16550803 NR Description: unnamed protein product [Homo sapiens]
  misc_feature (1)..(402): Homolog of NCBI NO: 23956302 NR Description: hypothetical protein MGC38585 [Mus musculus]
  misc_feature (1)..(404): Homolog of NCBI NO: 37539639 NR Description: similar to KIAA1711 protein [Homo sapiens]
  misc_feature (1)..(267): Homolog of NCBI NO: 18406841 NR Description: expressed protein [Arabidopsis thaliana]
  misc_feature (1)..(231): Homolog of NCBI NO: 34908258 NR Description: P0446B05.18 [Oryza sativa (japonica
  misc_feature (1)..(233): Homolog of NCBI NO: 15225547 NR Description: expressed protein [Arabidopsis thaliana]
  misc_feature (251)..(323): Homolog of NCBI NO: 15231232 NR Description: hypothetical protein [Arabidopsis thaliana]
  misc_feature (1)..(135): Homolog of NCBI NO: 15231232 NR Description: hypothetical protein [Arabidopsis thaliana]
  misc_feature (1)..(320): Homolog of NCBI NO: 15231229 NR Description: expressed protein [Arabidopsis thaliana]
  misc_feature (1)..(320): Homolog of NCBI NO: 30793987 NR Description: unknown protein [Arabidopsis thaliana]
MVNVFNKIVGEIFGKNNELPIVEPFGSFTMDLFTPQSDLDLSVNFNTDANDQYPRKNKISAIRKLAHVLFSHQRHGRCYGVSPIVTARVPVLKVIDKGTGVECDISVENKDGMSRSAIFKFISSIDKRFRILCYLMKFWAKVHDVNCPKDRTMSSMAIISLVSFHLQTRCPPILPAFSAVLKDGTDFASIEKNVSLFQGFGHSNKESIAELFVSLMSKLVSVEGLWEQGLCASNFEGTWISKTWAKGVGNLNVEDFLDRSQNFARSVGVKEMQKICECLRASVSDLSKFSKGEIAAPKLKALLFKPLNQVNPVIKPHQKTIKRKRTNPNKTRTNPIQKNAKKKKALEQDKLAISPGQKDGKKTLDQEKSVSSPIQKGAKKTKPLNQDKLVISPGQEDDKKPLVQDEPIVVSPIQKNNNKYVDQEKSLQQEKQIISPGQKDDKKSSKVGPDSACNHVQQKKVKATVSTGRAANTHVSSSRPRSVFIPQAHWPSQPIVDRFAHIPEHLISPSAFSYGLPQPLMHPAYPHPHSHQGLVGQGQGNFLHFNPGIELQHQGQAFFGPPAVYHPMVNGFHPFGINGAQQVQYIDNRMVQRPPYGFGPGFWG

SEQ ID NO: 111545 - protein, 575 aa, Zea mays subsp. mays
  misc_feature (1)..(575): Ceres Seq. ID no. 13623353
  misc_feature (1)..(91): Pfam Name: Nucleotidyltransferase domain Pfam Description: Nucleotidyltransferase domain
  misc_feature (1)..(241): Homolog of NCBI NO: 16550803 NR Description: unnamed protein product [Homo sapiens]
  misc_feature (1)..(373): Homolog of NCBI NO: 23956302 NR Description: hypothetical protein MGC38585 [Mus musculus]
  misc_feature (1)..(375): Homolog of NCBI NO: 37539639 NR Description: similar to KIAA1711 protein [Homo sapiens]
  misc_feature (1)..(238): Homolog of NCBI NO: 18406841 NR Description: expressed protein [Arabidopsis thaliana]
  misc_feature (1)..(202): Homolog of NCBI NO: 34908258 NR Description: P0446B05.18 [Oryza sativa (japonica
  misc_feature (1)..(204): Homolog of NCBI NO: 15225547 NR Description: expressed protein [Arabidopsis thaliana]
  misc_feature (222)..(294): Homolog of NCBI NO: 15231232 NR Description: hypothetical protein [Arabidopsis thaliana]
  misc_feature (1)..(106): Homolog of NCBI NO: 15231232 NR Description: hypothetical protein [Arabidopsis thaliana]
  misc_feature (1)..(291): Homolog of NCBI NO: 15231229 NR Description: expressed protein [Arabidopsis thaliana]
  misc_feature (1)..(291): Homolog of NCBI NO: 30793987 NR Description: unknown protein [Arabidopsis thaliana]
MDLFTPQSDLDLSVNFNTDANDQYPRKNKISAIRKLAHVLFSHQRHGRCYGVSPIVTARVPVLKVIDKGTGVECDISVENKDGMSRSAIFKFISSIDKRFRILCYLMKFWAKVHDVNCPKDRTMSSMAIISLVSFHLQTRCPPILPAFSAVLKDGTDFASIEKNVSLFQGFGHSNKESIAELFVSLMSKLVSVEGLWEQGLCASNFEGTWISKTWAKGVGNLNVEDFLDRSQNFARSVGVKEMQKICECLRASVSDLSKFSKGEIAAPKLKALLFKPLNQVNPVIKPHQKTIKRKRTNPNKTRTNPIQKNAKKKKALEQDKLAISPGQKDGKKTLDQEKSVSSPIQKGAKKTKPLNQDKLVISPGQEDDKKPLVQDEPIVVSPIQKNNNKYVDQEKSLQQEKQIISPGQKDDKKSSKVGPDSACNHVQQKKVKATVSTGRAANTHVSSSRPRSVFIPQAHWPSQPIVDRFAHIPEHLISPSAFSYGLPQPLMHPAYPHPHSHQGLVGQGQGNFLHFNPGIELQHQGQAFFGPPAVYHPMVNGFHPFGINGAQQVQYIDNRMVQRPPYGFGPGFWG

SEQ ID NO: 111546 - DNA, 2323 bp, Zea mays subsp. mays
  misc_feature (1)..(2323): Ceres Seq. ID no. 15224688
aatgggtgtgggcaagggacggtttggtacgctgagtgttttagccgactgcttctgagtggtaatgcgatgggacggctagtgtaatcatatcctttgcactgttgactggagtcccaatgggtgtagtgttgcatgaaacggcgtccgccgtctgacgtgtctttggatgggtgggagtgcttattgaatgccttgcgactgttcagtgaccgcggttggaagtgagcggttgcctttctcctctataaataacccctttgcttctctggttttttcacacctcttcgctgctctttactgccttcttctcctcccttctgtctgcttccaccatgggcaagaacaacaagcgcaagcgtgagccgactcctccatcggaggagtttggtgattcggaatactcagaggaggagttctccactgagtccgaggggtctccggctcccatccccctgcgcgagtcgtctgatgactcagacgactcccaggggcttgcggcggaggtctggacgtacatccgggccgtcgagcgctccgggctcgagggctcggatgagtccgagttctcctcggacgaggaggactcggacggcggtgagggcgaggatgacgacgacgacgacggcgacgacgacgacggtggcgacggcgacggtgatggcggcaacggcggcggaggcagcggcggcaaggacggcaccaagggcggcagcagcgtgggcagcaccggaggcaacggcggcaagggcagcggcggcagggccagtggctaaacgccactggtcttttagatattagtatagttagaataatgtagtagtaattagtgtagtttagtagtagtagtaatgtagagtagtatagtgtagtttagtagtagtagtaatgtagagtagaagtagggaagcaccaactcgcgaagagttggtttgtaaactcattaacttccctttaatcaagaactgtcgttgaccctcctttttcgatgactcgtcgttgcttttcctgaatgttgaactgattcttttgatatagtagaaacaacgccgagcgatgtgaaggttgatatcagcgttttaagagtaacaccaagcaattgaacacaagaccagcgttttagaggcaatgccgaatgatagaaggtcggcatcggcactttagaagtaatgctgagcgattgaacacgtggttggcgtgttagagggcacgccgagtgattggaggtcggcgtcggcattttagaggcaacgccgagcgattgaacacgtggtcggcgttttagaggcaacgccgagtgattggaggtcggcgtcggcattttagaagtaatgccgagcgattgaacacgtggtcggcgtgttagaggacacgccgagtgattggaggtcggcgtcggcattttagaagtaatgccgagcgattgaacacgtggtcggcgtgttagaggacacgccgagtggttggaggtcggcgtcggcattttagaggtaacgccgagcgattgaacacgtggtcggcgttttagaggcaacgccgagtgatagccagcttcacgagttactttgaggataataaccgagtgatgaagtggcacatcggctttcttggaaataactgtcggatatccacgtggcatgctgggatttcggaaataaccgccgggtgatgactgggcactttttgaaagggtatctggttcaggaatatcccttaagagtcgcgcttttagccgcctttgctttccgtgccctagttcttgcatttccgcatctgaatcttctccgccactcgcctcctactctgtttgccagcgagaagcaagatggcgcccaagaggaagactgcgaactcgtctgccgcagtgatccccgccatcgaccccaacagtcagttacccttcgcaggtaaccatatgtctgttatttccgaagctgagctcctccgtcttgtctccatcggggttcttcctccgcgggaactctgttcttggcgggtttgccacgggactactgtcccaaccgaagatacccacgagtcagtagtttacgctcctttccttctccgcggcctcggccttcccatatctccttttttccgtggcctcctcgatttttatcacatcaacctgactcatttgaaccctaattccattctccaaatctccattttcgttcacctttgcgaagcttatctcggcgtgctgccgcattttggtttatggaagtatctgtatcactgccgtcctgggatggccggggggcaacatcagttggtcgggggtgccagtttggagatgcgtcgtgggcggaagaccgagtat

SEQ ID NO: 111547 - protein, 166 aa, Zea mays subsp. mays
  misc_feature (1)..(166): Ceres Seq. ID no. 15224689
  misc_feature (32)..(165): Homolog of NCBI NO: 38346603 NR Description: OSJNBa0071G03.7 [Oryza sativa (japonica
  misc_feature (32)..(165): Homolog of NCBI NO: 32488247 NR Description: OSJNBa0089E12.5 [Oryza sativa (japonica
  misc_feature (32)..(165): Homolog of NCBI NO: 29126375 NR Description: putative gypsy-type retrotransposon protein
  misc_feature (32)..(165): Homolog of NCBI NO: 5902448 NR Description: orf3 [Oryza sativa (japonica cultivar-group)]
  misc_feature (32)..(165): Homolog of NCBI NO: 34914172 NR Description: putative RIRE2 orf3 [Oryza sativa (japonica
  misc_feature (26)..(165): Homolog of NCBI NO: 34894224 NR Description: putative gypsy-type retrotransposon RIRE2 orf3
  misc_feature (32)..(165): Homolog of NCBI NO: 34906278 NR Description: putative gypsy-type retrotransposon RIRE2 orf3
  misc_feature (32)..(165): Homolog of NCBI NO: 34906434 NR Description: putative gypsy-type retrotransposon RIRE2 orf3
  misc_feature (1)..(165): Homolog of NCBI NO: 33113962 NR Description: putative gypsy-type retrotransposon [Zea mays]
  misc_feature (32)..(165): Homolog of NCBI NO: 34904810 NR Description: Putative gypsy-type retrotransposon RIRE2 protein
MAPKRKTANSSAAVIPAIDPNSQLPFAGNHMSVISEAELLRLVSIGVLPPRELCSWRVCHGTTVPTEDTHESVVYAPFLLRGLGLPISPFFRGLLDFYHINLTHLNPNSILQISIFVHLCEAYLGVLPHFGLWKYLYHCRPGMAGGQHQLVGGASLEMRRGRKTEY

SEQ ID NO: 111548 - protein, 146 aa, Zea mays subsp. mays
  misc_feature (1)..(146): Ceres Seq. ID no. 15224690
  misc_feature (68)..(142): Pfam Name: Herpesvirus latent membrane protein 1 (LMP1) Pfam Description: Herpesvirus latent membrane protein 1 (LMP1)
  misc_feature (1)..(145): Homolog of NCBI NO: 16506142 NR Description: MSP-1 [Mizuhopecten yessoensis]
  misc_feature (1)..(145): Homolog of NCBI NO: 16506142 NR Description: MSP-1 [Mizuhopecten yessoensis]
  misc_feature (1)..(145): Homolog of NCBI NO: 16506142 NR Description: MSP-1 [Mizuhopecten yessoensis]
  misc_feature (1)..(118): Homolog of NCBI NO: 29244064 NR Description: hypothetical protein 4933409G03 [Mus musculus]
  misc_feature (73)..(141): Homolog of NCBI NO: 18568237 NR Description: putative orf1 [Zea mays]
  misc_feature (1)..(146): Homolog of NCBI NO: 1617471 NR Description: ORFI [Zea diploperennis]
  misc_feature (1)..(146): Homolog of NCBI NO: 18568237 NR Description: putative orf1 [Zea mays]
  misc_feature (1)..(146): Homolog of NCBI NO: 1076786 NR Description: transposable retroelement homolog - perennial
MGKNNKRKREPTPPSEEFGDSEYSEEEFSTESEGSPAPIPLRESSDDSDDSQGLAAEVWTYIRAVERSGLEGSDESEFSSDEEDSDGGEGEDDDDDDGDDDDGGDGDGDGGNGGGGSGGKDGTKGGSSVGSTGGNGGKGSGGRASG

SEQ ID NO: 111549 - protein, 136 aa, Zea mays subsp. mays
  misc_feature (1)..(136): Ceres Seq. ID no. 15224691
  misc_feature (2)..(135): Homolog of NCBI NO: 34904810 NR Description: Putative gypsy-type retrotransposon RIRE2 protein
  misc_feature (2)..(135): Homolog of NCBI NO: 38346603 NR Description: OSJNBa0071G03.7 [Oryza sativa (japonica
  misc_feature (2)..(135): Homolog of NCBI NO: 32488247 NR Description: OSJNBa0089E12.5 [Oryza sativa (japonica
  misc_feature (2)..(135): Homolog of NCBI NO: 29126375 NR Description: putative gypsy-type retrotransposon protein
  misc_feature (2)..(135): Homolog of NCBI NO: 5902448 NR Description: orf3 [Oryza sativa (japonica cultivar-group)]
  misc_feature (2)..(135): Homolog of NCBI NO: 34914172 NR Description: putative RIRE2 orf3 [Oryza sativa (japonica
  misc_feature (1)..(135): Homolog of NCBI NO: 34894224 NR Description: putative gypsy-type retrotransposon RIRE2 orf3
  misc_feature (2)..(135): Homolog of NCBI NO: 34906278 NR Description: putative gypsy-type retrotransposon RIRE2 orf3
  misc_feature (2)..(135): Homolog of NCBI NO: 34906434 NR Description: putative gypsy-type retrotransposon RIRE2 orf3
  misc_feature (1)..(135): Homolog of NCBI NO: 33113962 NR Description: putative gypsy-type retrotransposon [Zea mays]
MSVISEAELLRLVSIGVLPPRELCSWRVCHGTTVPTEDTHESVVYAPFLLRGLGLPISPFFRGLLDFYHINLTHLNPNSILQISIFVHLCEAYLGVLPHFGLWKYLYHCRPGMAGGQHQLVGGASLEMRRGRKTEY

SEQ ID NO: 111550 - DNA, 2172 bp, Zea mays subsp. mays
  misc_feature (1)..(2172): Ceres Seq. ID no. 13599720
  misc_feature: MA Experiment ID: 108504 Result: Down-regulated in Transcription
  misc_feature: MA Experiment 108504 PARAMETER Experiment Name: Zm_Drought_P Parameter: Age (day) Value: 8
  misc_feature: MA Experiment 108504 PARAMETER Experiment Name: Zm_Drought_P Parameter: Organism Value: Zea mays
  misc_feature: MA Experiment 108504 PARAMETER Experiment Name: Zm_Drought_P Parameter: Plant Line Value: 35A19
  misc_feature: MA Experiment 108504 PARAMETER Experiment Name: Zm_Drought_P Parameter: Timepoint (hr) Value: 12
  misc_feature: MA Experiment 108504 PARAMETER Experiment Name: Zm_Drought_P Parameter: Tissue Value: Aerial
  misc_feature: MA Experiment 108504 PARAMETER Experiment Name: Zm_Drought_P Parameter: Treatment Value: Drought vs. No Drought
  misc_feature: MA Experiment ID: 108515 Result: Down-regulated in Transcription
  misc_feature: MA Experiment 108515 PARAMETER Experiment Name: Zm_2mM_SA_P Parameter: Age (day) Value: 8
  misc_feature: MA Experiment 108515 PARAMETER Experiment Name: Zm_2mM_SA_P Parameter: Organism Value: Zea mays
  misc_feature: MA Experiment 108515 PARAMETER Experiment Name: Zm_2mM_SA_P Parameter: Plant Line Value: 35A19
  misc_feature: MA Experiment 108515 PARAMETER Experiment Name: Zm_2mM_SA_P Parameter: Timepoint (hr) Value: 12
  misc_feature: MA Experiment 108515 PARAMETER Experiment Name: Zm_2mM_SA_P Parameter: Tissue Value: Aerial
  misc_feature: MA Experiment 108515 PARAMETER Experiment Name: Zm_2mM_SA_P Parameter: Treatment Value: 2mM SA vs. No Treatment
  misc_feature: MA Experiment ID: 108522 Result: Down-regulated in Transcription
  misc_feature: MA Experiment 108522 PARAMETER Experiment Name: Zm_42deg_Heat_P Parameter: Age (day) Value: 8
  misc_feature: MA Experiment 108522 PARAMETER Experiment Name: Zm_42deg_Heat_P Parameter: Organism Value: Zea mays
  misc_feature: MA Experiment 108522 PARAMETER Experiment Name: Zm_42deg_Heat_P Parameter: Plant Line Value: 35A19
  misc_feature: MA Experiment 108522 PARAMETER Experiment Name: Zm_42deg_Heat_P Parameter: Temperature (deg C) Value: 42 vs. 22
  misc_feature: MA Experiment 108522 PARAMETER Experiment Name: Zm_42deg_Heat_P Parameter: Timepoint (hr) Value: 1
  misc_feature: MA Experiment 108522 PARAMETER Experiment Name: Zm_42deg_Heat_P Parameter: Tissue Value: Aerial
  misc_feature: MA Experiment ID: 108535 Result: Up-regulated in Transcription
  misc_feature: MA Experiment 108535 PARAMETER Experiment Name: Zm_Meristem_P Parameter: Age (day) Value: 8
  misc_feature: MA Experiment 108535 PARAMETER Experiment Name: Zm_Meristem_P Parameter: Organism Value: Zea mays
  misc_feature: MA Experiment 108535 PARAMETER Experiment Name: Zm_Meristem_P Parameter: Plant Line Value: 35A19
  misc_feature: MA Experiment 108535 PARAMETER Experiment Name: Zm_Meristem_P Parameter: Tissue Value: Root Meristem vs. Above Root Meristem
  misc_feature: MA Experiment ID: 108536 Result: Down-regulated in Transcription
  misc_feature: MA Experiment 108536 PARAMETER Experiment Name: Zm_Meristem_P Parameter: Age (day) Value: 8
  misc_feature: MA Experiment 108536 PARAMETER Experiment Name: Zm_Meristem_P Parameter: Organism Value: Zea mays
  misc_feature: MA Experiment 108536 PARAMETER Experiment Name: Zm_Meristem_P Parameter: Plant Line Value: 35A19
  misc_feature: MA Experiment 108536 PARAMETER Experiment Name: Zm_Meristem_P Parameter: Tissue Value: Shoot Meristem vs. Above Shoot Meristem
  misc_feature: MA Experiment ID: 108543 Result: Up-regulated in Transcription
  misc_feature: MA Experiment ID: 108547 Result: Up-regulated in Transcription
  misc_feature: MA Experiment 108547 PARAMETER Experiment Name: Zm_Imbibed_Seeds_P Parameter: Age (day) Value: 4 vs. 2
  misc_feature: MA Experiment 108547 PARAMETER Experiment Name: Zm_Imbibed_Seeds_P Parameter: Organism Value: Zea mays
  misc_feature: MA Experiment 108547 PARAMETER Experiment Name: Zm_Imbibed_Seeds_P Parameter: Plant Line Value: 35A19
  misc_feature: MA Experiment 108547 PARAMETER Experiment Name: Zm_Imbibed_Seeds_P Parameter: Tissue Value: Aerial vs. Embryo
  misc_feature: MA Experiment ID: 108556 Result: Down-regulated in Transcription
  misc_feature: MA Experiment 108556 PARAMETER Experiment Name: Zm_Drought_P Parameter: Age (day) Value: 9
  misc_feature: MA Experiment 108556 PARAMETER Experiment Name: Zm_Drought_P Parameter: Organism Value: Zea mays
  misc_feature: MA Experiment 108556 PARAMETER Experiment Name: Zm_Drought_P Parameter: Plant Line Value: 35A19
  misc_feature: MA Experiment 108556 PARAMETER Experiment Name: Zm_Drought_P Parameter: Timepoint (hr) Value: 24
  misc_feature: MA Experiment 108556 PARAMETER Experiment Name: Zm_Drought_P Parameter: Tissue Value: Aerial
  misc_feature: MA Experiment 108556 PARAMETER Experiment Name: Zm_Drought_P Parameter: Treatment Value: Drought vs. No Drought
  misc_feature: MA Experiment ID: 108597 Result: Down-regulated in Transcription
  misc_feature: MA Experiment 108597 PARAMETER Experiment Name: Zm_100uM_ABA_P Parameter: Age (day) Value: 9
  misc_feature: MA Experiment 108597 PARAMETER Experiment Name: Zm_100uM_ABA_P Parameter: Organism Value: Zea mays
  misc_feature: MA Experiment 108597 PARAMETER Experiment Name: Zm_100uM_ABA_P Parameter: Plant Line Value: 35A19
  misc_feature: MA Experiment 108597 PARAMETER Experiment Name: Zm_100uM_ABA_P Parameter: Timepoint (hr) Value: 24
  misc_feature: MA Experiment 108597 PARAMETER Experiment Name: Zm_100uM_ABA_P Parameter: Tissue Value: Aerial
  misc_feature: MA Experiment 108597 PARAMETER Experiment Name: Zm_100uM_ABA_P Parameter: Treatment Value: 100uM ABA vs. No Treatment
  misc_feature: MA Experiment ID: 108689 Result: Down-regulated in Transcription
  misc_feature: MA Experiment 108689 PARAMETER Experiment Name: Zm_Drought_Roots_P Parameter: Age (day) Value: 9
  misc_feature: MA Experiment 108689 PARAMETER Experiment Name: Zm_Drought_Roots_P Parameter: Organism Value: Zea mays
  misc_feature: MA Experiment 108689 PARAMETER Experiment Name: Zm_Drought_Roots_P Parameter: Plant Line Value: 35A19
  misc_feature: MA Experiment 108689 PARAMETER Experiment Name: Zm_Drought_Roots_P Parameter: Timepoint (hr) Value: 24
  misc_feature: MA Experiment 108689 PARAMETER Experiment Name: Zm_Drought_Roots_P Parameter: Tissue Value: Roots
  misc_feature: MA Experiment 108689 PARAMETER Experiment Name: Zm_Drought_Roots_P Parameter: Treatment Value: Drought vs. No Drought
  misc_feature: MA Experiment ID: 20000477 Result: Down-regulated in Transcription
  misc_feature: MA Experiment 20000477 PARAMETER Experiment Name: Zm_5mM_SA_P Parameter: Age (day) Value: 10
  misc_feature: MA Experiment 20000477 PARAMETER Experiment Name: Zm_5mM_SA_P Parameter: Organism Value: Zea mays
  misc_feature: MA Experiment 20000477 PARAMETER Experiment Name: Zm_5mM_SA_P Parameter: Plant Line Value: 35A19
  misc_feature: MA Experiment 20000477 PARAMETER Experiment Name: Zm_5mM_SA_P Parameter: Timepoint (hr) Value: 48
  misc_feature: MA Experiment 20000477 PARAMETER Experiment Name: Zm_5mM_SA_P Parameter: Tissue Value: Aerial
  misc_feature: MA Experiment 20000477 PARAMETER Experiment Name: Zm_5mM_SA_P Parameter: Treatment Value: 5mM SA vs. No Treatment
  misc_feature: MA Experiment ID: 20000478 Result: Down-regulated in Transcription
  misc_feature: MA Experiment 20000478 PARAMETER Experiment Name: Zm_5mM_SA_P Parameter: Age (day) Value: 11
  misc_feature: MA Experiment 20000478 PARAMETER Experiment Name: Zm_5mM_SA_P Parameter: Organism Value: Zea mays
  misc_feature: MA Experiment 20000478 PARAMETER Experiment Name: Zm_5mM_SA_P Parameter: Plant Line Value: 35A19
  misc_feature: MA Experiment 20000478 PARAMETER Experiment Name: Zm_5mM_SA_P Parameter: Timepoint (hr) Value: 72
  misc_feature: MA Experiment 20000478 PARAMETER Experiment Name: Zm_5mM_SA_P Parameter: Tissue Value: Aerial
  misc_feature: MA Experiment 20000478 PARAMETER Experiment Name: Zm_5mM_SA_P Parameter: Treatment Value: 5mM SA vs. No Treatment
  misc_feature: MA Experiment ID: 20000479 Result: Down-regulated in Transcription
  misc_feature: MA Experiment 20000479 PARAMETER Experiment Name: Zm_Drought_P Parameter: Age (day) Value: 10
  misc_feature: MA Experiment 20000479 PARAMETER Experiment Name: Zm_Drought_P Parameter: Organism Value: Zea mays
  misc_feature: MA Experiment 20000479 PARAMETER Experiment Name: Zm_Drought_P Parameter: Plant Line Value: 35A19
  misc_feature: MA Experiment 20000479 PARAMETER Experiment Name: Zm_Drought_P Parameter: Timepoint (hr) Value: 48
  misc_feature: MA Experiment 20000479 PARAMETER Experiment Name: Zm_Drought_P Parameter: Tissue Value: Aerial
  misc_feature: MA Experiment 20000479 PARAMETER Experiment Name: Zm_Drought_P Parameter: Treatment Value: Drought vs. No Drought
  misc_feature: MA Experiment ID: 20000480 Result: Down-regulated in Transcription
  misc_feature: MA Experiment 20000480 PARAMETER Experiment Name: Zm_Drought_P Parameter: Age (day) Value: 11
  misc_feature: MA Experiment 20000480 PARAMETER Experiment Name: Zm_Drought_P Parameter: Organism Value: Zea mays
  misc_feature: MA Experiment 20000480 PARAMETER Experiment Name: Zm_Drought_P Parameter: Plant Line Value: 35A19
  misc_feature: MA Experiment 20000480 PARAMETER Experiment Name: Zm_Drought_P Parameter: Timepoint (hr) Value: 72
  misc_feature: MA Experiment 20000480 PARAMETER Experiment Name: Zm_Drought_P Parameter: Tissue Value: Aerial
  misc_feature: MA Experiment 20000480 PARAMETER Experiment Name: Zm_Drought_P Parameter: Treatment Value: Drought vs. No Drought
  misc_feature: MA Experiment ID: 20000626 Result: Down-regulated in Transcription
  misc_feature: MA Experiment 20000626 PARAMETER Experiment Name: Zm_Herbicide-Treatments_P Parameter: Timepoint (hr) Value: 12
  misc_feature: MA Experiment 20000626 PARAMETER Experiment Name: Zm_Herbicide-Treatments_P Parameter: Tissue Value: Aerial
  misc_feature: MA Experiment 20000626 PARAMETER Experiment Name: Zm_Herbicide-Treatments_P Parameter: Treatment Value: Roundup vs. No Treatment
  misc_feature: MA Experiment ID: 20001614 Result: Up-regulated in Transcription
  misc_feature: MA Experiment 20001614 PARAMETER Experiment Name: Zm_50ppm_KNO3_L-to-H_P Parameter: Age (day) Value: 21
  misc_feature: MA Experiment 20001614 PARAMETER Experiment Name: Zm_50ppm_KNO3_L-to-H_P Parameter: Organism Value: Zea mays
  misc_feature: MA Experiment 20001614 PARAMETER Experiment Name: Zm_50ppm_KNO3_L-to-H_P Parameter: Plant Line Value: 35A19
  misc_feature: MA Experiment 20001614 PARAMETER Experiment Name: Zm_50ppm_KNO3_L-to-H_P Parameter: Timepoint (hr) Value: 48
  misc_feature: MA Experiment 20001614 PARAMETER Experiment Name: Zm_50ppm_KNO3_L-to-H_P Parameter: Tissue Value: Roots
  misc_feature: MA Experiment 20001614 PARAMETER Experiment Name: Zm_50ppm_KNO3_L-to-H_P Parameter: Treatment Value: 50ppm KNO3 vs. 50ppm KCl
gtttatctccacccatgcgtccctgctctcctctagttgagctcaatcccaagtgctcgcttaagctgtgtggccaggttccctttcctggtcgccgtcgatggaagccctgccatcgatatcgcatgatattggttgttttcttcgaccacgtcaatgcctcacaggatttggacaccttgtcgacactcgaccatgtgttcgctcgttaccacgccatcttcagcatcatggttctataaaactctgcgcactcgtcggcacccgtctgtcaatctccaccacgcagcgctgcatcggacttaccctgtatgatgttcgacgacaagcccgaaccagtatttatcagcattctcgcgagtagtgagtcacgtttgatgctggtacgataattactcgcgtgatgcggaagacgacccaagtcgaccccaagcgcgggctaatccgcaggataaagcggatgaactaatctgaagacggatagatgaaacaagtatcacaacaaggataatcatcaagtggacgtcgtctaacaacactaacctagtgttactcaggttctaactttgtgctgttgttgatggtgttaagtgccggtgggctcggccttcttataagtctaactttaccgatcacgtgcctcttccccttcttgtatttcatggtaagggacttccgcgtcgctgaaacagaggaagacatcggattctatgctggttttcttgctgcgtcgtacatggtgggcagaggcttctcttccatcttctggggcgtcatcgccgaccgcgttggacggaagcctgtcatcacgttttcgatactgtccgtggtcgtattcagcgcgctgtttggtctgagcacgacgtactggatggcgatcgccacgaggctcgtgctgggcgctctcaacggcctgctcgccccgataaaggcgtactgcgttgaagtttgccagacccagcaccaggcgcttggactctcgcttgtgaacacggcatgggctctgggtctcattgttggtccagctcttggaggctacctttcgcagccagctgagaaatatcctcacgtgttttccaaagactctgtatttggcagatttccataccttttgccctgtctaagtgtatcagcgtttgctacacttgtcctgataagctgtgagtggcttccggagactatacacaagcataaggttcccgaaatggacaccaaagcattcaaagccctgtcgtcaaaagagggctattgcgatccacctcgcaagaagaagagcttgctccagaacaggccttggatatcaaccctgctaccttactgctttttcagtcttcatgacacagcatatagtgagatactttccttatgggctgtgagcgaccggaagtatggcggccttagcttctcgactgaagatactggtcaggttcttgctatggcaggcgctagtcttctagtgtaccagcttgtcatttatcgctgggtccatagaattcttgggacagtcaactcagcacgaattgcatctgctgtgtccatacttgttcttgcaacttatccctttatgacatacctatcgggagtgaaactttccttggctctttgttccgcagccatgatgagaagtgctcttgcgatcactgtcaccacaggaatttcacttctacagaataatgctgtgtgccaagaacaaagaggcaccgcaaatggtatatcgacaactgcaatgtcattcttcaagtcaattgctccagtaggtgcaggggctctattctcatgggcacaaaaacgtcaagatgttgctttcctgccaggtgatcaagtggtgttcatggtgctgaatttggtgcagcttctcgggctgatatccacctttgagccctttctagtgttacctgcactaccagagtagtagtgtttaaggctagaagacattatgaaaataaatgtaccttggcacatagttacagttgatcgagtgcaagacagaaggaacatgattgtagccacttgttacactactaaagatgtctgattagcccaagattcaaaaagaagaatgttttattaattagcaaacttgatctattgtaatatcactgttccccaaaaaaaaaaaaaaaaaaaaaaaaaaaaaaaaaaaaaaaaaaaaacctcgggggggggcccggt

SEQ ID NO: 111551 - protein, 443 aa, Zea mays subsp. mays
  misc_feature (1)..(443): Ceres Seq. ID no. 13599721
  misc_feature (53)..(436): Homolog of NCBI NO: 21555230 NR Description: transporter-like protein [Arabidopsis thaliana]
  misc_feature (53)..(436): Homolog of NCBI NO: 30684567 NR Description: transporter-related protein [Arabidopsis thaliana]
  misc_feature (24)..(436): Homolog of NCBI NO: 15229781 NR Description: transporter - related [Arabidopsis thaliana]
  misc_feature (10)..(413): Homolog of NCBI NO: 10177340 NR Description: transporter-like protein [Arabidopsis thaliana]
  misc_feature (10)..(436): Homolog of NCBI NO: 22326785 NR Description: transporter - related [Arabidopsis thaliana]
  misc_feature (10)..(436): Homolog of NCBI NO: 20260160 NR Description: transporter-like protein [Arabidopsis thaliana]
  misc_feature (15)..(439): Homolog of NCBI NO: 23452821 NR Description: major facilitator superfamily antiporter
  misc_feature (10)..(436): Homolog of NCBI NO: 30684565 NR Description: transporter-related protein [Arabidopsis
  misc_feature (53)..(439): Homolog of NCBI NO: 23452819 NR Description: major facilitator superfamily antiporter [Zea
  misc_feature (12)..(439): Homolog of NCBI NO: 23452823 NR Description: major facilitator superfamily antiporter
MVLSAGGLGLLISLTLPITCLFPFLYFMVRDFRVAETEEDIGFYAGFLAASYMVGRGFSSIFWGVIADRVGRKPVITFSILSVVVFSALFGLSTTYWMAIATRLVLGALNGLLAPIKAYCVEVCQTQHQALGLSLVNTAWALGLIVGPALGGYLSQPAEKYPHVFSKDSVFGRFPYLLPCLSVSAFATLVLISCEWLPETIHKHKVPEMDTKAFKALSSKEGYCDPPRKKKSLLQNRPWISTLLPYCFFSLHDTAYSEILSLWAVSDRKYGGLSFSTEDTGQVLAMAGASLLVYQLVIYRWVHRILGTVNSARIASAVSILVLATYPFMTYLSGVKLSLALCSAAMMRSALAITVTTGISLLQNNAVCQEQRGTANGISTTAMSFFKSIAPVGAGALFSWAQKRQDVAFLPGDQVVFMVLNLVQLLGLISTFEPFLVLPALPE

SEQ ID NO: 111552 - protein, 416 aa, Zea mays subsp. mays; identical to SEQ ID NO: 16899
  misc_feature (1)..(416): Ceres Seq. ID no. 13599722
  misc_feature (26)..(409): Homolog of NCBI NO: 21555230 NR Description: transporter-like protein [Arabidopsis thaliana]
  misc_feature (26)..(409): Homolog of NCBI NO: 30684567 NR Description: transporter-related protein [Arabidopsis thaliana]
  misc_feature (1)..(409): Homolog of NCBI NO: 15229781 NR Description: transporter - related [Arabidopsis thaliana]
  misc_feature (1)..(386): Homolog of NCBI NO: 10177340 NR Description: transporter-like protein [Arabidopsis thaliana]
  misc_feature (1)..(409): Homolog of NCBI NO: 22326785 NR Description: transporter - related [Arabidopsis thaliana]
  misc_feature (1)..(409): Homolog of NCBI NO: 20260160 NR Description: transporter-like protein [Arabidopsis thaliana]
  misc_feature (1)..(412): Homolog of NCBI NO: 23452821 NR Description: major facilitator superfamily antiporter
  misc_feature (1)..(409): Homolog of NCBI NO: 30684565 NR Description: transporter-related protein [Arabidopsis
  misc_feature (26)..(412): Homolog of NCBI NO: 23452819 NR Description: major facilitator superfamily antiporter [Zea
  misc_feature (1)..(412): Homolog of NCBI NO: 23452823 NR Description: major facilitator superfamily antiporter

SEQ ID NO: 111553 - protein, 391 aa, Zea mays subsp. mays
  misc_feature (1)..(391): Ceres Seq. ID no. 13599723
  misc_feature (1)..(384): Homolog of NCBI NO: 21555230 NR Description: transporter-like protein [Arabidopsis thaliana]
  misc_feature (1)..(384): Homolog of NCBI NO: 30684567 NR Description: transporter-related protein [Arabidopsis thaliana]
  misc_feature (1)..(384): Homolog of NCBI NO: 15229781 NR Description: transporter - related [Arabidopsis thaliana]
  misc_feature (1)..(361): Homolog of NCBI NO: 10177340 NR Description: transporter-like protein [Arabidopsis thaliana]
  misc_feature (1)..(384): Homolog of NCBI NO: 22326785 NR Description: transporter - related [Arabidopsis thaliana]
  misc_feature (1)..(384): Homolog of NCBI NO: 20260160 NR Description: transporter-like protein [Arabidopsis thaliana]
  misc_feature (1)..(387): Homolog of NCBI NO: 23452821 NR Description: major facilitator superfamily antiporter
  misc_feature (1)..(384): Homolog of NCBI NO: 30684565 NR Description: transporter-related protein [Arabidopsis
  misc_feature (1)..(387): Homolog of NCBI NO: 23452819 NR Description: major facilitator superfamily antiporter [Zea
  misc_feature (1)..(387): Homolog of NCBI NO: 23452823 NR Description: major facilitator superfamily antiporter
MVGRGFSSIFWGVIADRVGRKPVITFSILSVVVFSALFGLSTTYWMAIATRLVLGALNGLLAPIKAYCVEVCQTQHQALGLSLVNTAWALGLIVGPALGGYLSQPAEKYPHVFSKDSVFGRFPYLLPCLSVSAFATLVLISCEWLPETIHKHKVPEMDTKAFKALSSKEGYCDPPRKKKSLLQNRPWISTLLPYCFFSLHDTAYSEILSLWAVSDRKYGGLSFSTEDTGQVLAMAGASLLVYQLVIYRWVHRILGTVNSARIASAVSILVLATYPFMTYLSGVKLSLALCSAAMMRSALAITVTTGISLLQNNAVCQEQRGTANGISTTAMSFFKSIAPVGAGALFSWAQKRQDVAFLPGDQVVFMVLNLVQLLGLISTFEPFLVLPALPE

SEQ ID NO: 111554 - DNA, 1985 bp, Zea mays subsp. mays
  misc_feature (1)..(1985): Ceres Seq. ID no. 15227157
ctagtccccccccccccccattaaaccctaaccctaaaataacggtttgttttgctctctcggtttccatgggtgtggctgagaccaagtctctcagtggccgaaaccctagatttagtgttagttaaaccctaacccgagagatctaaaattcttaaatctggtttgtttatttttctgcatctgaaccactgcagggagttcaggagttttgtgtctagattcttaaatctgaataaacaagttgaatatattaactgcaatgaaaacatatagatgtcatctgccacctatctccacgcacagtctggctcgacatcacctgcccttctcgtgatatctgattactgttttgctagtgctagctatcgatgctgttcggggattagtagtgttctatttcatcctcttaatgtgttcgcatcagatagatatatgttcatatgatttaaggatatcctgtcagcagcttacacatttgtctatctccatgcttcctttctttagttggagactggattattttttgttgggataaacttagtacattatcagagcatcttaactctggatatgggtgcctttaagggatatccaataaacaaaatttgaacacatttggtttgtcgtataggtacaaagccagcacatgcttgggcaggtttgatcagtttcactaggaactgttcactaattgactgtctcagtaatacaattgaatagcctgcaactcagttaaccatgactttcttcgtcatagtttctttagctgaattattttgcacatattacatggatgtgcactacccatgttgttcaatatcccacatcaatatcgaattgagtatgatgactgatgacaactaccagttattgtttcttgaattggcaacaacttggtctgtgagtcattcccactttgcccctacccttgctgagtagtgtcattcttttaggcataccttatagatgaatgattttttacattactgccttccccagtccccatcccaccccatttttttgtatcttagaaaatgtgacttggacaataagatgttgcttgagttacttacatttcttaaaagtattgattagtcttgcatctggatgcaggagctctgcagtaaaggaagtgtgtagtcaccatggtccatttcaagaataggtacatggtggtggagatctttatagatgcaggtagaggtgaacaggaccctgtaatcctcacccaatttaatataacaaaagttataaaagacagcattcagctcaactttggagagtgtggcctagctggatctcttggatcattgcaagttaagtatgttaatcctgtaacgaagctctgcatcgtccgcttgtctcgcgaagaccaccaaaaagtttgggctgctatgacgatggtgcggtgcattgggaagatccccgtttcgttcaacttgctcgacatgagtggaagcatcagggcttgcaagaaagctgcactggagtgcgatgaagcgaaatttgagcaatacaagctggctgcaggtgattgtatcacggcagagatcatccagtctgtagagaagtgctttgagaagatcagaggactagagagctaagcagaagaattgacatcacgtccacccaccctcggatcctaaaacctgctgaccctgcaccgcatccgtgatcacgtcacaccacaagctgtgtgtcctggctccagcgcccaccacggcaacggcctctcgccacttgctgccagcagcctccgtgcctccatcagctctcctttccaaggaaaagtctgaagtctgcaaccaaacaagtgttctgcagctgctctttgccgttggttgaagtctgcaaccaaacaaatgttatgcagctgctctttgccgttggttggagttctcggctccacactttcagaaagaattcatgtatacataaaatttattatatagagagtttgcttcgtatattagtaatttttt

SEQ ID NO: 111555 - protein, 152 aa, Zea mays subsp. mays
  misc_feature (1)..(152): Ceres Seq. ID no. 15227158
  misc_feature (7)..(94): Pfam Name: Rpp14 family Pfam Description: Rpp14 family
  misc_feature (1)..(115): Homolog of NCBI NO: 20270249 NR Description: RNase MRP/RNase P protein-like isoform a [Homo
  misc_feature (1)..(126): Homolog of NCBI NO: 19075979 NR Description: putative pre-tRNA/pre-rRNA processing protein
  misc_feature (1)..(94): Homolog of NCBI NO: 3122357 NR Description: Probable lipoate-protein ligase (Lipoate
  misc_feature (1)..(152): Homolog of NCBI NO: 22329330 NR Description: Probable lipoate-protein ligase B -related
  misc_feature (6)..(152): Homolog of NCBI NO: 38568007 NR Description: OSJNBb0068N06.26 [Oryza sativa (japonica
  misc_feature (1)..(152): Homolog of NCBI NO: 38343977 NR Description: OSJNBa0041M21.1 [Oryza sativa (japonica
MVHFKNRYMVVEIFIDAGRGEQDPVILTQFNITKVIKDSIQLNFGECGLAGSLGSLQVKYVNPVTKLCIVRLSREDHQKVWAAMTMVRCIGKIPVSFNLLDMSGSIRACKKAALECDEAKFEQYKLAAGDCITAEIIQSVEKCFEKIRGLES

SEQ ID NO: 111556 - protein, 144 aa, Zea mays subsp. mays
  misc_feature (1)..(144): Ceres Seq. ID no. 15227159
  misc_feature (1)..(86): Pfam Name: Rpp14 family Pfam Description: Rpp14 family
  misc_feature (1)..(107): Homolog of NCBI NO: 20270249 NR Description: RNase MRP/RNase P protein-like isoform a [Homo
  misc_feature (1)..(118): Homolog of NCBI NO: 19075979 NR Description: putative pre-tRNA/pre-rRNA processing protein
  misc_feature (1)..(86): Homolog of NCBI NO: 3122357 NR Description: Probable lipoate-protein ligase (Lipoate
  misc_feature (1)..(144): Homolog of NCBI NO: 22329330 NR Description: Probable lipoate-protein ligase B -related
  misc_feature (1)..(144): Homolog of NCBI NO: 38568007 NR Description: OSJNBb0068N06.26 [Oryza sativa (japonica
  misc_feature (1)..(144): Homolog of NCBI NO: 38343977 NR Description: OSJNBa0041M21.1 [Oryza sativa (japonica
MVVEIFIDAGRGEQDPVILTQFNITKVIKDSIQLNFGECGLAGSLGSLQVKYVNPVTKLCIVRLSREDHQKVWAAMTMVRCIGKIPVSFNLLDMSGSIRACKKAALECDEAKFEQYKLAAGDCITAEIIQSVEKCFEKIRGLES

SEQ ID NO: 111557 - DNA, 875 bp, Zea mays subsp. mays
  misc_feature (1)..(875): Ceres Seq. ID no. 13599820
gtccccccccccccccccgcgacgcctccgatgcggatgaggatgtgccttcggaggaaggcgaggatatggacgaagatgacaatgacgacggtgatgatgaggagaagcagataagaatacttcaggagacgaccggaatgcccagagaagccttcgatggaaagactcgaagcttaagcatgtcattatttctgaacatgtagataagaagactgaaaagtatttggtaaggaaactgcctttcccttacacttcgaaagatgtgtatgagcagagcattcgaatgcctattgggcctgatttcaacccagcgatatcagtttctgctctcaatcgacctgcgattgttaagaagcctggtgttatcattaaaccaatacaatacgaggaggttaatccccatgagaagctcgatgaaacaacgtgtcattcagagagcaaccccaaaccggaatgcaaagaaagcctttgccaaacaaggaaaaagcgtaacttcacaaaagagaaagtgacgagacagtcatcttctcgtcaatggcttcatttggacaaaggagagctcatccgaattttgttgcccccgccgaatttgcacatgcatggctccaggtgtgtgcagtgattcttccctttatgaaagttcccgcttcggcgcatgacccatgggcaaaaggtttcacaccactggtttatgagagcagagaaattttggtacaagtagttctgtatttgttatttattgcattcgccacgcatcgtccaaatgagacggatgctatatttcagttctgatgatggccactggttaactaaaaaaaaaaaaaaaaaaaagaaaaaaaaaaaaaaaaaaaactcgagggggggcccggtac

SEQ ID NO: 111558 - protein, 112 aa, Zea mays subsp. mays
  misc_feature (1)..(112): Ceres Seq. ID no. 15218895
  misc_feature (1)..(68): Homolog of NCBI NO: 34881594 NR Description: similar to KIAA0266 gene product [Rattus
  misc_feature (1)..(33): Homolog of NCBI NO: 19114287 NR Description: hypothetical coiled-coil protein
  misc_feature (1)..(33): Homolog of NCBI NO: 6323546 NR Description: part of small (ribosomal) subunit (SSU)
  misc_feature (1)..(68): Homolog of NCBI NO: 23599203 NR Description: RIKEN cDNA 2700066J21 [Mus musculus]
  misc_feature (1)..(68): Homolog of NCBI NO: 7487011 NR Description: hypothetical protein T14P8.20 - Arabidopsis
  misc_feature (1)..(68): Homolog of NCBI NO: 30679129 NR Description: expressed protein [Arabidopsis thaliana]
  misc_feature (1)..(55): Homolog of NCBI NO: 15242319 NR Description: hypothetical protein [Arabidopsis thaliana]
MPIGPDFNPAISVSALNRPAIVKKPGVIIKPIQYEEVNPHEKLDETTCHSESNPKPECKESLCQTRKKRNFTKEKVTRQSSSRQWLHLDKGELIRILLPPPNLHMHGSRCVQ

SEQ ID NO: 111559 - protein, 85 aa, Zea mays subsp. mays
  misc_feature (1)..(85): Ceres Seq. ID no. 15218896
MASFGQRRAHPNFVAPAEFAHAWLQVCAVILPFMKVPASAHDPWAKGFTPLVYESREILVQVVLYLLFIAFATHRPNETDAIFQF

SEQ ID NO: 111560 - protein, 83 aa, Zea mays subsp. mays
  misc_feature (1)..(83): Ceres Seq. ID no. 15218897
MCMSRAFECLLGLISTQRYQFLLSIDLRLLRSLVLSLNQYNTRRLIPMRSSMKQRVIQRATPNRNAKKAFAKQGKSVTSQKRK

SEQ ID NO: 111561 - DNA, 1832 bp, Zea mays subsp. mays
  misc_feature (1)..(1832): Ceres Seq. ID no. 15225188
aagatgttcttaaggttggaccccactattctgaatatgcatgtcgtagcaggcaaagacgatctctaagtagagattctacaattcatggtgatgaatctgatccgatgtccacagataatgaagaaaatatggtagttgaacgtgagatacatgtaaattatgaggaaccaattaatggtactgctgtgacatatacatctgggcagtcacaacatcctacaagtcttgactatgaactagatgcaataggtgtactagataccagttctgcagtccctttcagtaataaaaagtctctttctcctgctggacaggaccagcaagtgcttaagatgaccacaacagcactagataactgccttcttgtgcctaatctcgatgatttgatgcctaagcatgagcaaattgaataccatcaagctgatgattacccagccacttatgatcctcatatagcatcagattctcctgaggagattaatcaccacctaggggatgtcagtgaaaccctttgtattctacctgatgtattagaatcgccagcgaactccaaccaaaagatgaccagcaaagtccmaatgtctgttcttgaatcttccatggacggagaagatgtttactctggggattttgagaagatcagtgcagatctccaagagctcagattgcaacttgggcttctgaagagggagactacagacactagagatggcagcgagctttctatattgagtgatgacgagacagcacgtcgatcacttcctgagacgggggaatcccatgcttttaggaatacggaagaaagggacttctcctacgtgttcgatatgcttgttgctctgggcattcacgcggccaacgaggatgacctccttgacaactgctacttactggagtgctctgcaggccttgatttatacgatgacctcgaacagaagtacgacagcctcattttatggactgtgcatgagaggaagctcttgtttgatatcacgaatgctgttcttggggacatgatcacctccgtgatgaacggctgctcgaagggactgatggcgaggtgctcgcctggatggaatcgggaagagtttgctgagctcgtgtggcaaagggtggtgcagctccggcaagagatagagttcaaccaggaagccctgctgttgagcgtagagtgggctggctctgaagatggcgccagtctggtcgggcgcgatatcgggaatatgttgcaagatgatctcgtacaggaaattatagctgactttctgggggcaactaaatccgccaagctccgtggctagaattgccagtgtttgcacccgaggccattggaagcatatgcatatggattggtcgctggtgaactctagtggacgatgagccttcgatgaattgcttaacgaggggactgtaattcaaggaattcacctcatggctactgaagacatgagctaagatggcttaggtgatggtggggcatcaaacagcagtgtcgaagtttgacctggttgtgtcatgctcgtcagctcatcaccattggctccgaactcagcaatagcgtacaactggatgatttcccccctctgaactctgaaaagcaattttttttcattaggttatcataatgctggaatatagatgcacaattttggtgtaaaataatctctggcggattttagtttgtttatcatgggatgcaataagggcagtgtcagttgagacatctttatctgccaaaaaaaaaaaaaaaaaaaaaaaaagaaaaaaaaaaaaaaaaaaactcgagggggggcccggaacccaattcgcccaatagggagccgaataac

SEQ ID NO: 111562 - protein, 433 aa, Zea mays subsp. mays
  misc_feature (1)..(433): Ceres Seq. ID no. 15225189
  misc_feature (163)..(423): Homolog of NCBI NO: 34897354 NR Description: hypothetical protein [Oryza sativa]
  misc_feature (149)..(419): Homolog of NCBI NO: 21928151 NR Description: AT3g53540/F4P12_240 [Arabidopsis thaliana]
  misc_feature (263)..(421): Homolog of NCBI NO: 29124124 NR Description: hypothetical protein [Oryza sativa (japonica
DVLKVGPHYSEYACRSRQRRSLSRDSTIHGDESDPMSTDNEENMVVEREIHVNYEEPINGTAVTYTSGQSQHPTSLDYELDAIGVLDTSSAVPFSNKKSLSPAGQDQQVLKMTTTALDNCLLVPNLDDLMPKHEQIEYHQADDYPATYDPHIASDSPEEINHHLGDVSETLCILPDVLESPANSNQKMTSKVXMSVLESSMDGEDVYSGDFEKISADLQELRLQLGLLKRETTDTRDGSELSILSDDETARRSLPETGESHAFRNTEERDFSYVFDMLVALGIHAANEDDLLDNCYLLECSAGLDLYDDLEQKYDSLILWTVHERKLLFDITNAVLGDMITSVMNGCSKGLMARCSPGWNREEFAELVWQRVVQLRQEIEFNQEALLLSVEWAGSEDGASLVGRDIGNMLQDDLVQEIIADFLGATKSAKLRG

SEQ ID NO: 111563 - protein, 398 aa, Zea mays subsp. mays
  misc_feature (1)..(398): Ceres Seq. ID no. 15225190
  misc_feature (128)..(388): Homolog of NCBI NO: 34897354 NR Description: hypothetical protein [Oryza sativa]
  misc_feature (114)..(384): Homolog of NCBI NO: 21928151 NR Description: AT3g53540/F4P12_240 [Arabidopsis thaliana]
  misc_feature (228)..(386): Homolog of NCBI NO: 29124124 NR Description: hypothetical protein [Oryza sativa (japonica
MSTDNEENMVVEREIHVNYEEPINGTAVTYTSGQSQHPTSLDYELDAIGVLDTSSAVPFSNKKSLSPAGQDQQVLKMTTTALDNCLLVPNLDDLMPKHEQIEYHQADDYPATYDPHIASDSPEEINHHLGDVSETLCILPDVLESPANSNQKMTSKVXMSVLESSMDGEDVYSGDFEKISADLQELRLQLGLLKRETTDTRDGSELSILSDDETARRSLPETGESHAFRNTEERDFSYVFDMLVALGIHAANEDDLLDNCYLLECSAGLDLYDDLEQKYDSLILWTVHERKLLFDITNAVLGDMITSVMNGCSKGLMARCSPGWNREEFAELVWQRVVQLRQEIEFNQEALLLSVEWAGSEDGASLVGRDIGNMLQDDLVQEIIADFLGATKSAKLRG

SEQ ID NO: 111564 - protein, 390 aa, Zea mays subsp. mays
  misc_feature (1)..(390): Ceres Seq. ID no. 15225191
  misc_feature (120)..(380): Homolog of NCBI NO: 34897354 NR Description: hypothetical protein [Oryza sativa]
  misc_feature (106)..(376): Homolog of NCBI NO: 21928151 NR Description: AT3g53540/F4P12_240 [Arabidopsis thaliana]
  misc_feature (220)..(378): Homolog of NCBI NO: 29124124 NR Description: hypothetical protein [Oryza sativa (japonica
MVVEREIHVNYEEPINGTAVTYTSGQSQHPTSLDYELDAIGVLDTSSAVPFSNKKSLSPAGQDQQVLKMTTTALDNCLLVPNLDDLMPKHEQIEYHQADDYPATYDPHIASDSPEEINHHLGDVSETLCILPDVLESPANSNQKMTSKVXMSVLESSMDGEDVYSGDFEKISADLQELRLQLGLLKRETTDTRDGSELSILSDDETARRSLPETGESHAFRNTEERDFSYVFDMLVALGIHAANEDDLLDNCYLLECSAGLDLYDDLEQKYDSLILWTVHERKLLFDITNAVLGDMITSVMNGCSKGLMARCSPGWNREEFAELVWQRVVQLRQEIEFNQEALLLSVEWAGSEDGASLVGRDIGNMLQDDLVQEIIADFLGATKSAKLRG

SEQ ID NO: 111565 - DNA, 692 bp, Zea mays subsp. mays
  misc_feature (1)..(692): Ceres Seq. ID no. 13624575
gtccacgacgctagggttgctgcagtacggcttcggagctagcgcgaccatggagacggcttctgcgcctgtgccccttgctgcgtcgctgggaaccactgcgagcgtggcgaccgctgggctcacagctttgcctgcaagtactaatgctgttgtcgtcaactatgatctgctgcaaggctgaagttcaaggacaaaatatcacctggctaactctgcatgctcttcagcaagtattaactgatgatgttgatttcgatgtgatgttttcttttctagaattctatgagactcttctaggatttgtgaacttcaaactctatcatttaataaatgtaaattatcctcctattctggatccacgtctggaagctttagctgctgagctctatgcattgtgccgatacatgtctgctggttctagaagaatgattgggaattcacaaactgacgaagtaatggaagataaggatgagaaaagtaaagctgaggaagtaattgaggaagaaaaggttgtgaagaataaagcaagctcaaaagcagatgaatcacatgcaaatggcctgctttatcattttgatggtggattgagtttataatgttagtaaaatacttccacctctgtaattatccttgcgtccaccaccaccatagccaccacctagaaaattagattcttgtccaattttatt

SEQ ID NO: 111566 - protein, 150 aa, Zea mays subsp. mays
  misc_feature (1)..(150): Ceres Seq. ID no. 13624576
  misc_feature (3)..(134): Homolog of NCBI NO: 32409249 NR Description: hypothetical protein [Neurospora crassa]
  misc_feature (11)..(117): Homolog of NCBI NO: 15241421 NR Description: pescadillo - like protein [Arabidopsis thaliana]
  misc_feature (11)..(123): Homolog of NCBI NO: 28273368 NR Description: pescadillo-like protein [Oryza sativa (japonica
  misc_feature (11)..(116): Homolog of NCBI NO: 32398682 NR Description: conserved BRCA1 domain protein [Cryptosporidium
  misc_feature (1)..(136): Homolog of NCBI NO: 12584984 NR Description: pescadillo homolog 1, containing BRCT domain [Mus
  misc_feature (1)..(142): Homolog of NCBI NO: 40787689 NR Description: Unknown (protein for MGC:76219) [Silurana
  misc_feature (1)..(136): Homolog of NCBI NO: 27881805 NR Description: similar to pescadillo [Xenopus laevis]
  misc_feature (1)..(136): Homolog of NCBI NO: 7657455 NR Description: pescadillo homolog 1, containing BRCT domain
  misc_feature (3)..(126): Homolog of NCBI NO: 40739902 NR Description: hypothetical protein AN3827.2 [Aspergillus
  misc_feature (3)..(134): Homolog of NCBI NO: 19113335 NR Description: hypothetical protein [Schizosaccharomyces pombe]
MLLSSTMICCKAEVQGQNITWLTLHALQQVLTDDVDFDVMFSFLEFYETLLGFVNFKLYHLINVNYPPILDPRLEALAAELYALCRYMSAGSRRMIGNSQTDEVMEDKDEKSKAEEVIEEEKVVKNKASSKADESHANGLLYHFDGGLSL

SEQ ID NO: 111567 - protein, 144 aa, Zea mays subsp. mays
  misc_feature (1)..(144): Ceres Seq. ID no. 13624577
  misc_feature (5)..(110): Homolog of NCBI NO: 32398682 NR Description: conserved BRCA1 domain protein [Cryptosporidium
  misc_feature (1)..(130): Homolog of NCBI NO: 12584984 NR Description: pescadillo homolog 1, containing BRCT domain [Mus
  misc_feature (1)..(136): Homolog of NCBI NO: 40787689 NR Description: Unknown (protein for MGC:76219) [Silurana
  misc_feature (1)..(130): Homolog of NCBI NO: 27881805 NR Description: similar to pescadillo [Xenopus laevis]
  misc_feature (1)..(130): Homolog of NCBI NO: 7657455 NR Description: pescadillo homolog 1, containing BRCT domain
  misc_feature (1)..(120): Homolog of NCBI NO: 40739902 NR Description: hypothetical protein AN3827.2 [Aspergillus
  misc_feature (1)..(128): Homolog of NCBI NO: 19113335 NR Description: hypothetical protein [Schizosaccharomyces pombe]
  misc_feature (1)..(128): Homolog of NCBI NO: 32409249 NR Description: hypothetical protein [Neurospora crassa]
  misc_feature (5)..(111): Homolog of NCBI NO: 15241421 NR Description: pescadillo - like protein [Arabidopsis thaliana]
  misc_feature (5)..(117): Homolog of NCBI NO: 28273368 NR Description: pescadillo-like protein [Oryza sativa (japonica
MICCKAEVQGQNITWLTLHALQQVLTDDVDFDVMFSFLEFYETLLGFVNFKLYHLINVNYPPILDPRLEALAAELYALCRYMSAGSRRMIGNSQTDEVMEDKDEKSKAEEVIEEEKVVKNKASSKADESHANGLLYHFDGGLSL

SEQ ID NO: 111568 - protein, 111 aa, Zea mays subsp. mays
  misc_feature (1)..(111): Ceres Seq. ID no. 13624578
  misc_feature (1)..(77): Homolog of NCBI NO: 32398682 NR Description: conserved BRCA1 domain protein [Cryptosporidium
  misc_feature (1)..(97): Homolog of NCBI NO: 12584984 NR Description: pescadillo homolog 1, containing BRCT domain [Mus
  misc_feature (1)..(103): Homolog of NCBI NO: 40787689 NR Description: Unknown (protein for MGC:76219) [Silurana
  misc_feature (1)..(97): Homolog of NCBI NO: 27881805 NR Description: similar to pescadillo [Xenopus laevis]
  misc_feature (1)..(97): Homolog of NCBI NO: 7657455 NR Description: pescadillo homolog 1, containing BRCT domain
  misc_feature (1)..(87): Homolog of NCBI NO: 40739902 NR Description: hypothetical protein AN3827.2 [Aspergillus
  misc_feature (1)..(95): Homolog of NCBI NO: 19113335 NR Description: hypothetical protein [Schizosaccharomyces pombe]
  misc_feature (1)..(95): Homolog of NCBI NO: 32409249 NR Description: hypothetical protein [Neurospora crassa]
  misc_feature (1)..(78): Homolog of NCBI NO: 15241421 NR Description: pescadillo - like protein [Arabidopsis thaliana]
  misc_feature (1)..(84): Homolog of NCBI NO: 28273368 NR Description: pescadillo-like protein [Oryza sativa (japonica
MFSFLEFYETLLGFVNFKLYHLINVNYPPILDPRLEALAAELYALCRYMSAGSRRMIGNSQTDEVMEDKDEKSKAEEVIEEEKVVKNKASSKADESHANGLLYHFDGGLSL

SEQ ID NO: 111569 - DNA, 2036 bp, Zea mays subsp. mays
  misc_feature (1)..(2036): Ceres Seq. ID no. 13623250
ggggacaaattcgcagttggattcagcatatgcattttttatgctgacataggatgtgctcaaccatccgtggactccctctagttgcacaaaccacctcagtgctctctctttcttcgaatcgggctaataatgggcagtgcttgccaagctggcacagacgggccttcccgcaaggatgtgttagggatagggaatgccgccttagagaatggccaccatcaggctgaagctgacgcagatgaatggagggaaaaggaagaggacttggccaacgggcacagtgcgccaccgccaggcatgcagcaggtggatgagcataaggaggaacaaagacaaagcattcactgggagaggttcctacctgtgaagacactgagagtcttgctggtggagaatgatgactctactcgtcaggtggtcagtgccctgctccgtaagtgctgctatgaagttattcctgctgaaaatggtttgcatgcatggcgatatcttgaagatctgcagaacaacatcgaccttgtattgactgaggttttcatgacttgtctatctggtatcggtctgcttagcaaaatcacaagtcacaaaatttgcaaagacattcctgtgattatgatgtctacgaatgattctatgagtatggtgtttaagtgtttgtcgaagggagcagttgatttcttggtaaaaccactacgtaagaatgagcttaagaacctttggcagcatgtttggaggcgatgccacagttccagtggaagtgaaagtggcatccagacacagaagtgtgccaaactaaatactggcgacgagtatgagaacggcagtgacagcaatcatgatgatgaagaaaatgatgacggcgacgatgacgacttcagtgttggactcaatgctagggatggaagtgacaatggcagtggtactcaaagctcatggacaaagcgtgctgtggagattgacagcccacaacctatatctcccgatcaactagttgatccacctgatagtacatgtgcacaagtaattcaccctagatcagagatatgcagtaacaagtggttaccgacagcaaacaaaaggaatgtcaagaaacagaaggagaataaagatgaatctatgggaagatacttaggaataggtgctcctaggaactcaagtgcagaatatcaatcatctctcaatgatgtatctgttaatccaatagaaaaaggacatgagaatcacatgtccaaatgcaaatctaaaaaggaaacaatggcagaagatgattgtacaaacatgcctagtgcaacaaatgctgaaactgctgatttgattagctcaatagccagaaacacagaaggccaacaagcagtacaagccgttgacgcaccagatggcccttccaaaatggctaatggaaatgataagaatcatgattctcatatcgaagtgacaccccatgagttgggtttgaagagatcgagaacaaatggagctacagcggaaatccatgatgagcgaaatattctgaaaagatcagatcagtcagccttcaccaggtaccatacatctgtggcttccaatcaaggtggagcaagatatggggaaagctcttcaccacaagataacagttctgaggccatgaaaacggactctacatgcaagatgaagtcaaattcagatgctgctccaataaagcagggctccaatggcagtagcaataacgatgtgggatccagtacaaagaatgttgctgcaaggccttcgggtgacagggagagagtagcgtcaccattagccatcaaatctacccagcatgcctcagcatttcatactatacagaatcaaacgtcaccagctaatctgattggggaagacaaagctgatgaaggaatttccaatgcagtgaaaatgagccacccaacagaggttccacaagggtgcgtccagcatcatcatcatgtgcattattacctccatgttatgacacagaaacagccatcaacagcccgtggatgtttaaacacaataaagtgggaactggagggggg

SEQ ID NO: 111570 - protein, 634 aa, Zea mays subsp. mays
  misc_feature (1)..(634): Ceres Seq. ID no. 13623251
  misc_feature (82)..(205): Pfam Name: Response regulator receiver domain Pfam Description: Response regulator receiver domain
  misc_feature (52)..(357): Homolog of NCBI NO: 18420797 NR Description: pseudo-response regulator, APRR5 (APRR1/TOC1
  misc_feature (52)..(357): Homolog of NCBI NO: 9758535 NR Description: contains similarity to two-component response
  misc_feature (56)..(467): Homolog of NCBI NO: 7485762 NR Description: hypothetical protein At2g46790 [imported] -
  misc_feature (56)..(467): Homolog of NCBI NO: 18407171 NR Description: pseudo-response regulator, APRR9 (APRR1/TOC1
  misc_feature (25)..(376): Homolog of NCBI NO: 18424319 NR Description: pseudo-response regulator, APRR3 (APRR1/TOC1
  misc_feature (45)..(559): Homolog of NCBI NO: 11357905 NR Description: hypothetical protein F9G14.120 - Arabidopsis
  misc_feature (45)..(559): Homolog of NCBI NO: 18414032 NR Description: pseudo-response regulator, APRR7 (APRR1/TOC1
  misc_feature (73)..(611): Homolog of NCBI NO: 34394035 NR Description: putative pseudo-response regulator
  misc_feature (1)..(268): Homolog of NCBI NO: 24796813 NR Description: putative pseudo-response regulator
  misc_feature (223)..(623): Homolog of NCBI NO: 24796813 NR Description: putative pseudo-response regulator
MGSACQAGTDGPSRKDVLGIGNAALENGHHQAEADADEWREKEEDLANGHSAPPPGMQQVDEHKEEQRQSIHWERFLPVKTLRVLLVENDDSTRQVVSALLRKCCYEVIPAENGLHAWRYLEDLQNNIDLVLTEVFMTCLSGIGLLSKITSHKICKDIPVIMMSTNDSMSMVFKCLSKGAVDFLVKPLRKNELKNLWQHVWRRCHSSSGSESGIQTQKCAKLNTGDEYENGSDSNHDDEENDDGDDDDFSVGLNARDGSDNGSGTQSSWTKRAVEIDSPQPISPDQLVDPPDSTCAQVIHPRSEICSNKWLPTANKRNVKKQKENKDESMGRYLGIGAPRNSSAEYQSSLNDVSVNPIEKGHENHMSKCKSKKETMAEDDCTNMPSATNAETADLISSIARNTEGQQAVQAVDAPDGPSKMANGNDKNHDSHIEVTPHELGLKRSRTNGATAEIHDERNILKRSDQSAFTRYHTSVASNQGGARYGESSSPQDNSSEAMKTDSTCKMKSNSDAAPIKQGSNGSSNNDVGSSTKNVAARPSGDRERVASPLAIKSTQHASAFHTIQNQTSPANLIGEDKADEGISNAVKMSHPTEVPQGCVQHHHHVHYYLHVMTQKQPSTARGCLNTIKWELEG

SEQ ID NO: 111571 - protein, 578 aa, Zea mays subsp. mays
  misc_feature (1)..(578): Ceres Seq. ID no. 13623252
  misc_feature (26)..(149): Pfam Name: Response regulator receiver domain Pfam Description: Response regulator receiver domain
  misc_feature (1)..(301): Homolog of NCBI NO: 18420797 NR Description: pseudo-response regulator, APRR5 (APRR1/TOC1
  misc_feature (1)..(301): Homolog of NCBI NO: 9758535 NR Description: contains similarity to two-component response
  misc_feature (1)..(411): Homolog of NCBI NO: 7485762 NR Description: hypothetical protein At2g46790 [imported] -
  misc_feature (1)..(411): Homolog of NCBI NO: 18407171 NR Description: pseudo-response regulator, APRR9 (APRR1/TOC1
  misc_feature (1)..(320): Homolog of NCBI NO: 18424319 NR Description: pseudo-response regulator, APRR3 (APRR1/TOC1
  misc_feature (1)..(503): Homolog of NCBI NO: 11357905 NR Description: hypothetical protein F9G14.120 - Arabidopsis
  misc_feature (1)..(503): Homolog of NCBI NO: 18414032 NR Description: pseudo-response regulator, APRR7 (APRR1/TOC1
  misc_feature (17)..(555): Homolog of NCBI NO: 34394035 NR Description: putative pseudo-response regulator
  misc_feature (1)..(212): Homolog of NCBI NO: 24796813 NR Description: putative pseudo-response regulator
  misc_feature (167)..(567): Homolog of NCBI NO: 24796813 NR Description: putative pseudo-response regulator
MQQVDEHKEEQRQSIHWERFLPVKTLRVLLVENDDSTRQVVSALLRKCCYEVIPAENGLHAWRYLEDLQNNIDLVLTEVFMTCLSGIGLLSKITSHKICKDIPVIMMSTNDSMSMVFKCLSKGAVDFLVKPLRKNELKNLWQHVWRRCHSSSGSESGIQTQKCAKLNTGDEYENGSDSNHDDEENDDGDDDDFSVGLNARDGSDNGSGTQSSWTKRAVEIDSPQPISPDQLVDPPDSTCAQVIHPRSEICSNKWLPTANKRNVKKQKENKDESMGRYLGIGAPRNSSAEYQSSLNDVSVNPIEKGHENHMSKCKSKKETMAEDDCTNMPSATNAETADLISSIARNTEGQQAVQAVDAPDGPSKMANGNDKNHDSHIEVTPHELGLKRSRTNGATAEIHDERNILKRSDQSAFTRYHTSVASNQGGARYGESSSPQDNSSEAMKTDSTCKMKSNSDAAPIKQGSNGSSNNDVGSSTKNVAARPSGDRERVASPLAIKSTQHASAFHTIQNQTSPANLIGEDKADEGISNAVKMSHPTEVPQGCVQHHHHVHYYLHVMTQKQPSTARGCLNTIKWELEG

SEQ ID NO: 111572 - protein, 498 aa, Zea mays subsp. mays
  misc_feature (1)..(498): Ceres Seq. ID no. 13623253
  misc_feature (1)..(69): Pfam Name: Response regulator receiver domain Pfam Description: Response regulator receiver domain
  misc_feature (1)..(221): Homolog of NCBI NO: 18420797 NR Description: pseudo-response regulator, APRR5 (APRR1/TOC1
  misc_feature (1)..(221): Homolog of NCBI NO: 9758535 NR Description: contains similarity to two-component response
  misc_feature (1)..(331): Homolog of NCBI NO: 7485762 NR Description: hypothetical protein At2g46790 [imported] -
  misc_feature (1)..(331): Homolog of NCBI NO: 18407171 NR Description: pseudo-response regulator, APRR9 (APRR1/TOC1
  misc_feature (1)..(240): Homolog of NCBI NO: 18424319 NR Description: pseudo-response regulator, APRR3 (APRR1/TOC1
  misc_feature (1)..(423): Homolog of NCBI NO: 11357905 NR Description: hypothetical protein F9G14.120 - Arabidopsis
  misc_feature (1)..(423): Homolog of NCBI NO: 18414032 NR Description: pseudo-response regulator, APRR7 (APRR1/TOC1
  misc_feature (1)..(475): Homolog of NCBI NO: 34394035 NR Description: putative pseudo-response regulator
  misc_feature (1)..(132): Homolog of NCBI NO: 24796813 NR Description: putative pseudo-response regulator
  misc_feature (87)..(487): Homolog of NCBI NO: 24796813 NR Description: putative pseudo-response regulator
MTCLSGIGLLSKITSHKICKDIPVIMMSTNDSMSMVFKCLSKGAVDFLVKPLRKNELKNLWQHVWRRCHSSSGSESGIQTQKCAKLNTGDEYENGSDSNHDDEENDDGDDDDFSVGLNARDGSDNGSGTQSSWTKRAVEIDSPQPISPDQLVDPPDSTCAQVIHPRSEICSNKWLPTANKRNVKKQKENKDESMGRYLGIGAPRNSSAEYQSSLNDVSVNPIEKGHENHMSKCKSKKETMAEDDCTNMPSATNAETADLISSIARNTEGQQAVQAVDAPDGPSKMANGNDKNHDSHIEVTPHELGLKRSRTNGATAEIHDERNILKRSDQSAFTRYHTSVASNQGGARYGESSSPQDNSSEAMKTDSTCKMKSNSDAAPIKQGSNGSSNNDVGSSTKNVAARPSGDRERVASPLAIKSTQHASAFHTIQNQTSPANLIGEDKADEGISNAVKMSHPTEVPQGCVQHHHHVHYYLHVMTQKQPSTARGCLNTIKWELEG

SEQ ID NO: 111573 - DNA, 2288 bp, Zea mays subsp. mays
  misc_feature (1)..(2288): Ceres Seq. ID no. 13623385
ttcacctgaggatacaggtttgagtggcaaacatatatcagggttctatgaggaataccccatccttaaatcagagtatgttcagaatcttgttactgtcactgtgaggagagacattgaagcgcataaaagacttgtggaatttgacactgatattcctggagaagttatcattcattggggagtttgcagagacaatactatgacatgggagatcccaccagaaccacatccaccaaaaacgaaaatattccgacacaaagctcttcaaactttgctgcagcaaaaagctgatggagcaggaaactcaatttcattctcacttgatgcagagtattcttgtctgttttttgtgctcaaacttgacgagtatacttggttgagaaatcttgagaatggatctgatttctatgtgccacttacaagagtggggcagtatggcagcactcaggatcctgacaaggctgaggcacagaaaatagaggataagtcttcacaggctgatggcttaatcagtgatataagaaatctggtggttggcctatcgtctagaagaggtcagaaagctaagaataaagttcttcaagaggacatcctacaagaaatcgaaagacttgcagcagaagcttatagcattttcaggagccccactattgattccgtagatgaatctgtacagctcgatgacacattaagcgcaaagccagcatgttctggcactggatctggttttgagatattgtgccaaggatttaactgggaatctcataaatcagggaaatggtatgttgagcttggcacaaaggccaaggagttgtcgtccttgggtttcaccattgtctggtcaccaccaccaactgattctgtgtcacctgaaggatacatgccaagggatctatataatctaaactcacgatatgggtccatggatgagctgaaggaacttgtgaagattttccatgaagctggtatcaaggttcttggcgacgctgttctaaatcataggtgtgctcagtttcagaacaacaatggtgtctggaatatatttggtggtcgtatgaactgggatgatcgagcagttgttgctgatgatccacatttccagggaagaggaaacaagagcagtggagataatttccatgcagcaccaaacattgatcactcccaagagtttgtgaggaatgatcttaaagaatggctttgctggatgagaaaggaagtcggctacgatggatggagacttgactttgttcgtggtttctggggtggatatgtcaaggactatttggaagcaagtgaaccatactttgcagtaggagagtactgggactccctcagttatacttatggtgaaatggactacaatcaggatgcccacaggcagagaattgttgattggataaatgctacaaatggaactgctggcgcatttgatgttaccactaaaggaatacttcatgcggcgcttgaaagatcagagtattggcgcctgtccgatgaaaaagggaaaccccctggagtattgggttggtggccttcaagagcagtcacatttatagagaatcatgatactggttctactcagggccattggaggttcccctatggtatggaactgcaaggatacgcctacatcctgacacaccctggcactcccgcagtcttctatgaccacatattttcacacttacaaccagagatcgctaaatttatttccattcgacaccgtcaaaagattcattgccgcagcaagatcaagatactaaaggcagagaggagtttatatgcggctgaaattgatgagaaggtaacaatgaaaatcggatcagaacattttgagccaagcggtccccagaactggattgttgctgctgagggtcaagattacaaaatctgggaagcgtcttcatagacttggcgggctgcgagtgccatataactgctcaaagactaaaaagctacaagaaagcataatgctaggagatggcgcctcagaatggtcagctggcgggagctgctgccgctgccgccatggagcagcaaaattcaacaacataagctatggaagcacttgccacggcgataggattatctaataggactactgttgaacattcgatatatccagaaccacccatcatttgcaggcacattggccattaaaatttagcttcgtcctctattttggagctatgtaaaagcatgcacaactctatttatgtgtgaaataaaatttgaatcttcatcaaagaaaaaaaaaaaaaaaaaaactcgagggggggcccggt

SEQ ID NO: 111574 - protein, 636 aa, Zea mays subsp. mays
  misc_feature (1)..(636): Ceres Seq. ID no. 13623386
  misc_feature (246)..(633): Homolog of NCBI NO: 228404 NR Description: alpha amylase
  misc_feature (242)..(633): Homolog of NCBI NO: 3769330 NR Description: alpha-amylase [Phaseolus vulgaris]
  misc_feature (242)..(632): Homolog of NCBI NO: 7532799 NR Description: alpha-amylase [Malus x domestica]
  misc_feature (239)..(632): Homolog of NCBI NO: 25289325 NR Description: protein T23E18.6 [imported] - Arabidopsis
  misc_feature (243)..(632): Homolog of NCBI NO: 15222959 NR Description: alpha-amylase (1,4-alpha-D-glucan
  misc_feature (243)..(632): Homolog of NCBI NO: 38346145 NR Description: OSJNBb0118P14.5 [Oryza sativa (japonica
  misc_feature (227)..(633): Homolog of NCBI NO: 1220453 NR Description: alpha-amylase
  misc_feature (10)..(635): Homolog of NCBI NO: 25404842 NR Description: probable alpha-amylase T17F3.14 [imported] -
  misc_feature (10)..(635): Homolog of NCBI NO: 18409378 NR Description: alpha-amylase (1,4-alpha-D-glucan
  misc_feature (2)..(636): Homolog of NCBI NO: 34910588 NR Description: putative alpha-amylase [Oryza sativa (japonica
SPEDTGLSGKHISGFYEEYPILKSEYVQNLVTVTVRRDIEAHKRLVEFDTDIPGEVIIHWGVCRDNTMTWEIPPEPHPPKTKIFRHKALQTLLQQKADGAGNSISFSLDAEYSCLFFVLKLDEYTWLRNLENGSDFYVPLTRVGQYGSTQDPDKAEAQKIEDKSSQADGLISDIRNLVVGLSSRRGQKAKNKVLQEDILQEIERLAAEAYSIFRSPTIDSVDESVQLDDTLSAKPACSGTGSGFEILCQGFNWESHKSGKWYVELGTKAKELSSLGFTIVWSPPPTDSVSPEGYMPRDLYNLNSRYGSMDELKELVKIFHEAGIKVLGDAVLNHRCAQFQNNNGVWNIFGGRMNWDDRAVVADDPHFQGRGNKSSGDNFHAAPNIDHSQEFVRNDLKEWLCWMRKEVGYDGWRLDFVRGFWGGYVKDYLEASEPYFAVGEYWDSLSYTYGEMDYNQDAHRQRIVDWINATNGTAGAFDVTTKGILHAALERSEYWRLSDEKGKPPGVLGWWPSRAVTFIENHDTGSTQGHWRFPYGMELQGYAYILTHPGTPAVFYDHIFSHLQPEIAKFISIRHRQKIHCRSKIKILKAERSLYAAEIDEKVTMKIGSEHFEPSGPQNWIVAAEGQDYKIWEASS

SEQ ID NO: 111575 - protein, 569 aa, Zea mays subsp. mays
  misc_feature (1)..(569): Ceres Seq. ID no. 13623387
  misc_feature (179)..(566): Homolog of NCBI NO: 228404 NR Description: alpha amylase
  misc_feature (175)..(566): Homolog of NCBI NO: 3769330 NR Description: alpha-amylase [Phaseolus vulgaris]
  misc_feature (175)..(565): Homolog of NCBI NO: 7532799 NR Description: alpha-amylase [Malus x domestica]
  misc_feature (172)..(565): Homolog of NCBI NO: 25289325 NR Description: protein T23E18.6 [imported] - Arabidopsis
  misc_feature (176)..(565): Homolog of NCBI NO: 15222959 NR Description: alpha-amylase (1,4-alpha-D-glucan
  misc_feature (176)..(565): Homolog of NCBI NO: 38346145 NR Description: OSJNBb0118P14.5 [Oryza sativa (japonica
  misc_feature (160)..(566): Homolog of NCBI NO: 1220453 NR Description: alpha-amylase
  misc_feature (1)..(568): Homolog of NCBI NO: 25404842 NR Description: probable alpha-amylase T17F3.14 [imported] -
  misc_feature (1)..(568): Homolog of NCBI NO: 18409378 NR Description: alpha-amylase (1,4-alpha-D-glucan
  misc_feature (1)..(569): Homolog of NCBI NO: 34910588 NR Description: putative alpha-amylase [Oryza sativa (japonica
MTWEIPPEPHPPKTKIFRHKALQTLLQQKADGAGNSISFSLDAEYSCLFFVLKLDEYTWLRNLENGSDFYVPLTRVGQYGSTQDPDKAEAQKIEDKSSQADGLISDIRNLVVGLSSRRGQKAKNKVLQEDILQEIERLAAEAYSIFRSPTIDSVDESVQLDDTLSAKPACSGTGSGFEILCQGFNWESHKSGKWYVELGTKAKELSSLGFTIVWSPPPTDSVSPEGYMPRDLYNLNSRYGSMDELKELVKIFHEAGIKVLGDAVLNHRCAQFQNNNGVWNIFGGRMNWDDRAVVADDPHFQGRGNKSSGDNFHAAPNIDHSQEFVRNDLKEWLCWMRKEVGYDGWRLDFVRGFWGGYVKDYLEASEPYFAVGEYWDSLSYTYGEMDYNQDAHRQRIVDWINATNGTAGAFDVTTKGILHAALERSEYWRLSDEKGKPPGVLGWWPSRAVTFIENHDTGSTQGHWRFPYGMELQGYAYILTHPGTPAVFYDHIFSHLQPEIAKFISIRHRQKIHCRSKIKILKAERSLYAAEIDEKVTMKIGSEHFEPSGPQNWIVAAEGQDYKIWEASS

SEQ ID NO: 111576 - protein, 342 aa, Zea mays subsp. mays
  misc_feature (1)..(342): Ceres Seq. ID no. 13623388
  misc_feature (1)..(339): Homolog of NCBI NO: 228404 NR Description: alpha amylase
  misc_feature (1)..(339): Homolog of NCBI NO: 3769330 NR Description: alpha-amylase [Phaseolus vulgaris]
  misc_feature (1)..(338): Homolog of NCBI NO: 7532799 NR Description: alpha-amylase [Malus x domestica]
  misc_feature (1)..(338): Homolog of NCBI NO: 25289325 NR Description: protein T23E18.6 [imported] - Arabidopsis
  misc_feature (1)..(338): Homolog of NCBI NO: 15222959 NR Description: alpha-amylase (1,4-alpha-D-glucan
  misc_feature (1)..(338): Homolog of NCBI NO: 38346145 NR Description: OSJNBb0118P14.5 [Oryza sativa (japonica
  misc_feature (1)..(339): Homolog of NCBI NO: 1220453 NR Description: alpha-amylase
  misc_feature (1)..(341): Homolog of NCBI NO: 25404842 NR Description: probable alpha-amylase T17F3.14 [imported] -
  misc_feature (1)..(341): Homolog of NCBI NO: 18409378 NR Description: alpha-amylase (1,4-alpha-D-glucan
  misc_feature (1)..(342): Homolog of NCBI NO: 34910588 NR Description: putative alpha-amylase [Oryza sativa (japonica
MPRDLYNLNSRYGSMDELKELVKIFHEAGIKVLGDAVLNHRCAQFQNNNGVWNIFGGRMNWDDRAVVADDPHFQGRGNKSSGDNFHAAPNIDHSQEFVRNDLKEWLCWMRKEVGYDGWRLDFVRGFWGGYVKDYLEASEPYFAVGEYWDSLSYTYGEMDYNQDAHRQRIVDWINATNGTAGAFDVTTKGILHAALERSEYWRLSDEKGKPPGVLGWWPSRAVTFIENHDTGSTQGHWRFPYGMELQGYAYILTHPGTPAVFYDHIFSHLQPEIAKFISIRHRQKIHCRSKIKILKAERSLYAAEIDEKVTMKIGSEHFEPSGPQNWIVAAEGQDYKIWEASS

SEQ ID NO: 111577 - DNA, 1150 bp, Zea mays subsp. mays
  misc_feature (1)..(1150): Ceres Seq. ID no. 13599756
aagaccaaggccgccgccgcggattcggccctggtcgttcgcgacgactcctacctagaggcggtcactcagaagaggattcgcttcttcgaggagatccaggcaaggcaagccgtcgagcggctgaatatcggcggcgaagttatcaaggtaactttgcctgatggcgctatcaaggagggtaagaaatggataacaaccccaatggatattgctaaggagatatcaagtggatttgcagctagttgtttgatagctcaagtggacgaaacactctgggacatggggaggccactcgaaggtgattgtaaattgcaaatgttcaagtttgataccaatgaaggtcgtgacaccttctggcactcaagtgctcatattcttggagaatctattgagagagcatatggatgcaagctgtgtattgggccttgcaccacaagaggggagggtttctactatgatgcttactacaatgatcagacattgaatgaggagcactttggtatcattgaaaaccaagctaaaaaggctgttgcggaaaagcaaccgtttgaacgcattgaggtcagcagggcagaagctcttgaaatgtttgctgagaatgaattcaaggttgaaatcattaatgagttgcctgaggacaagaccattactgtatacaggtgtggtcctttagttgacctatgccgtgggccacacatcccaaatacttcctttgtcaaagctttcgcttgtctgaaggcttcatcatcatattggagaggaaaagttgaccgcgaaagcctgcagagagtatatggaatttctttccctgattctcgacgtctcacggaatataaacattttctagaggaagctaagaaacgtgatcataggatattagggaaagcacaggaactcttctttttccatgaacttagccctggaagctgcttcttccttccacatggtgccaggatatataacaaactgatggacttcatgcgacaacagtacagagatagaggataccaagaggtgttgagcccaaatatttacaatatgcaactatgggaaacttctggacacgccgcaaactataaggagaacatgtttgtttttgagatcgagaaacaggaatttggacttaagccaatgaattgnccaggac

SEQ ID NO: 111578 - protein, 383 aa, Zea mays subsp. mays
  misc_feature (1)..(383): Ceres Seq. ID no. 13599757
  misc_feature (309)..(382): Pfam Name: tRNA synthetase class II core domain (G, H, P, S and T) Pfam Description: tRNA synthetase class II core domain (G, H, P,
  misc_feature (21)..(382): Homolog of NCBI NO: 17532457 NR Description: Threonyl tRNA Synthetase TRS-1 (84.4 kD) (trs-1)
  misc_feature (26)..(382): Homolog of NCBI NO: 31237885 NR Description: ENSANGP00000024346 [Anopheles gambiae]
  misc_feature (26)..(382): Homolog of NCBI NO: 31237882 NR Description: ENSANGP00000021424 [Anopheles gambiae]
  misc_feature (158)..(382): Homolog of NCBI NO: 20429011 NR Description: threonyl-tRNA synthetase [Oryza sativa (japonica
  misc_feature (14)..(129): Homolog of NCBI NO: 7437517 NR Description: threonine-tRNA ligase (EC 6.1.1.3) - Arabidopsis
  misc_feature (148)..(382): Homolog of NCBI NO: 7437517 NR Description: threonine-tRNA ligase (EC 6.1.1.3) - Arabidopsis
  misc_feature (14)..(382): Homolog of NCBI NO: 15081626 NR Description: AT5g26830/F2P16_90 [Arabidopsis thaliana]
  misc_feature (14)..(382): Homolog of NCBI NO: 30690426 NR Description: threonyl-tRNA synthetase [Arabidopsis thaliana]
  misc_feature (14)..(382): Homolog of NCBI NO: 11271129 NR Description: threonine-tRNA ligase (EC 6.1.1.3)
  misc_feature (2)..(382): Homolog of NCBI NO: 38175524 NR Description: putative threonyl-tRNA synthetase
KTKAAAADSALVVRDDSYLEAVTQKRIRFFEEIQARQAVERLNIGGEVIKVTLPDGAIKEGKKWITTPMDIAKEISSGFAASCLIAQVDETLWDMGRPLEGDCKLQMFKFDTNEGRDTFWHSSAHILGESIERAYGCKLCIGPCTTRGEGFYYDAYYNDQTLNEEHFGIIENQAKKAVAEKQPFERIEVSRAEALEMFAENEFKVEIINELPEDKTITVYRCGPLVDLCRGPHIPNTSFVKAFACLKASSSYWRGKVDRESLQRVYGISFPDSRRLTEYKHFLEEAKKRDHRILGKAQELFFFHELSPGSCFFLPHGARIYNKLMDFMRQQYRDRGYQEVLSPNIYNMQLWETSGHAANYKENMFVFEIEKQEFGLKPMNXPG

SEQ ID NO: 111579 - protein, 315 aa, Zea mays subsp. mays
  misc_feature (1)..(315): Ceres Seq. ID no. 13599758
  misc_feature (241)..(314): Pfam Name: tRNA synthetase class II core domain (G, H, P, S and T) Pfam Description: tRNA synthetase class II core domain (G, H, P,
  misc_feature (1)..(314): Homolog of NCBI NO: 17532457 NR Description: Threonyl tRNA Synthetase TRS-1 (84.4 kD) (trs-1)
  misc_feature (1)..(314): Homolog of NCBI NO: 31237885 NR Description: ENSANGP00000024346 [Anopheles gambiae]
  misc_feature (1)..(314): Homolog of NCBI NO: 31237882 NR Description: ENSANGP00000021424 [Anopheles gambiae]
  misc_feature (90)..(314): Homolog of NCBI NO: 20429011 NR Description: threonyl-tRNA synthetase [Oryza sativa (japonica
  misc_feature (1)..(61): Homolog of NCBI NO: 7437517 NR Description: threonine-tRNA ligase (EC 6.1.1.3) - Arabidopsis
  misc_feature (80)..(314): Homolog of NCBI NO: 7437517 NR Description: threonine-tRNA ligase (EC 6.1.1.3) - Arabidopsis
  misc_feature (1)..(314): Homolog of NCBI NO: 15081626 NR Description: AT5g26830/F2P16_90 [Arabidopsis thaliana]
  misc_feature (1)..(314): Homolog of NCBI NO: 30690426 NR Description: threonyl-tRNA synthetase [Arabidopsis thaliana]
  misc_feature (1)..(314): Homolog of NCBI NO: 11271129 NR Description: threonine-tRNA ligase (EC 6.1.1.3)
  misc_feature (1)..(314): Homolog of NCBI NO: 38175524 NR Description: putative threonyl-tRNA synthetase
MDIAKEISSGFAASCLIAQVDETLWDMGRPLEGDCKLQMFKFDTNEGRDTFWHSSAHILGESIERAYGCKLCIGPCTTRGEGFYYDAYYNDQTLNEEHFGIIENQAKKAVAEKQPFERIEVSRAEALEMFAENEFKVEIINELPEDKTITVYRCGPLVDLCRGPHIPNTSFVKAFACLKASSSYWRGKVDRESLQRVYGISFPDSRRLTEYKHFLEEAKKRDHRILGKAQELFFFHELSPGSCFFLPHGARIYNKLMDFMRQQYRDRGYQEVLSPNIYNMQLWETSGHAANYKENMFVFEIEKQEFGLKPMNXPG

SEQ ID NO: 111580 - protein, 289 aa, Zea mays subsp. mays
  misc_feature (1)..(289): Ceres Seq. ID no. 13599759
  misc_feature (215)..(288): Pfam Name: tRNA synthetase class II core domain (G, H, P, S and T) Pfam Description: tRNA synthetase class II core domain (G, H, P,
  misc_feature (1)..(288): Homolog of NCBI NO: 17532457 NR Description: Threonyl tRNA Synthetase TRS-1 (84.4 kD) (trs-1)
  misc_feature (1)..(288): Homolog of NCBI NO: 31237885 NR Description: ENSANGP00000024346 [Anopheles gambiae]
  misc_feature (1)..(288): Homolog of NCBI NO: 31237882 NR Description: ENSANGP00000021424 [Anopheles gambiae]
  misc_feature (64)..(288): Homolog of NCBI NO: 20429011 NR Description: threonyl-tRNA synthetase [Oryza sativa (japonica
  misc_feature (1)..(35): Homolog of NCBI NO: 7437517 NR Description: threonine-tRNA ligase (EC 6.1.1.3) - Arabidopsis
  misc_feature (54)..(288): Homolog of NCBI NO: 7437517 NR Description: threonine-tRNA ligase (EC 6.1.1.3) - Arabidopsis
  misc_feature (1)..(288): Homolog of NCBI NO: 15081626 NR Description: AT5g26830/F2P16_90 [Arabidopsis thaliana]
  misc_feature (1)..(288): Homolog of NCBI NO: 30690426 NR Description: threonyl-tRNA synthetase [Arabidopsis thaliana]
  misc_feature (1)..(288): Homolog of NCBI NO: 11271129 NR Description: threonine-tRNA ligase (EC 6.1.1.3)
  misc_feature (1)..(288): Homolog of NCBI NO: 38175524 NR Description: putative threonyl-tRNA synthetase
MGRPLEGDCKLQMFKFDTNEGRDTFWHSSAHILGESIERAYGCKLCIGPCTTRGEGFYYDAYYNDQTLNEEHFGIIENQAKKAVAEKQPFERIEVSRAEALEMFAENEFKVEIINELPEDKTITVYRCGPLVDLCRGPHIPNTSFVKAFACLKASSSYWRGKVDRESLQRVYGISFPDSRRLTEYKHFLEEAKKRDHRILGKAQELFFFHELSPGSCFFLPHGARIYNKLMDFMRQQYRDRGYQEVLSPNIYNMQLWETSGHAANYKENMFVFEIEKQEFGLKPMNXPG

SEQ ID NO: 111581 - DNA, 1226 bp, Zea mays subsp. mays
  misc_feature (1)..(1226): Ceres Seq. ID no. 12590304
ccccccccccccccaatcaaaagcaagatgcaagttgcaagtctggaaagaccgactaccattcaatgttgcaagtgatttctattgttaagaagctatgagcgaaaattttgtgtctcaagatttgaagcatgagaagcgttgcgggggagaagcttcagtgcaacattgttgttctatagggatcaacatcctcaagatcacttggaaaactttcacgaaaaacttgtaatgcaagcatatgttttattggaaaagttttccaagctgaatttctaaaagcctcctcactgctttagttatgctgaattggaatttgcaactaggggtttcttacaagtaaatttcttagctaaaggcatggtgcactgcacattgatctttcttcttctatcgtatgatgtgacttgtgattgctttgccaatgcgacctacatggagctggattgttattacagacaacagaactgtatttatcttgaataatgattgatggttaagtgcatgcgtcactgggttcgagatcgactacagccactgggtggacgagcagaaaaggcacatggcagagctgacgtcgacgctccaggggcagcagacgtcggagctggagctccgcctgctggtggagacgtggctcagcaactacgagcgcctgtttaggatcaaggcgacggcggccaacgcggacgtgttctacgtcatgtcgggcttgtggaagacccccgccaagaggttcttcctctggatcggtgggttccggccgtcggatgtcctcaaggatgtaagcaatctcatgcacctgttgttgctcgcaaggttcatccctcacaagtacaagatcaaagactcgaaagcttaggttgctttgagccgtggtggatctcccggtgtgatgacatggggctgggtctgggagctcttctcaaatctgggggttctcggtctgctcttctcaatttagtgttatctttttcttttagaacaatgccaaagatacatgacagactgctttgcttgtttttgacatgatgcaaaagcaatggagtctttacttttaaacctttgttatttttgttttgattcaattatgatactgctgaaatgtacggatatctattattttgatgcaatagtggtgttttgcgatgtttaaaaaaaaaaaaaaaaaaaaaaaaaaaaaaaaaagaaaaaaaaaaaaaaaaaaaactcgagggggggcccgg

SEQ ID NO: 111582 - protein, 99 aa, Zea mays subsp. mays
  misc_feature (1)..(99): Ceres Seq. ID no. 12590305
  misc_feature (1)..(73): Homolog of NCBI NO: 21592661 NR Description: DNA binding protein TGA1a homolog [Arabidopsis
  misc_feature (1)..(73): Homolog of NCBI NO: 15238367 NR Description: bZIP transcription factor, TGA1
  misc_feature (1)..(73): Homolog of NCBI NO: 320563 NR Description: transcription factor tga1 - Arabidopsis thaliana
  misc_feature (1)..(82): Homolog of NCBI NO: 15148922 NR Description: TGA-type basic leucine zipper protein TGA1.1
  misc_feature (1)..(73): Homolog of NCBI NO: 14600166 NR Description: leucine-zipper transcription factor [Lycopersicon
  misc_feature (1)..(73): Homolog of NCBI NO: 1076664 NR Description: transcription factor D11 - potato
  misc_feature (1)..(73): Homolog of NCBI NO: 15238046 NR Description: bZIP transcription factor, OBF4; protein id:
  misc_feature (1)..(73): Homolog of NCBI NO: 1076422 NR Description: transcription factor OBF4 - Arabidopsis thaliana
  misc_feature (1)..(73): Homolog of NCBI NO: 13195752 NR Description: mas-binding factor MBF1 [Solanum tuberosum]
  misc_feature (1)..(75): Homolog of NCBI NO: 39545747 NR Description: OSJNBb0034I13.13 [Oryza sativa (japonica
MAELTSTLQGQQTSELELRLLVETWLSNYERLFRIKATAANADVFYVMSGLWKTPAKRFFLWIGGFRPSDVLKDVSNLMHLLLLARFIPHKYKIKDSKA

SEQ ID NO: 111583 - protein, 56 aa, Zea mays subsp. mays
  misc_feature (1)..(56): Ceres Seq. ID no. 12590306
MVKCMRHWVRDRLQPLGGRAEKAHGRADVDAPGAADVGAGAPPAGGDVAQQLRAPV

SEQ ID NO: 111584 - protein, 52 aa, Zea mays subsp. mays
  misc_feature (1)..(52): Ceres Seq. ID no. 12590307
MRHWVRDRLQPLGGRAEKAHGRADVDAPGAADVGAGAPPAGGDVAQQLRAPV

SEQ ID NO: 111585 - DNA, 2158 bp, Zea mays subsp. mays
  misc_feature (1)..(2158): Ceres Seq. ID no. 13599838
gagcaaagcgtcttccatttctcagaagagtgtgtgacaacagcggcaaccgacagacatgtcttcgccgacatcgccttggtttgcggatctcttcacagatgacagggtgaggaccctatcgcaccaggtctccacacttggggacagggtgtgggaactggagcacaaaattacccagctgatgggcgagaaggccaagctggagaagcaactggaggaggcaaaggcgatctcaagccacaaggaagaggtggggagaagcttgaaggctgaaaatgataagcttcagtcggaggttttggttgcggaggaaaagtgtagcaagtctgcagcggaggttgagaggctgacgaaggaattaggcgcgctggcggaggcaaaggaggcagctgccaaggaattcaacgacgagagagagaaaatcacgctagaatcggaggatctcaagatgaggctggaggaaatgctggccatcaaggatttgacagagagcgagaatgacaagcttcggtccgaggctttgatcgcagctgaaaagcaaaacatgtatgaagcagagattgagaggctcaagaaggaactgagtgggttgttggaggcgaaggaggcggctgccaaggctttcgacgtacaaaaagcagaaatcaccaatgaattagaggaactacagaggaagctgaaggaaatcgaagctaataaggatttagtggagggagaaaacagtaagcttcagtctgagattctcacagcacaggagaaatatagacagtctgaagcagaggttaagtgcattaaacaagtaatgtgttcagtggtggaggcgaaggaggcagctgcaagggcatctgaagctgagaaggcagaaatcatggaggaaatggacaaccttaagaggacaatcgaggagatcaaggccaacagggatttggtagagagtcagaaccaggagcttcggtcaaagatttcgagtgcagagcaagagcgtagcctatttgaaggagagattaagagcgtcaggatggaattgggggcagtagaggaggccaagcagatccttacgagggagttmgatgctgagaagkcagagatcctgaaggaactggatgaccttgagaagaagmtagagkmattgcagaccaacaagggtttgctggaggctgaaaacgacaagcttcagctggaggtttttgaccgcacagcacaaacaaagcatgtccgaagcagaggctgagagccttaagatggaactgggagcattggtggaggcaaaggaggcggctacaaaagcatttggtgccgagaaagcaaagaccacgaaggaactggaggatcttaagaggaaggtggaggaaatccaaaccaagaaggatctggtggagggcgaaaaggataagctccgtttggagattttaatagcggagcagaggcatgccatggctgaattagaggttaagcgcctcaagatggacttggctgcatcggcagaggcgagggagacagttgtgaggtcatgtgacgctgagaaggccaagttcatggcggaaatagagaacctcaggaggaagatagaggaaatccacgccagcaaggaagcggccgagaaagcagcgcgcaacaaagatgcagaggctgacaggctgaaggatgagctggcgaggatccggctctctgtgtcacagctgcaagcgtcctgcgacgaacttgatgccaagcagtcgcgcctgaacgacgagaagaactctgtccagaaagcactagtgtccgagaaggtcgaaggtaacaagctcaagttaaaaatcgaggaactcgagaatcacattgctggcaaggacggtgagaaagggaaactgaaggcggcgttggaggaaaagatgactgagatcaatgctctcagcaaagacaacgcgatgctacatcgcacaattctcgaggcacaagagaagaataaaggtagcattttatcgttcttgtcaccgtgcggctccaagtaacttggttgtaatgtgttgcattactaatgcaatggtgaaggtaccatgcaatgaaatwrtttaaacacaatwwmgagkkwwctkkgwggggggaaaaaaaaaaaaaaaaaaaaaaaaaaaaaaaaaaaaaaaaaaaannntcgagggggggcccggtacccaat

SEQ ID NO: 111586 - protein, 391 aa, Zea mays subsp. mays
  misc_feature (1)..(391): Ceres Seq. ID no. 15218632
  misc_feature (38)..(390): Pfam Name: Myosin tail Pfam Description: Myosin tail
  misc_feature (41)..(385): Homolog of NCBI NO: 32487724 NR Description: OSJNBa0022F16.25 [Oryza sativa (japonica
  misc_feature (17)..(375): Homolog of NCBI NO: 32487724 NR Description: OSJNBa0022F16.25 [Oryza sativa (japonica
  misc_feature (45)..(389): Homolog of NCBI NO: 38346693 NR Description: OSJNBa0080E14.9 [Oryza sativa (japonica
  misc_feature (22)..(377): Homolog of NCBI NO: 32487724 NR Description: OSJNBa0022F16.25 [Oryza sativa (japonica
  misc_feature (16)..(390): Homolog of NCBI NO: 38346693 NR Description: OSJNBa0080E14.9 [Oryza sativa (japonica
  misc_feature (15)..(377): Homolog of NCBI NO: 32487724 NR Description: OSJNBa0022F16.25 [Oryza sativa (japonica
  misc_feature (41)..(377): Homolog of NCBI NO: 32487724 NR Description: OSJNBa0022F16.25 [Oryza sativa (japonica
  misc_feature (11)..(377): Homolog of NCBI NO: 38345173 NR Description: OSJNBa0089E12.15 [Oryza sativa (japonica
  misc_feature (27)..(390): Homolog of NCBI NO: 38345638 NR Description: OSJNBb0028M18.1 [Oryza sativa (japonica
  misc_feature (11)..(385): Homolog of NCBI NO: 38346693 NR Description: OSJNBa0080E14.9 [Oryza sativa (japonica
MSSPTSPWFADLFTDDRVRTLSHQVSTLGDRVWELEHKITQLMGEKAKLEKQLEEAKAISSHKEEVGRSLKAENDKLQSEVLVAEEKCSKSAAEVERLTKELGALAEAKEAAAKEFNDEREKITLESEDLKMRLEEMLAIKDLTESENDKLRSEALIAAEKQNMYEAEIERLKKELSGLLEAKEAAAKAFDVQKAEITNELEELQRKLKEIEANKDLVEGENSKLQSEILTAQEKYRQSEAEVKCIKQVMCSVVEAKEAAARASEAEKAEIMEEMDNLKRTIEEIKANRDLVESQNQELRSKISSAEQERSLFEGEIKSVRMELGAVEEAKQILTREXDAEKXEILKELDDLEKKXEXLQTNKGLLEAENDKLQLEVFDRTAQTKHVRSRG

SEQ ID NO: 111587 - protein, 349 aa, Zea mays subsp. mays
  misc_feature (1)..(349): Ceres Seq. ID no. 15218633
  misc_feature (1)..(348): Pfam Name: Myosin tail Pfam Description: Myosin tail
  misc_feature (1)..(343): Homolog of NCBI NO: 32487724 NR Description: OSJNBa0022F16.25 [Oryza sativa (japonica
  misc_feature (1)..(333): Homolog of NCBI NO: 32487724 NR Description: OSJNBa0022F16.25 [Oryza sativa (japonica
  misc_feature (3)..(347): Homolog of NCBI NO: 38346693 NR Description: OSJNBa0080E14.9 [Oryza sativa (japonica
  misc_feature (1)..(335): Homolog of NCBI NO: 32487724 NR Description: OSJNBa0022F16.25 [Oryza sativa (japonica
  misc_feature (1)..(348): Homolog of NCBI NO: 38346693 NR Description: OSJNBa0080E14.9 [Oryza sativa (japonica
  misc_feature (1)..(335): Homolog of NCBI NO: 32487724 NR Description: OSJNBa0022F16.25 [Oryza sativa (japonica
  misc_feature (1)..(335): Homolog of NCBI NO: 32487724 NR Description: OSJNBa0022F16.25 [Oryza sativa (japonica
  misc_feature (1)..(335): Homolog of NCBI NO: 38345173 NR Description: OSJNBa0089E12.15 [Oryza sativa (japonica
  misc_feature (1)..(348): Homolog of NCBI NO: 38345638 NR Description: OSJNBb0028M18.1 [Oryza sativa (japonica
  misc_feature (1)..(343): Homolog of NCBI NO: 38346693 NR Description: OSJNBa0080E14.9 [Oryza sativa (japonica
MGEKAKLEKQLEEAKAISSHKEEVGRSLKAENDKLQSEVLVAEEKCSKSAAEVERLTKELGALAEAKEAAAKEFNDEREKITLESEDLKMRLEEMLAIKDLTESENDKLRSEALIAAEKQNMYEAEIERLKKELSGLLEAKEAAAKAFDVQKAEITNELEELQRKLKEIEANKDLVEGENSKLQSEILTAQEKYRQSEAEVKCIKQVMCSVVEAKEAAARASEAEKAEIMEEMDNLKRTIEEIKANRDLVESQNQELRSKISSAEQERSLFEGEIKSVRMELGAVEEAKQILTREXDAEKXEILKELDDLEKKXEXLQTNKGLLEAENDKLQLEVFDRTAQTKHVRSRG

SEQ ID NO: 111588 - protein, 260 aa, Zea mays subsp. mays
  misc_feature (1)..(260): Ceres Seq. ID no. 15218634
  misc_feature (1)..(259): Pfam Name: Myosin tail Pfam Description: Myosin tail
  misc_feature (1)..(254): Homolog of NCBI NO: 32487724 NR Description: OSJNBa0022F16.25 [Oryza sativa (japonica
  misc_feature (1)..(244): Homolog of NCBI NO: 32487724 NR Description: OSJNBa0022F16.25 [Oryza sativa (japonica
  misc_feature (1)..(258): Homolog of NCBI NO: 38346693 NR Description: OSJNBa0080E14.9 [Oryza sativa (japonica
  misc_feature (1)..(246): Homolog of NCBI NO: 32487724 NR Description: OSJNBa0022F16.25 [Oryza sativa (japonica
  misc_feature (1)..(259): Homolog of NCBI NO: 38346693 NR Description: OSJNBa0080E14.9 [Oryza sativa (japonica
  misc_feature (1)..(246): Homolog of NCBI NO: 32487724 NR Description: OSJNBa0022F16.25 [Oryza sativa (japonica
  misc_feature (1)..(246): Homolog of NCBI NO: 32487724 NR Description: OSJNBa0022F16.25 [Oryza sativa (japonica
  misc_feature (1)..(246): Homolog of NCBI NO: 38345173 NR Description: OSJNBa0089E12.15 [Oryza sativa (japonica
  misc_feature (1)..(259): Homolog of NCBI NO: 38345638 NR Description: OSJNBb0028M18.1 [Oryza sativa (japonica
  misc_feature (1)..(254): Homolog of NCBI NO: 38346693 NR Description: OSJNBa0080E14.9 [Oryza sativa (japonica
MRLEEMLAIKDLTESENDKLRSEALIAAEKQNMYEAEIERLKKELSGLLEAKEAAAKAFDVQKAEITNELEELQRKLKEIEANKDLVEGENSKLQSEILTAQEKYRQSEAEVKCIKQVMCSVVEAKEAAARASEAEKAEIMEEMDNLKRTIEEIKANRDLVESQNQELRSKISSAEQERSLFEGEIKSVRMELGAVEEAKQILTREXDAEKXEILKELDDLEKKXEXLQTNKGLLEAENDKLQLEVFDRTAQTKHVRSRG

SEQ ID NO: 111589 - DNA, 2061 bp, Zea mays subsp. mays
  misc_feature (1)..(2061): Ceres Seq. ID no. 13623497
tgatagctagggcctcttttcctgcttcggcttctcatgtttcttgccggtcgtagtggaatccctacatgacagttagtaataacaacatatatctgtaaggtactctgtttttttggttgatgaggtaaactcaaccctttgctttgatgataataataagagtcatattttgcaggattttttttatttagggattatctccgattcctctttacaccactttttttcatttcagtgcaatatcaggtagtggaagtgctgggaggagaaaaaatcttgtcttgcatctgattcggtcttgtagagaaacagaaatgaaatttcttgtcagaacactggttcgtaacttgcgtattggggctatgatgaagacgattttacctgcgcttgcacatgctgttgtttttgatagaaactgtgcagcagatcctgcggtgtcattggaaggcataaaatcacaactacagagtctttcaactgaagttgccgaggcatacaatgtcactcctaatctagatttgctcattccttctcttctgagagaaggcactgcattttcagcttcatccttggcaatggtgcctggcacacctattccacctatgcttgcaagaattactaacgggttgactcagtcgttgaaagctttccatggcagatcatttacttgtgagtacaagtatgatggtcagcgtgcccagattcacaaagcacttgatggatccgtgcgaatattttcaaggcaaatgaaagaatcaacttccagatttcctgatcttgtgaatatgattaaggagttgtgcaagcccgaagtgtcaagctttatactggatgccgaggtggtaggaattaacaggaagaaaggaaatgagttgatgtcgttccaagagctatcttcaagagaaagagggaataagcattcctcaatttcaatagagaacataaaggttgacatttgtgtgtttgtttttgacatcatgttccatgatggagagagactactggattgccctcttcggcaaagaagaaagtacattcatgacttgttccatgagaagccaggatattttgagttagctcagcagctaaatatagaagcctgcgaagcttcaccagacaattctagcactttggctaggatggacacgtttttcagaaatgcatgccagtcttcttgtgagggtataatgttaaagactttggatgtcgatgctggatactctgcttccaaacgctgtgattcatggttaaaggtcaagcgtgactatgtgcaaggcttaggtgatagccttgacttggttccgattggtgcatggtatggaaacggacgtaaagctgggtggtacagcccttttctcatggcatgctacaaccctgaaactgaagagttccaaagtgtatgtcgtgttatgtctggtttctcggatgagttctataaagagatgaaggagttctattcgggggaaaggatactgcccaagaagcctgtttactacaaaacagacgagcaaccagagctgtggttcaccgcagaacaaatctgggagatccgaggtgcagacctgacgttgtcccctgtccaccatgcggccattgggcttgtccatccatcgcgcggcatctcggtgaggatgccccggtacatccgttcagttccagaccggagcccagaggactgcggcacggccgccgatattgctagcatgttcaaagcccagacccggaagatggatgtcagcagcgagggccaggagtagtaggcaatgcaaagctcagcccatttcctcgtcctagctttgcttatgttcaccagttctgtatatacacagaacgaaccagggtgaagtgaaccaccctactgatcaaatggtgaaaactgaagcgtaggacaggcagcactgatcccactggctttcaatttttctttgtacagaaactgaatgcagttggaacgcggaaggaagcccacgagttgcacgttcggggggaaaaaaacgatgcataagtacatcaggcaaaaaaaaaaaaaaaaaaaactcgagggggggcccggtaccc

SEQ ID NO: 111590 - protein, 480 aa, Zea mays subsp. mays
  misc_feature (1)..(480): Ceres Seq. ID no. 13623498
  misc_feature (93)..(315): Pfam Name: ATP dependent DNA ligase domain Pfam Description: ATP dependent DNA ligase domain
  misc_feature (51)..(468): Homolog of NCBI NO: 23486709 NR Description: DNA ligase 1 [Plasmodium yoelii yoelii]
  misc_feature (1)..(480): Homolog of NCBI NO: 31239171 NR Description: ENSANGP00000010547 [Anopheles gambiae]
  misc_feature (1)..(469): Homolog of NCBI NO: 30962491 NR Description: DNA ligase I [Coprinopsis cinerea]
  misc_feature (1)..(468): Homolog of NCBI NO: 28830036 NR Description: similar to Xenopus laevis (African clawed frog).
  misc_feature (1)..(468): Homolog of NCBI NO: 19112137 NR Description: dna ligase [Schizosaccharomyces pombe]
  misc_feature (173)..(376): Homolog of NCBI NO: 34911260 NR Description: putative DNA ligase [Oryza sativa (japonica
  misc_feature (372)..(480): Homolog of NCBI NO: 34911260 NR Description: putative DNA ligase [Oryza sativa (japonica
  misc_feature (1)..(176): Homolog of NCBI NO: 34911260 NR Description: putative DNA ligase [Oryza sativa (japonica
  misc_feature (369)..(477): Homolog of NCBI NO: 15219728 NR Description: DNA ligase I -related [Arabidopsis thaliana]
  misc_feature (1)..(377): Homolog of NCBI NO: 15219728 NR Description: DNA ligase I -related [Arabidopsis thaliana]
MKFLVRTLVRNLRIGAMMKTILPALAHAVVFDRNCAADPAVSLEGIKSQLQSLSTEVAEAYNVTPNLDLLIPSLLREGTAFSASSLAMVPGTPIPPMLARITNGLTQSLKAFHGRSFTCEYKYDGQRAQIHKALDGSVRIFSRQMKESTSRFPDLVNMIKELCKPEVSSFILDAEVVGINRKKGNELMSFQELSSRERGNKHSSISIENIKVDICVFVFDIMFHDGERLLDCPLRQRRKYIHDLFHEKPGYFELAQQLNIEACEASPDNSSTLARMDTFFRNACQSSCEGIMLKTLDVDAGYSASKRCDSWLKVKRDYVQGLGDSLDLVPIGAWYGNGRKAGWYSPFLMACYNPETEEFQSVCRVMSGFSDEFYKEMKEFYSGERILPKKPVYYKTDEQPELWFTAEQIWEIRGADLTLSPVHHAAIGLVHPSRGISVRMPRYIRSVPDRSPEDCGTAADIASMFKAQTRKMDVSSEGQE

SEQ ID NO: 111591 - protein, 464 aa, Zea mays subsp. mays
  misc_feature (1)..(464): Ceres Seq. ID no. 13623499
  misc_feature (77)..(299): Pfam Name: ATP dependent DNA ligase domain Pfam Description: ATP dependent DNA ligase domain
  misc_feature (35)..(452): Homolog of NCBI NO: 23486709 NR Description: DNA ligase 1 [Plasmodium yoelii yoelii]
  misc_feature (1)..(464): Homolog of NCBI NO: 31239171 NR Description: ENSANGP00000010547 [Anopheles gambiae]
  misc_feature (1)..(453): Homolog of NCBI NO: 30962491 NR Description: DNA ligase I [Coprinopsis cinerea]
  misc_feature (1)..(452): Homolog of NCBI NO: 28830036 NR Description: similar to Xenopus laevis (African clawed frog).
  misc_feature (1)..(452): Homolog of NCBI NO: 19112137 NR Description: dna ligase [Schizosaccharomyces pombe]
  misc_feature (157)..(360): Homolog of NCBI NO: 34911260 NR Description: putative DNA ligase [Oryza sativa (japonica
  misc_feature (356)..(464): Homolog of NCBI NO: 34911260 NR Description: putative DNA ligase [Oryza sativa (japonica
  misc_feature (1)..(160): Homolog of NCBI NO: 34911260 NR Description: putative DNA ligase [Oryza sativa (japonica
  misc_feature (353)..(461): Homolog of NCBI NO: 15219728 NR Description: DNA ligase I -related [Arabidopsis thaliana]
  misc_feature (1)..(361): Homolog of NCBI NO: 15219728 NR Description: DNA ligase I -related [Arabidopsis thaliana]
MMKTILPALAHAVVFDRNCAADPAVSLEGIKSQLQSLSTEVAEAYNVTPNLDLLIPSLLREGTAFSASSLAMVPGTPIPPMLARITNGLTQSLKAFHGRSFTCEYKYDGQRAQIHKALDGSVRIFSRQMKESTSRFPDLVNMIKELCKPEVSSFILDAEVVGINRKKGNELMSFQELSSRERGNKHSSISIENIKVDICVFVFDIMFHDGERLLDCPLRQRRKYIHDLFHEKPGYFELAQQLNIEACEASPDNSSTLARMDTFFRNACQSSCEGIMLKTLDVDAGYSASKRCDSWLKVKRDYVQGLGDSLDLVPIGAWYGNGRKAGWYSPFLMACYNPETEEFQSVCRVMSGFSDEFYKEMKEFYSGERILPKKPVYYKTDEQPELWFTAEQIWEIRGADLTLSPVHHAAIGLVHPSRGISVRMPRYIRSVPDRSPEDCGTAADIASMFKAQTRKMDVSSEGQE

SEQ ID NO: 111592 - protein, 463 aa, Zea mays subsp. mays
  misc_feature (1)..(463): Ceres Seq. ID no. 13623500
  misc_feature (76)..(298): Pfam Name: ATP dependent DNA ligase domain Pfam Description: ATP dependent DNA ligase domain
  misc_feature (156)..(359): Homolog of NCBI NO: 34911260 NR Description: putative DNA ligase [Oryza sativa (japonica
  misc_feature (355)..(463): Homolog of NCBI NO: 34911260 NR Description: putative DNA ligase [Oryza sativa (japonica
  misc_feature (1)..(159): Homolog of NCBI NO: 34911260 NR Description: putative DNA ligase [Oryza sativa (japonica
  misc_feature (1)..(463): Homolog of NCBI NO: 31239171 NR Description: ENSANGP00000010547 [Anopheles gambiae]
  misc_feature (1)..(451): Homolog of NCBI NO: 28830036 NR Description: similar to Xenopus laevis (African clawed frog).
  misc_feature (1)..(451): Homolog of NCBI NO: 19112137 NR Description: dna ligase [Schizosaccharomyces pombe]
  misc_feature (1)..(452): Homolog of NCBI NO: 30962491 NR Description: DNA ligase I [Coprinopsis cinerea]
  misc_feature (34)..(451): Homolog of NCBI NO: 23486709 NR Description: DNA ligase 1 [Plasmodium yoelii yoelii]
  misc_feature (352)..(460): Homolog of NCBI NO: 15219728 NR Description: DNA ligase I -related [Arabidopsis thaliana]
  misc_feature (1)..(360): Homolog of NCBI NO: 15219728 NR Description: DNA ligase I -related [Arabidopsis thaliana]
MKTILPALAHAVVFDRNCAADPAVSLEGIKSQLQSLSTEVAEAYNVTPNLDLLIPSLLREGTAFSASSLAMVPGTPIPPMLARITNGLTQSLKAFHGRSFTCEYKYDGQRAQIHKALDGSVRIFSRQMKESTSRFPDLVNMIKELCKPEVSSFILDAEVVGINRKKGNELMSFQELSSRERGNKHSSISIENIKVDICVFVFDIMFHDGERLLDCPLRQRRKYIHDLFHEKPGYFELAQQLNIEACEASPDNSSTLARMDTFFRNACQSSCEGIMLKTLDVDAGYSASKRCDSWLKVKRDYVQGLGDSLDLVPIGAWYGNGRKAGWYSPFLMACYNPETEEFQSVCRVMSGFSDEFYKEMKEFYSGERILPKKPVYYKTDEQPELWFTAEQIWEIRGADLTLSPVHHAAIGLVHPSRGISVRMPRYIRSVPDRSPEDCGTAADIASMFKAQTRKMDVSSEGQE

SEQ ID NO: 111593 - DNA, 1936 bp, Zea mays subsp. mays
  misc_feature (1)..(1936): Ceres Seq. ID no. 13574398
ggatcggcggagaatgaagatgaaggcgctggcgtgctgccggcggcggccccaggacttgagcatcgacatggaccaagagcccgacagggtgatgacatataatggcctggagacctgcattatcaactgttccgcctatgacgatgatagtggcatcagtgcaacaacatgcggagatggctgtgtcaccgctgattcccttgatgatgaagtctctagctgctttagtaaagatgcttctggttcttccttctcttcacactgccttagcaagcaggaggagcattcgctagatgagttgggtacacccatcgcaattcatctactccctttcaaagcgaagaaaccaatcacatataccttgagtgcttcagatattgaaaacatgaagaaaaaatttgcgaagcttttgctcggttatgatacttcaggaggcgctaggggcgtttgtgcggctctggccttgtctaatggcataatcaatctctctgctactgtttttggagaactctggaagctggaaccattgtgcgaagataaaaagatcaggtggagaaaagaaatggactggttgatgtctcctacaacttatatagtggagctggttccaaggaaacaaagcggagcagatggatgcacatttgagattatgactccaaaggcccgctcagatgttcatgtgaaccttcctgcccttcagaagcttgatacgatgctcattgaagtaatggactctatgatagatacagagttctggtatgaggagagtggtagcagagctgatggtccggtgaaaattaccggcccaaggaagagtaaaaagtggtggctcccatctcctcgtgtccctgagcaagggctatctcgatttcagcggaaaaggcttgtttttcaggctaagcttgttcaccagatcctcaaagccgcaaaatccatcaacgaacaagtcctgttccacatgcctattccggcagctgttatggatgcccttccaaagtctgggagagctagcttgggtgaagatttgtaccaggctataacgaccgagtatattcccatagaggaaatatttgtttccctcagtttgaaaactgagcatagtgtgctcgagactatgaaccagttggagggggcaatgtttgcatggaaccaaagaatcttagaggagcgaagcaagaggtcaccgggacgtcattcctggagcttcatgaaggacagctcgtcagaactcgacaagatgtctgcatgcatcgaaagggtcgacacccttgtgcagcttctgaaagccagatatccgaacctgcctccaacttttatagatgttctaaaggtccagtacaatgtggatgtggggaatgcaatcgtggaggcatactctagggttcttgtcggggtagcattcagcatactgtcgcgcgtggcggagatactgctggaggatgacctggtcaagaggcccaacacccccatggcctcactgaagttcgacctctcctccgacgtgtacttggccggcataacagagacgccgccgggacacgtccggaggtcccttatggatcagatcagcatggtcgacgggcgcttcaacgctgctgtgaagaagaaaggagcgaagcagctgaggtggtgaggacagtcggctgttgtgtgaaatcttttggccatgtacagggtgggtgatgcagagcccagtgtccgctccacaaggacacaaggcaaggttaccatagcaatagcgccagtgtaatgtatttggcaacgagtttatagcttactgtaagagcaagcattaggcgaatcctgcctgtcgaagtctccggatgttgctgttccgtctgaacatctgatgctcttggtcagcctctgctgcatttcttgctggcaacaaagaaaacctaaaaaaaaaatgagaaaacttctacaaagctct

SEQ ID NO: 111594 - protein, 544 aa, Zea mays subsp. mays
  misc_feature (1)..(544): Ceres Seq. ID no. 13574399
  misc_feature (31)..(489): Pfam Name: Domain of unknown function (DUF315) Pfam Description: Domain of unknown function (DUF315)
  misc_feature (126)..(486): Homolog of NCBI NO: 15239292 NR Description: hypothetical protein [Arabidopsis thaliana]
  misc_feature (125)..(483): Homolog of NCBI NO: 15230137 NR Description: hypothetical protein [Arabidopsis thaliana]
  misc_feature (125)..(491): Homolog of NCBI NO: 15220004 NR Description: hypothetical protein [Arabidopsis thaliana]
  misc_feature (73)..(485): Homolog of NCBI NO: 15241663 NR Description: hypothetical protein [Arabidopsis thaliana]
  misc_feature (74)..(483): Homolog of NCBI NO: 34908302 NR Description: P0005H10.23 [Oryza sativa (japonica
  misc_feature (48)..(494): Homolog of NCBI NO: 15810309 NR Description: unknown protein [Arabidopsis thaliana]
  misc_feature (48)..(494): Homolog of NCBI NO: 15233845 NR Description: expressed protein [Arabidopsis thaliana]
  misc_feature (31)..(528): Homolog of NCBI NO: 12597851 NR Description: hypothetical protein [Arabidopsis thaliana]
  misc_feature (8)..(528): Homolog of NCBI NO: 26452131 NR Description: unknown protein [Arabidopsis thaliana]
  misc_feature (8)..(528): Homolog of NCBI NO: 30692580 NR Description: expressed protein [Arabidopsis thaliana]
DRRRMKMKALACCRRRPQDLSIDMDQEPDRVMTYNGLETCIINCSAYDDDSGISATTCGDGCVTADSLDDEVSSCFSKDASGSSFSSHCLSKQEEHSLDELGTPIAIHLLPFKAKKPITYTLSASDIENMKKKFAKLLLGYDTSGGARGVCAALALSNGIINLSATVFGELWKLEPLCEDKKIRWRKEMDWLMSPTTYIVELVPRKQSGADGCTFEIMTPKARSDVHVNLPALQKLDTMLIEVMDSMIDTEFWYEESGSRADGPVKITGPRKSKKWWLPSPRVPEQGLSRFQRKRLVFQAKLVHQILKAAKSINEQVLFHMPIPAAVMDALPKSGRASLGEDLYQAITTEYIPIEEIFVSLSLKTEHSVLETMNQLEGAMFAWNQRILEERSKRSPGRHSWSFMKDSSSELDKMSACIERVDTLVQLLKARYPNLPPTFIDVLKVQYNVDVGNAIVEAYSRVLVGVAFSILSRVAEILLEDDLVKRPNTPMASLKFDLSSDVYLAGITETPPGHVRRSLMDQISMVDGRFNAAVKKKGAKQLRW

SEQ ID NO: 111595 - protein, 540 aa, Zea mays subsp. mays
  misc_feature (1)..(540): Ceres Seq. ID no. 13574400
  misc_feature (27)..(485): Pfam Name: Domain of unknown function (DUF315) Pfam Description: Domain of unknown function (DUF315)
  misc_feature (122)..(482): Homolog of NCBI NO: 15239292 NR Description: hypothetical protein [Arabidopsis thaliana]
  misc_feature (121)..(479): Homolog of NCBI NO: 15230137 NR Description: hypothetical protein [Arabidopsis thaliana]
  misc_feature (121)..(487): Homolog of NCBI NO: 15220004 NR Description: hypothetical protein [Arabidopsis thaliana]
  misc_feature (69)..(481): Homolog of NCBI NO: 15241663 NR Description: hypothetical protein [Arabidopsis thaliana]
  misc_feature (70)..(479): Homolog of NCBI NO: 34908302 NR Description: P0005H10.23 [Oryza sativa (japonica
  misc_feature (44)..(490): Homolog of NCBI NO: 15810309 NR Description: unknown protein [Arabidopsis thaliana]
  misc_feature (44)..(490): Homolog of NCBI NO: 15233845 NR Description: expressed protein [Arabidopsis thaliana]
  misc_feature (27)..(524): Homolog of NCBI NO: 12597851 NR Description: hypothetical protein [Arabidopsis thaliana]
  misc_feature (4)..(524): Homolog of NCBI NO: 26452131 NR Description: unknown protein [Arabidopsis thaliana]
  misc_feature (4)..(524): Homolog of NCBI NO: 30692580 NR Description: expressed protein [Arabidopsis thaliana]
MKMKALACCRRRPQDLSIDMDQEPDRVMTYNGLETCIINCSAYDDDSGISATTCGDGCVTADSLDDEVSSCFSKDASGSSFSSHCLSKQEEHSLDELGTPIAIHLLPFKAKKPITYTLSASDIENMKKKFAKLLLGYDTSGGARGVCAALALSNGIINLSATVFGELWKLEPLCEDKKIRWRKEMDWLMSPTTYIVELVPRKQSGADGCTFEIMTPKARSDVHVNLPALQKLDTMLIEVMDSMIDTEFWYEESGSRADGPVKITGPRKSKKWWLPSPRVPEQGLSRFQRKRLVFQAKLVHQILKAAKSINEQVLFHMPIPAAVMDALPKSGRASLGEDLYQAITTEYIPIEEIFVSLSLKTEHSVLETMNQLEGAMFAWNQRILEERSKRSPGRHSWSFMKDSSSELDKMSACIERVDTLVQLLKARYPNLPPTFIDVLKVQYNVDVGNAIVEAYSRVLVGVAFSILSRVAEILLEDDLVKRPNTPMASLKFDLSSDVYLAGITETPPGHVRRSLMDQISMVDGRFNAAVKKKGAKQLRW

SEQ ID NO: 111596 - protein, 538 aa, Zea mays subsp. mays
  misc_feature (1)..(538): Ceres Seq. ID no. 13574401
  misc_feature (25)..(483): Pfam Name: Domain of unknown function (DUF315) Pfam Description: Domain of unknown function (DUF315)
  misc_feature (120)..(480): Homolog of NCBI NO: 15239292 NR Description: hypothetical protein [Arabidopsis thaliana]
  misc_feature (119)..(477): Homolog of NCBI NO: 15230137 NR Description: hypothetical protein [Arabidopsis thaliana]
  misc_feature (119)..(485): Homolog of NCBI NO: 15220004 NR Description: hypothetical protein [Arabidopsis thaliana]
  misc_feature (67)..(479): Homolog of NCBI NO: 15241663 NR Description: hypothetical protein [Arabidopsis thaliana]
  misc_feature (68)..(477): Homolog of NCBI NO: 34908302 NR Description: P0005H10.23 [Oryza sativa (japonica
  misc_feature (42)..(488): Homolog of NCBI NO: 15810309 NR Description: unknown protein [Arabidopsis thaliana]
  misc_feature (42)..(488): Homolog of NCBI NO: 15233845 NR Description: expressed protein [Arabidopsis thaliana]
  misc_feature (25)..(522): Homolog of NCBI NO: 12597851 NR Description: hypothetical protein [Arabidopsis thaliana]
  misc_feature (2)..(522): Homolog of NCBI NO: 26452131 NR Description: unknown protein [Arabidopsis thaliana]
  misc_feature (2)..(522): Homolog of NCBI NO: 30692580 NR Description: expressed protein [Arabidopsis thaliana]
MKALACCRRRPQDLSIDMDQEPDRVMTYNGLETCIINCSAYDDDSGISATTCGDGCVTADSLDDEVSSCFSKDASGSSFSSHCLSKQEEHSLDELGTPIAIHLLPFKAKKPITYTLSASDIENMKKKFAKLLLGYDTSGGARGVCAALALSNGIINLSATVFGELWKLEPLCEDKKIRWRKEMDWLMSPTTYIVELVPRKQSGADGCTFEIMTPKARSDVHVNLPALQKLDTMLIEVMDSMIDTEFWYEESGSRADGPVKITGPRKSKKWWLPSPRVPEQGLSRFQRKRLVFQAKLVHQILKAAKSINEQVLFHMPIPAAVMDALPKSGRASLGEDLYQAITTEYIPIEEIFVSLSLKTEHSVLETMNQLEGAMFAWNQRILEERSKRSPGRHSWSFMKDSSSELDKMSACIERVDTLVQLLKARYPNLPPTFIDVLKVQYNVDVGNAIVEAYSRVLVGVAFSILSRVAEILLEDDLVKRPNTPMASLKFDLSSDVYLAGITETPPGHVRRSLMDQISMVDGRFNAAVKKKGAKQLRW

SEQ ID NO: 111597 - DNA, 2272 bp, Zea mays subsp. mays
  misc_feature (1)..(2272): Ceres Seq. ID no. 13600163
gagctcactagtcccccccccccctaaatggcttacgcccgaggggcttattcttccttatcatggtatgatataattatcatacaaaaatgttacactgcttttacagggtgtacctcatctatttgcttgtacaattcatcttactactgctttgacaaacattggtctgcactgctttggtctgtgctttaggattctgtttcattgggagaaacaaatgcccttgcttacttttatttatgcttttctgaataattaagaagactagcctcatgttggaatcttcagcgttatatataatacaaaaaaagaggtttgcaatgaaaagttaaaaaggggacttttctccaatacaaggaatcatcttgacagaatataaaacttttcttctaaacatagcatacaatggttttagctgattattgtgtatttcagaagatggtgaattgtgtgaatacttccctagccctttttgctacatcgaggtcttcaggaggaaccttgcttttgacaccaggaatgttgtaagcattacagtatgcaattagttccttctttattaccatatatatgaacttaggtgttcctctactgaccaggcttcagaccaatctggagaagtgtcaggtcatacccatccagttatccatggtcaaacttgcctttgtacaggagattttcagctgtcagattgctcctttcccctgccactacttaggtgttcctctctcaatctacaagcctaaacacagtaaggattaaggagcagccgttgtatacttgtatataattgtggatagaattcccacttggatgggcaacatgctaaatttagctgggcgagctaccttggtgaaggtcacacactctgcaattccgatattcatctccattgacacctgtttgtcggtatgggccattgaacagattgatctgtcaccctactgagcttggtagggtatgccctcatattaaggtgggaatggcttcacataactgacccatatcgtacttggattgatcttctgagtctggcttgatggttcctcaattaagcatgtggctgatctgtgcaactgtgggtagataaattcattggatttttttttgctgaggttgctttttttgcatccgtgtctatgtcgacatagaggcatcattatggtgcatgataataaaaactatttgtaaacctttgttgtacatgcccagattggggaagactttacagtcgataactttactatatacccttctttgtcaaggctttgatgataagccaatggttaaaagggttgtcattgtaacccccacaagcttagttagcaactgggaatctgagataattaagtggttgaaaggcagagtgcaggtgctggccatctgtgaaagcacacgtgctgatgttctttccggaattgaaagtttcttaaaacccttgagccgtctccatgttttcttttgcttactaattatttgttaatatacactatactaaatgaaaatgtagctgcaagttaatgacaatttctgtggtgcatgaataatcttcaggtacttatcatatcttatgagactttccgcatgcattcttcatgcgcgcaccaagtgcgcgcagtgccataccgtggagcgaggtggcgcgcacaggcaggggcccaacctgcacggcctcttcggtcgtcagtcaggcaccaccctcggctaagcctactccacgaccaacaagaacatggtcatcgtctgggaggagggcaccctgtacgactacctcttcaaccccaagaagtacattctaggcacaaagatggtcttcccggggctcaagaagcccaaggagcgaaccgatctcatcgcctacttgacctatcgacgcaacaggggatactcacactgtcatccttagctctgtggcaataagtcgttcgtctgcaacacagccgacagaaaactgagcatgtgcttcagagaccaggcattattgaactttgctgccactaatttacattagatgaactgagttacagcagaatgaatttcctggatcctaaatgcagagaataaataaataaaaatatataanaggaaaaaaaaaaaaaaaaaaaaaaaaaaaaaaaaaaaaaaaaaaaaaaaaaaaaaaaaaaaaaaaaaaaaaaaaaaaaaaaaaaaaaaaaaaaaaaaaaaaaaaaaaaaaaaaaaacccccccggggggggccccgaaccccaatccccccaaaagggggcgaaaaaaaaacccccggcccccct

SEQ ID NO: 111598 - protein, 126 aa, Zea mays subsp. mays
  misc_feature (1)..(126): Ceres Seq. ID no. 13600164
  misc_feature (4)..(19): Homolog of NCBI NO: 9294624 NR Description: DNA repair protein RAD54-like [Arabidopsis
  misc_feature (4)..(19): Homolog of NCBI NO: 22331177 NR Description: DNA repair protein RAD54, putative [Arabidopsis
MNNLQVLIISYETFRMHSSCAHQVRAVPYRGARWRAQAGAQPARPLRSSVRHHPRLSLLHDQQEHGHRLGGGHPVRLPLQPQEVHSRHKDGLPGAQEAQGANRSHRLLDLSTQQGILTLSSLALWQ

SEQ ID NO: 111599 - protein, 111 aa, Zea mays subsp. mays
  misc_feature (1)..(111): Ceres Seq. ID no. 13600165
MHSSCAHQVRAVPYRGARWRAQAGAQPARPLRSSVRHHPRLSLLHDQQEHGHRLGGGHPVRLPLQPQEVHSRHKDGLPGAQEAQGANRSHRLLDLSTQQGILTLSSLALWQ

SEQ ID NO: 111600 - protein, 104 aa, Zea mays subsp. mays; identical to SEQ ID NO: 1322
  misc_feature (1)..(104): Ceres Seq. ID no. 13600166
  misc_feature (16)..(96): Pfam Name: SNF2 family N-terminal domain Pfam Description: SNF2 family N-terminal domain
  misc_feature (16)..(88): Homolog of NCBI NO: 26326753 NR Description: unnamed protein product [Mus musculus]
  misc_feature (16)..(88): Homolog of NCBI NO: 26353994 NR Description: unnamed protein product [Mus musculus]
  misc_feature (16)..(88): Homolog of NCBI NO: 28277973 NR Description: Similar to RAD54-like (S. cerevisiae) [Danio
  misc_feature (16)..(87): Homolog of NCBI NO: 23612971 NR Description: DNA repair protein rad54, putative [Plasmodium
  misc_feature (16)..(87): Homolog of NCBI NO: 23482686 NR Description: DNA repair protein RAD54-like-related [Plasmodium
  misc_feature (16)..(94): Homolog of NCBI NO: 27819922 NR Description: LD35220p [Drosophila melanogaster]
  misc_feature (16)..(94): Homolog of NCBI NO: 1765914 NR Description: RAD54 [Drosophila melanogaster]
  misc_feature (16)..(94): Homolog of NCBI NO: 3329473 NR Description: RAD54 DNA repair protein [Drosophila melanogaster]
  misc_feature (16)..(96): Homolog of NCBI NO: 9294624 NR Description: DNA repair protein RAD54-like [Arabidopsis
  misc_feature (16)..(96): Homolog of NCBI NO: 22331177 NR Description: DNA repair protein RAD54, putative [Arabidopsis

SEQ ID NO: 111601 - DNA, 1985 bp, Zea mays subsp. mays
  misc_feature (1)..(1985): Ceres Seq. ID no. 15224673
ctagtccccccccccccccattaaaccctaaccctaaaataacggtttgttttgctctctcggtttccatgggtgtggctgagaccaagtctctcagtggccgaaaccctagatttagtgttagttaaaccctaacccgagagatctaaaattcttaaatctggtttgtttatttttctgcatctgaaccactgcagggagttcaggagttttgtgtctagattcttaaatctgaataaacaagttgaatatattaactgcaatgaaaacatatagatgtcatctgccacctatctccacgcacagtctggctcgacatcacctgcccttctcgtgatatctgattactgttttgctagtgctagctatcgatgctgttcggggattagtagtgttctatttcatcctcttaatgtgttcgcatcagatagatatatgttcatatgatttaaggatatcctgtcagcagcttacacatttgtctatctccatgcttcctttctttagttggagactggattattttttgttgggataaacttagtacattatcagagcatcttaactctggatatgggtgcctttaagggatatccaataaacaaaatttgaacacatttggtttgtcgtataggtacaaagccagcacatgcttgggcaggtttgatcagtttcactaggaactgttcactaattgactgtctcagtaatacaattgaatagcctgcaactcagttagccatgactttcttcgtcatagtttctttagctgaattattttgcacatattacatggatgtgcactacccatgttgttcaatatcccacatcaatatcgaattgagtatgatgactgatgacaactaccagttattgtttcttgaattggcaacaacttggtctgtgagtcattcccactttgcccctacccttgctgagtagtgtcattcttttaggcataccttatagatgaatgattttttacattactgccttccccagtccccatcccaccccatttttttgtatcttagaaaatgtgacttggacaataagatgttgcttgagttacttacatttcttaaaagtattgattagtcttgcatctggatgcaggagctctgcagtaaaggaagtgtgtagtcaccatggtccatttcaagaataggtacatggtggtggagatctttatagatgcaggtagaggtgaacaggaccctgtaatcctcacccaatttaatataacaaaagttataaaagacagcattcagctcaactttggagagtgtggcctagctggatctcttggatcattgcaagttaagtatgttaatcctgtaacgaagctctgcatcgtccgcttgtctcgcgaagaccaccaaaaagtttgggctgctatgacgatggtgcggtgcattgggaagatccccgtttcgttcaacttgctcgacatgagtggaagcatcagggcttgcaagaaagctgcactggagtgcgatgaagcgaaatttgagcaatacaagctggctgcaggtgattgtatcacggcagagatcatccagtctgtagagaagtgctttgagaagatcagaggactagagagctaagcagaagaattgacatcacgtccacccaccctcggatcctaaaacctgctgaccctgcaccgcatccgtgatcacgtcacaccacaagctgtgtgtcctggctccagcgcccaccacggcaacggcctctcgccacttgctgccagcagcctccgtgcctccatcagctctcctttccaaggaaaagtctgaagtctgcaaccaaacaagtgttctgcagctgctctttgccgttggttgaagtctgcaaccaaacaaatgttatgcagctgctctttgccgttggttggagttctcggctccacactttcagaaagaattcatgtatacataaaatttattatatagagagtttgcttcgtatattagtaatttttt

SEQ ID NO: 111602 - protein, 152 aa, Zea mays subsp. mays; identical to SEQ ID NO: 111555
  misc_feature (1)..(152): Ceres Seq. ID no. 15224674
  misc_feature (7)..(94): Pfam Name: Rpp14 family Pfam Description: Rpp14 family
  misc_feature (1)..(115): Homolog of NCBI NO: 20270249 NR Description: RNase MRP/RNase P protein-like isoform a [Homo
  misc_feature (1)..(126): Homolog of NCBI NO: 19075979 NR Description: putative pre-tRNA/pre-rRNA processing protein
  misc_feature (1)..(94): Homolog of NCBI NO: 3122357 NR Description: Probable lipoate-protein ligase (Lipoate
  misc_feature (1)..(152): Homolog of NCBI NO: 22329330 NR Description: Probable lipoate-protein ligase B -related
  misc_feature (6)..(152): Homolog of NCBI NO: 38568007 NR Description: OSJNBb0068N06.26 [Oryza sativa (japonica
  misc_feature (1)..(152): Homolog of NCBI NO: 38343977 NR Description: OSJNBa0041M21.1 [Oryza sativa (japonica

SEQ ID NO: 111603 - protein, 144 aa, Zea mays subsp. mays; identical to SEQ ID NO: 111556
  misc_feature (1)..(144): Ceres Seq. ID no. 15224675
  misc_feature (1)..(86): Pfam Name: Rpp14 family Pfam Description: Rpp14 family
  misc_feature (1)..(107): Homolog of NCBI NO: 20270249 NR Description: RNase MRP/RNase P protein-like isoform a [Homo
  misc_feature (1)..(118): Homolog of NCBI NO: 19075979 NR Description: putative pre-tRNA/pre-rRNA processing protein
  misc_feature (1)..(86): Homolog of NCBI NO: 3122357 NR Description: Probable lipoate-protein ligase (Lipoate
  misc_feature (1)..(144): Homolog of NCBI NO: 22329330 NR Description: Probable lipoate-protein ligase B -related
  misc_feature (1)..(144): Homolog of NCBI NO: 38568007 NR Description: OSJNBb0068N06.26 [Oryza sativa (japonica
  misc_feature (1)..(144): Homolog of NCBI NO: 38343977 NR Description: OSJNBa0041M21.1 [Oryza sativa (japonica

SEQ ID NO: 111604 - DNA, 616 bp, Zea mays subsp. mays
  misc_feature (1)..(616): Ceres Seq. ID no. 14302176
actgagaagaaggagagctcagaaaccaaagaagctcggaagagcacgcagagtccagaaggcggcggcaaaggcgacgagggtccagacagcaaggcggagggcgagaaggaagcggccgttgttgaccttaggccactgacgatggaagacctgaggcaggcaaagaaccaggttgcagcgagcttcgccgccgagggtgccgtgatgaacgagctcaggcagtggaacgacctgtacggcgaaggggggtccaggaagaaacagcagctgacctacttcttgtagaggtgaagcatttggcaggtggtggagaggaacagagctgggcagacggtggacccatacttgatgaaccgagcatggtttcttcaagacgtgacgtgggcatgacgcatagtactagtctttgaggttccaggatccatgagatgagatgaggtcgatggtcaatttgtaggatcatgaactattattcttttacatgcatttgtacatgagcgctagactggttatgtatatctggattgattgaacagctcttgtgtttgagggtcattttagcttctcgtagactgctgtaattatatcatatatagtgagtatatatattcac

SEQ ID NO: 111605 - protein, 95 aa, Zea mays subsp. mays
  misc_feature (1)..(95): Ceres Seq. ID no. 14302177
  misc_feature (43)..(95): Homolog of NCBI NO: 20259341 NR Description: unknown protein [Arabidopsis thaliana]
  misc_feature (43)..(95): Homolog of NCBI NO: 30678418 NR Description: expressed protein [Arabidopsis thaliana]
  misc_feature (43)..(95): Homolog of NCBI NO: 25518408 NR Description: hypothetical protein F22D16.11 - Arabidopsis
  misc_feature (43)..(95): Homolog of NCBI NO: 7487016 NR Description: hypothetical protein T14P8.7 - Arabidopsis
  misc_feature (13)..(95): Homolog of NCBI NO: 25404926 NR Description: protein F22C12.12 [imported] - Arabidopsis
  misc_feature (5)..(95): Homolog of NCBI NO: 30696968 NR Description: expressed protein [Arabidopsis thaliana]
  misc_feature (5)..(95): Homolog of NCBI NO: 18407974 NR Description: expressed protein [Arabidopsis thaliana]
  misc_feature (5)..(95): Homolog of NCBI NO: 34912822 NR Description: P0501G01.20 [Oryza sativa (japonica
  misc_feature (1)..(95): Homolog of NCBI NO: 34904204 NR Description: P0492F05.26 [Oryza sativa (japonica
  misc_feature (3)..(95): Homolog of NCBI NO: 15234347 NR Description: hypothetical protein [Arabidopsis thaliana]
TEKKESSETKEARKSTQSPEGGGKGDEGPDSKAEGEKEAAVVDLRPLTMEDLRQAKNQVAASFAAEGAVMNELRQWNDLYGEGGSRKKQQLTYFL

SEQ ID NO: 111606 - protein, 47 aa, Zea mays subsp. mays
  misc_feature (1)..(47): Ceres Seq. ID no. 14302178
  misc_feature (1)..(47): Homolog of NCBI NO: 20259341 NR Description: unknown protein [Arabidopsis thaliana]
  misc_feature (1)..(47): Homolog of NCBI NO: 30678418 NR Description: expressed protein [Arabidopsis thaliana]
  misc_feature (1)..(47): Homolog of NCBI NO: 25518408 NR Description: hypothetical protein F22D16.11 - Arabidopsis
  misc_feature (1)..(47): Homolog of NCBI NO: 7487016 NR Description: hypothetical protein T14P8.7 - Arabidopsis
  misc_feature (1)..(47): Homolog of NCBI NO: 25404926 NR Description: protein F22C12.12 [imported] - Arabidopsis
  misc_feature (1)..(47): Homolog of NCBI NO: 30696968 NR Description: expressed protein [Arabidopsis thaliana]
  misc_feature (1)..(47): Homolog of NCBI NO: 18407974 NR Description: expressed protein [Arabidopsis thaliana]
  misc_feature (1)..(47): Homolog of NCBI NO: 34912822 NR Description: P0501G01.20 [Oryza sativa (japonica
  misc_feature (1)..(47): Homolog of NCBI NO: 34904204 NR Description: P0492F05.26 [Oryza sativa (japonica
  misc_feature (1)..(47): Homolog of NCBI NO: 15234347 NR Description: hypothetical protein [Arabidopsis thaliana]
MEDLRQAKNQVAASFAAEGAVMNELRQWNDLYGEGGSRKKQQLTYFL

SEQ ID NO: 111607 - DNA, 627 bp, Zea mays subsp. mays
  misc_feature (1)..(627): Ceres Seq. ID no. 13599941
tctatagagcccatcctctgcttcgcataacctagcggcaccagcagctaaccgtccagagaacagaacagagatgaccaccagcgtccccgtccctctggcctcacagtcgcaggcgccgcagcgcaagccacggacctacaccccgagcccatggggtgacttcttcctccaccacaccccatgcactccgtcacagctcttgtcgatgaaggagagggcaaaggtcaaggagcaacaggtgaggcagatcatacaggaaacaatggcctcctccaacctgcttcgcaagttggagcttgtggacacgctgcagcgtctcggggtggactaccgctacaacgaggagatcgaccagttgcttcgctctgtatacgacgacgacgacagggacggaggcggctccgacgatctctacctcacctcgctgcggttgtacttgctcaggaagcatgggtatacaacctcttcagatgtgttcgagaaattcagggacgagcgcgggagcgtctcgagcgacgatgccggctgcttgctcatgctgtatgacgctgctcatacgagaactcnnnnggaggagattcttgacgacatcatcgcttgggagcagagccgcctgcaatccct

SEQ ID NO: 111608 - protein, 184 aa, Zea mays subsp. mays
  misc_feature (1)..(184): Ceres Seq. ID no. 13599942
  misc_feature (28)..(183): Pfam Name: Terpene synthase, N-terminal domain Pfam Description: Terpene synthase, N-terminal domain
  misc_feature (1)..(183): Homolog of NCBI NO: 9864189 NR Description: terpene synthase [Citrus junos]
  misc_feature (1)..(182): Homolog of NCBI NO: 3287834 NR Description: (+)-delta-cadinene synthase isozyme XC14
  misc_feature (1)..(182): Homolog of NCBI NO: 3287824 NR Description: (+)-delta-cadinene synthase isozyme XC1
  misc_feature (1)..(182): Homolog of NCBI NO: 3287832 NR Description: (+)-delta-cadinene synthase (D-cadinene synthase)
  misc_feature (8)..(182): Homolog of NCBI NO: 5802576 NR Description: (+)-delta-cadinene sythase [Gossypium arboreum]
  misc_feature (8)..(182): Homolog of NCBI NO: 30519654 NR Description: (+)-delta-cadinene synthase [Gossypium arboreum]
  misc_feature (8)..(182): Homolog of NCBI NO: 3287826 NR Description: (+)-delta-cadinene synthase isozyme C2
  misc_feature (1)..(182): Homolog of NCBI NO: 8389329 NR Description: (+)-delta-cadinene synthase [Gossypium hirsutum]
  misc_feature (1)..(183): Homolog of NCBI NO: 34894946 NR Description: putative sesquiterpene cyclase 1
  misc_feature (19)..(183): Homolog of NCBI NO: 38636781 NR Description: putative sesquiterpene cyclase 1
MTTSVPVPLASQSQAPQRKPRTYTPSPWGDFFLHHTPCTPSQLLSMKERAKVKEQQVRQIIQETMASSNLLRKLELVDTLQRLGVDYRYNEEIDQLLRSVYDDDDRDGGGSDDLYLTSLRLYLLRKHGYTTSSDVFEKFRDERGSVSSDDAGCLLMLYDAAHTRTXXEEILDDIIAWEQSRLQS

SEQ ID NO: 111609 - protein, 139 aa, Zea mays subsp. mays
  misc_feature (1)..(139): Ceres Seq. ID no. 13599943
  misc_feature (1)..(138): Pfam Name: Terpene synthase, N-terminal domain Pfam Description: Terpene synthase, N-terminal domain
  misc_feature (1)..(138): Homolog of NCBI NO: 38636781 NR Description: putative sesquiterpene cyclase 1
  misc_feature (1)..(138): Homolog of NCBI NO: 9864189 NR Description: terpene synthase [Citrus junos]
  misc_feature (1)..(137): Homolog of NCBI NO: 3287834 NR Description: (+)-delta-cadinene synthase isozyme XC14
  misc_feature (1)..(137): Homolog of NCBI NO: 3287824 NR Description: (+)-delta-cadinene synthase isozyme XC1
  misc_feature (1)..(137): Homolog of NCBI NO: 3287832 NR Description: (+)-delta-cadinene synthase (D-cadinene synthase)
  misc_feature (1)..(137): Homolog of NCBI NO: 5802576 NR Description: (+)-delta-cadinene sythase [Gossypium arboreum]
  misc_feature (1)..(137): Homolog of NCBI NO: 30519654 NR Description: (+)-delta-cadinene synthase [Gossypium arboreum]
  misc_feature (1)..(137): Homolog of NCBI NO: 3287826 NR Description: (+)-delta-cadinene synthase isozyme C2
  misc_feature (1)..(137): Homolog of NCBI NO: 8389329 NR Description: (+)-delta-cadinene synthase [Gossypium hirsutum]
  misc_feature (1)..(138): Homolog of NCBI NO: 34894946 NR Description: putative sesquiterpene cyclase 1
MKERAKVKEQQVRQIIQETMASSNLLRKLELVDTLQRLGVDYRYNEEIDQLLRSVYDDDDRDGGGSDDLYLTSLRLYLLRKHGYTTSSDVFEKFRDERGSVSSDDAGCLLMLYDAAHTRTXXEEILDDIIAWEQSRLQS

SEQ ID NO: 111610 - protein, 121 aa, Zea mays subsp. mays
  misc_feature (1)..(121): Ceres Seq. ID no. 13599944
MHSVTALVDEGEGKGQGATGEADHTGNNGLLQPASQVGACGHAAASRGGLPLQRGDRPVASLCIRRRRQGRRRLRRSLPHLAAVVLAQEAWVYNLFRCVREIQGRARERLERRCRLLAHAV

SEQ ID NO: 111611 - DNA, 2219 bp, Zea mays subsp. mays
  misc_feature (1)..(2219): Ceres Seq. ID no. 13600220
gcaagactcaatacacaagcagagctcaaacaattcttgcttcccgctagctagctcgcaagaaataatggctccacttcttcttgcttctcgcacagcctgtcatcctggccttacaagcagccgccatgataatggccggcacggcctttcttcttcaccgggaagtagtagtaagcgaagccgtagccttagcttcataccacgagctgaaaagacgacgacaggcggtgagggtcatgttgtgagcgaaaagctgagcccctggcaaatccccaggagggagtggttcccccctagctttatctttggtgccgccacttcagcataccaaattgaaggcgcttggaacgaaggtggcaaggggccaagcacttgggacgatttctgccacaaatatccggagtggatagcggacgggagcagtggggatgttggagcgaactcctactacctgtatagagaggatgtcagattgctgaaggagatgggtatggacgcctacaggttctctatcgcttggtccagaatactgccaaaggggacgctcgagggaggcattaaccataaaggcatcgagtactacaaaaggctcatcaacttgttgaaagagaacggcatagaaccatatgtaacacttttccactgggacacacctcaagcgctggtggacagctacggtggcttcttagatgacaggattgtaaaagattacacggactttgccaaggtgtgctttgtgcacttcggcgacgtcgtgaagaactggttcaccttcaacgagccacagacgttctcctctttttcctacggaaccgggatctttgccccggggcggtgctccccaggacaaaaatgcgctaacccaaccgggaactcgctaaccgagccttacattgttgcccacaaccttctccgagctcatgctgagactgtccatgagtacaacaagcattacagaggtaacaaggacgcacagatagggattgcgttcgatgtgatgggccgtgtgccatatgacaatatgtttctggacgaccaggcccaagaaaggtccatcgattataacctaggatggttcatggagccggtagttcgcggcgactaccctttctccatgagatcattgatcaaggatcggctaccctacttcaccgacgacgagaaagagaagttagtgggttcgtatgacataatggggataaactactacacctcaaggttttccaagcacatcgacatctcgccaaagtactcgccagtgctcaacaccgacgatgcctatgccgcccaagagacgaaaggacctgacgggaatactattggtccatctatggggaatccgtggatttacatgtaccctaacggcctaaaggatatccttatgttcatgaagaacaaatacggaaacccaccggtctacatcactgagaatggaatcggggatgttgacaccaaagataaacctctacccataaaagacgcgttgaatgaccacgtgaggctagattacctccagcgccacatttcagttctcaaagacgcaatagacctgggggcggacgtgcgtggccacttcacctggtctctgctggacaacttcgagtggtcggccggttacacggagcggtacggcatcgtctacgtggaccgtggcaacggctgcaagcgccgcatgaagcgctcagccaaatggttgaagaaattcaaccgagccgcgcatacgaagaagaaagatatgacgggcattattccgccgtcagcttattagaacagtgcagctagctagctgccatatgcatatgttttaagatacagatatggtgtgtgtgtggtaagtatggtgcatgtatgttgtttgtaaaataaattaacccacatgatgttgtggaaagtaaaattaaaatactcaatggatcggagacatatagccaaaaaaaaaaaaaaaaaaaaaaaaaaaaaaaaaaaaaaaaaaaaaaaaaaaaaaaaaaaaaaaaaaaaaaaaaaaaaaaaaaaagaaaaaaaaaaaaaaaaaaattctgggggggggcccgggacccatttccccctaatggggggccatttaaaattcccgggcccgccttttaaaaccgcgggaaggggaaaaccctggggttacccaatttaatccccttggaaaaaatccccctttccccagttggggaaaaaagaaaaaggcccccccccattccccttcc

SEQ ID NO: 111612 - protein, 589 aa, Zea mays subsp. mays
  misc_feature (1)..(589): Ceres Seq. ID no. 15218920
  misc_feature (23)..(582): Homolog of NCBI NO: 4106413 NR Description: beta-D-glucosidase beta subunit precursor [Avena
  misc_feature (23)..(573): Homolog of NCBI NO: 13924741 NR Description: cyanogenic beta-glucosidase dhurrinase-2 [Sorghum
  misc_feature (84)..(581): Homolog of NCBI NO: 29726257 NR Description: Chain A, Crystal Strucure Of The Inactive Double Of The Maize Beta-Glucosidase Zmglu1-E191d-F198v In Complex With
  misc_feature (84)..(581): Homolog of NCBI NO: 12084533 NR Description: Chain A, Crystal Structure Of The Inactive Mutant
  misc_feature (84)..(581): Homolog of NCBI NO: 28373358 NR Description: Chain A, Crystal Structure Of The Maize Zm-P60.1
  misc_feature (84)..(581): Homolog of NCBI NO: 13399866 NR Description: Chain A, Crystal Structure Of A Monocot (Maize
  misc_feature (23)..(581): Homolog of NCBI NO: 1352081 NR Description: BETA-GLUCOSIDASE, CHLOROPLAST PRECURSOR
  misc_feature (23)..(581): Homolog of NCBI NO: 626042 NR Description: beta-glucosidase, root meristem (EC 3.2.1.-)
  misc_feature (26)..(589): Homolog of NCBI NO: 7435456 NR Description: probable beta-glucosidase (EC 3.2.1.-) - sorghum
  misc_feature (23)..(581): Homolog of NCBI NO: 7489718 NR Description: beta-D-glucosidase (EC 3.2.1.-) glu2 precursor -
QDSIHKQSSNNSCFPLASSQEIMAPLLLASRTACHPGLTSSRHDNGRHGLSSSPGSSSKRSRSLSFIPRAEKTTTGGEGHVVSEKLSPWQIPRREWFPPSFIFGAATSAYQIEGAWNEGGKGPSTWDDFCHKYPEWIADGSSGDVGANSYYLYREDVRLLKEMGMDAYRFSIAWSRILPKGTLEGGINHKGIEYYKRLINLLKENGIEPYVTLFHWDTPQALVDSYGGFLDDRIVKDYTDFAKVCFVHFGDVVKNWFTFNEPQTFSSFSYGTGIFAPGRCSPGQKCANPTGNSLTEPYIVAHNLLRAHAETVHEYNKHYRGNKDAQIGIAFDVMGRVPYDNMFLDDQAQERSIDYNLGWFMEPVVRGDYPFSMRSLIKDRLPYFTDDEKEKLVGSYDIMGINYYTSRFSKHIDISPKYSPVLNTDDAYAAQETKGPDGNTIGPSMGNPWIYMYPNGLKDILMFMKNKYGNPPVYITENGIGDVDTKDKPLPIKDALNDHVRLDYLQRHISVLKDAIDLGADVRGHFTWSLLDNFEWSAGYTERYGIVYVDRGNGCKRRMKRSAKWLKKFNRAAHTKKKDMTGIIPPSAY

SEQ ID NO: 111613 - protein, 567 aa, Zea mays subsp. mays
  misc_feature (1)..(567): Ceres Seq. ID no. 15218921
  misc_feature (1)..(560): Homolog of NCBI NO: 4106413 NR Description: beta-D-glucosidase beta subunit precursor [Avena
  misc_feature (1)..(551): Homolog of NCBI NO: 13924741 NR Description: cyanogenic beta-glucosidase dhurrinase-2 [Sorghum
  misc_feature (62)..(559): Homolog of NCBI NO: 29726257 NR Description: Chain A, Crystal Strucure Of The Inactive Double Of The Maize Beta-Glucosidase Zmglu1-E191d-F198v In Complex With
  misc_feature (62)..(559): Homolog of NCBI NO: 12084533 NR Description: Chain A, Crystal Structure Of The Inactive Mutant
  misc_feature (62)..(559): Homolog of NCBI NO: 28373358 NR Description: Chain A, Crystal Structure Of The Maize Zm-P60.1
  misc_feature (62)..(559): Homolog of NCBI NO: 13399866 NR Description: Chain A, Crystal Structure Of A Monocot (Maize
  misc_feature (1)..(559): Homolog of NCBI NO: 1352081 NR Description: BETA-GLUCOSIDASE, CHLOROPLAST PRECURSOR
  misc_feature (1)..(559): Homolog of NCBI NO: 626042 NR Description: beta-glucosidase, root meristem (EC 3.2.1.-)
  misc_feature (4)..(567): Homolog of NCBI NO: 7435456 NR Description: probable beta-glucosidase (EC 3.2.1.-) - sorghum
  misc_feature (1)..(559): Homolog of NCBI NO: 7489718 NR Description: beta-D-glucosidase (EC 3.2.1.-) glu2 precursor -
MAPLLLASRTACHPGLTSSRHDNGRHGLSSSPGSSSKRSRSLSFIPRAEKTTTGGEGHVVSEKLSPWQIPRREWFPPSFIFGAATSAYQIEGAWNEGGKGPSTWDDFCHKYPEWIADGSSGDVGANSYYLYREDVRLLKEMGMDAYRFSIAWSRILPKGTLEGGINHKGIEYYKRLINLLKENGIEPYVTLFHWDTPQALVDSYGGFLDDRIVKDYTDFAKVCFVHFGDVVKNWFTFNEPQTFSSFSYGTGIFAPGRCSPGQKCANPTGNSLTEPYIVAHNLLRAHAETVHEYNKHYRGNKDAQIGIAFDVMGRVPYDNMFLDDQAQERSIDYNLGWFMEPVVRGDYPFSMRSLIKDRLPYFTDDEKEKLVGSYDIMGINYYTSRFSKHIDISPKYSPVLNTDDAYAAQETKGPDGNTIGPSMGNPWIYMYPNGLKDILMFMKNKYGNPPVYITENGIGDVDTKDKPLPIKDALNDHVRLDYLQRHISVLKDAIDLGADVRGHFTWSLLDNFEWSAGYTERYGIVYVDRGNGCKRRMKRSAKWLKKFNRAAHTKKKDMTGIIPPSAY

SEQ ID NO: 111614 - protein, 427 aa, Zea mays subsp. mays
  misc_feature (1)..(427): Ceres Seq. ID no. 15218922
  misc_feature (1)..(420): Homolog of NCBI NO: 4106413 NR Description: beta-D-glucosidase beta subunit precursor [Avena
  misc_feature (1)..(411): Homolog of NCBI NO: 13924741 NR Description: cyanogenic beta-glucosidase dhurrinase-2 [Sorghum
  misc_feature (1)..(419): Homolog of NCBI NO: 29726257 NR Description: Chain A, Crystal Strucure Of The Inactive Double Of The Maize Beta-Glucosidase Zmglu1-E191d-F198v In Complex With
  misc_feature (1)..(419): Homolog of NCBI NO: 12084533 NR Description: Chain A, Crystal Structure Of The Inactive Mutant
  misc_feature (1)..(419): Homolog of NCBI NO: 28373358 NR Description: Chain A, Crystal Structure Of The Maize Zm-P60.1
  misc_feature (1)..(419): Homolog of NCBI NO: 13399866 NR Description: Chain A, Crystal Structure Of A Monocot (Maize
  misc_feature (1)..(419): Homolog of NCBI NO: 1352081 NR Description: BETA-GLUCOSIDASE, CHLOROPLAST PRECURSOR
  misc_feature (1)..(419): Homolog of NCBI NO: 626042 NR Description: beta-glucosidase, root meristem (EC 3.2.1.-)
  misc_feature (1)..(427): Homolog of NCBI NO: 7435456 NR Description: probable beta-glucosidase (EC 3.2.1.-) - sorghum
  misc_feature (1)..(419): Homolog of NCBI NO: 7489718 NR Description: beta-D-glucosidase (EC 3.2.1.-) glu2 precursor -
MGMDAYRFSIAWSRILPKGTLEGGINHKGIEYYKRLINLLKENGIEPYVTLFHWDTPQALVDSYGGFLDDRIVKDYTDFAKVCFVHFGDVVKNWFTFNEPQTFSSFSYGTGIFAPGRCSPGQKCANPTGNSLTEPYIVAHNLLRAHAETVHEYNKHYRGNKDAQIGIAFDVMGRVPYDNMFLDDQAQERSIDYNLGWFMEPVVRGDYPFSMRSLIKDRLPYFTDDEKEKLVGSYDIMGINYYTSRFSKHIDISPKYSPVLNTDDAYAAQETKGPDGNTIGPSMGNPWIYMYPNGLKDILMFMKNKYGNPPVYITENGIGDVDTKDKPLPIKDALNDHVRLDYLQRHISVLKDAIDLGADVRGHFTWSLLDNFEWSAGYTERYGIVYVDRGNGCKRRMKRSAKWLKKFNRAAHTKKKDMTGIIPPSAY

SEQ ID NO: 111615 - DNA, 1995 bp, Zea mays subsp. mays
  misc_feature (1)..(1995): Ceres Seq. ID no. 13599965
tattggggccaaagtcgctgccctgccgagtctcgactctccacctcagccctcagggccgccggctccttcctcccctctcctccgcctcgacaagcgtcggcgagatggtgaagaggagcaagaagagcaagagcaagcgagtcacgctgcggcagaagcacaaggtgcagcgcaaggtgaaggagcaccaccgcaagaagcgcaaggaagccaagaaggccggcaaggccggccagcggaggaaggtcgagaaggaccccgggatccccaacgagtggcccttcaaggagcaggagctcaaggcgctcgaggcccgacgcgcgcaggcgctccaggagctcgagctcaagaagcaggcgcgcaaggagagggctcagaagaggaaggcaggattgcttgaggacgaggacattgctagtttggcatctgcagcttccgcacagggcagtgagtttgcagcaaaggagaatgctcctttattagtggcaaagatcaacgatcattcagagaggtctttctacaaggagcttgttaaagtaattgaagcttccgatgtgattatggaggttcttgatgcaagggatccgctgggcacccgttgcattgacatggaaaagatggttaggaaggctgatccaagtaaacggattgtactacttctcaacaagatagatcttgttcccaaggaggcggtagagaaatggcttacatatctaagagaagaattgccaacagttgcttttaagtgcaatacccaggagcagaggaccaagctgggatggaaatcttcaaaattagataaaacaagcaacatcccacaaagcagtgattgtcttggtgccgagaatctaatcaaattgcttaagaattattccagaagccatgagctcaaactggcaattacggtgggtattgttggacttcctaatgttggcaagagcagtctgatcaacagcctgaagaggtcccgagtggtcaatgtcggttctactccagggattactagatcaatgcaagaagttcaattagacaagaaggtaaagttgttggattgtcctggtgttgttatgctcaaatcttccaacagtggtgtgtctgtagcccttcgaaactgcaaaagggttgagaaaatagaagatccagtcgctcctgttaaggagatcctaagtatttgcccacatgagaagttgctgtctctgtacaaggttccaaactttggttcagttgatgattttcttcagaaagtagcaactgtacgtgggaaattgaaaaagggtggtgtagtggatgttgaagctgcagcgagaattgtgcttcatgactggaatgaaggtaaaataccatattttacactgccgcctaaaagagatgctggggaagactcagatgcagtgattatatccgaggatgggaaagaatttaatatcgatgagatttacaaagctgaatcttcatatattggtggtttgaagtccattgaggagttccatcatattgagattcctcctaatgctccactggcgatcgatgaagagatgctagaggatggtggcaagaaaccaagcgaagccatccaggaaagccgggacagggaggagcaaatgcccgacgtgaaggactcaggaggaagcaaggcagccagcgccagcacgcagaacgacaagttgtacaccgccgacgccatactcgaccctcacaagaggaaagcagagaagaaacggcgcaaggcgagcaggcccagcgcgctgaacgacatggacgcggactacgatttcaaggtggattatcggatggaggacggtgggagcgagggtgcacatgcggatgatgaagatggcggagatggatccgaggataatgaaccaatgaccggtgtcgatgatgcgtgaattgtcatgtcgagtgccactttgccagaaatgatttgtcccaatgggggttgggaaattaacccacgacagtttggtaattagtttgtttctgtttaaacac

SEQ ID NO: 111616 - protein, 629 aa, Zea mays subsp. mays
  misc_feature (1)..(629): Ceres Seq. ID no. 13599966
  misc_feature (50)..(526): Homolog of NCBI NO: 9506611 NR Description: hypothetical protein FLJ10613 [Homo sapiens]
  misc_feature (30)..(488): Homolog of NCBI NO: 31209693 NR Description: ENSANGP00000012225 [Anopheles gambiae]
  misc_feature (65)..(481): Homolog of NCBI NO: 33468623 NR Description: SI:zK13A21.8 (novel protein similar to human
  misc_feature (37)..(599): Homolog of NCBI NO: 24647590 NR Description: CG3983-PB [Drosophila melanogaster]
  misc_feature (37)..(599): Homolog of NCBI NO: 21428328 NR Description: AT23067p [Drosophila melanogaster]
  misc_feature (36)..(585): Homolog of NCBI NO: 17534827 NR Description: GTPase of MMR1/HSR1 type (62.3 kD)
  misc_feature (36)..(585): Homolog of NCBI NO: 39587211 NR Description: Hypothetical protein CBG00673 [Caenorhabditis
  misc_feature (76)..(574): Homolog of NCBI NO: 15451214 NR Description: putative GTPase [Arabidopsis thaliana]
  misc_feature (36)..(609): Homolog of NCBI NO: 15231373 NR Description: GTPase -related [Arabidopsis thaliana]
  misc_feature (36)..(629): Homolog of NCBI NO: 34914820 NR Description: putative GTPase [Oryza sativa (japonica
LGPKSLPCRVSTLHLSPQGRRLLPPLSSASTSVGEMVKRSKKSKSKRVTLRQKHKVQRKVKEHHRKKRKEAKKAGKAGQRRKVEKDPGIPNEWPFKEQELKALEARRAQALQELELKKQARKERAQKRKAGLLEDEDIASLASAASAQGSEFAAKENAPLLVAKINDHSERSFYKELVKVIEASDVIMEVLDARDPLGTRCIDMEKMVRKADPSKRIVLLLNKIDLVPKEAVEKWLTYLREELPTVAFKCNTQEQRTKLGWKSSKLDKTSNIPQSSDCLGAENLIKLLKNYSRSHELKLAITVGIVGLPNVGKSSLINSLKRSRVVNVGSTPGITRSMQEVQLDKKVKLLDCPGVVMLKSSNSGVSVALRNCKRVEKIEDPVAPVKEILSICPHEKLLSLYKVPNFGSVDDFLQKVATVRGKLKKGGVVDVEAAARIVLHDWNEGKIPYFTLPPKRDAGEDSDAVIISEDGKEFNIDEIYKAESSYIGGLKSIEEFHHIEIPPNAPLAIDEEMLEDGGKKPSEAIQESRDREEQMPDVKDSGGSKAASASTQNDKLYTADAILDPHKRKAEKKRRKASRPSALNDMDADYDFKVDYRMEDGGSEGAHADDEDGGDGSEDNEPMTGVDDA

SEQ ID NO: 111617 - protein, 594 aa, Zea mays subsp. mays
  misc_feature (1)..(594): Ceres Seq. ID no. 13599967
  misc_feature (15)..(491): Homolog of NCBI NO: 9506611 NR Description: hypothetical protein FLJ10613 [Homo sapiens]
  misc_feature (1)..(453): Homolog of NCBI NO: 31209693 NR Description: ENSANGP00000012225 [Anopheles gambiae]
  misc_feature (30)..(446): Homolog of NCBI NO: 33468623 NR Description: SI:zK13A21.8 (novel protein similar to human
  misc_feature (2)..(564): Homolog of NCBI NO: 24647590 NR Description: CG3983-PB [Drosophila melanogaster]
  misc_feature (2)..(564): Homolog of NCBI NO: 21428328 NR Description: AT23067p [Drosophila melanogaster]
  misc_feature (1)..(550): Homolog of NCBI NO: 17534827 NR Description: GTPase of MMR1/HSR1 type (62.3 kD)
  misc_feature (1)..(550): Homolog of NCBI NO: 39587211 NR Description: Hypothetical protein CBG00673 [Caenorhabditis
  misc_feature (41)..(539): Homolog of NCBI NO: 15451214 NR Description: putative GTPase [Arabidopsis thaliana]
  misc_feature (1)..(574): Homolog of NCBI NO: 15231373 NR Description: GTPase -related [Arabidopsis thaliana]
  misc_feature (1)..(594): Homolog of NCBI NO: 34914820 NR Description: putative GTPase [Oryza sativa (japonica
MVKRSKKSKSKRVTLRQKHKVQRKVKEHHRKKRKEAKKAGKAGQRRKVEKDPGIPNEWPFKEQELKALEARRAQALQELELKKQARKERAQKRKAGLLEDEDIASLASAASAQGSEFAAKENAPLLVAKINDHSERSFYKELVKVIEASDVIMEVLDARDPLGTRCIDMEKMVRKADPSKRIVLLLNKIDLVPKEAVEKWLTYLREELPTVAFKCNTQEQRTKLGWKSSKLDKTSNIPQSSDCLGAENLIKLLKNYSRSHELKLAITVGIVGLPNVGKSSLINSLKRSRVVNVGSTPGITRSMQEVQLDKKVKLLDCPGVVMLKSSNSGVSVALRNCKRVEKIEDPVAPVKEILSICPHEKLLSLYKVPNFGSVDDFLQKVATVRGKLKKGGVVDVEAAARIVLHDWNEGKIPYFTLPPKRDAGEDSDAVIISEDGKEFNIDEIYKAESSYIGGLKSIEEFHHIEIPPNAPLAIDEEMLEDGGKKPSEAIQESRDREEQMPDVKDSGGSKAASASTQNDKLYTADAILDPHKRKAEKKRRKASRPSALNDMDADYDFKVDYRMEDGGSEGAHADDEDGGDGSEDNEPMTGVDDA

SEQ ID NO: 111618 - protein, 442 aa, Zea mays subsp. mays
  misc_feature (1)..(442): Ceres Seq. ID no. 13599968
  misc_feature (1)..(339): Homolog of NCBI NO: 9506611 NR Description: hypothetical protein FLJ10613 [Homo sapiens]
  misc_feature (1)..(301): Homolog of NCBI NO: 31209693 NR Description: ENSANGP00000012225 [Anopheles gambiae]
  misc_feature (1)..(294): Homolog of NCBI NO: 33468623 NR Description: SI:zK13A21.8 (novel protein similar to human
  misc_feature (1)..(412): Homolog of NCBI NO: 24647590 NR Description: CG3983-PB [Drosophila melanogaster]
  misc_feature (1)..(412): Homolog of NCBI NO: 21428328 NR Description: AT23067p [Drosophila melanogaster]
  misc_feature (1)..(398): Homolog of NCBI NO: 17534827 NR Description: GTPase of MMR1/HSR1 type (62.3 kD)
  misc_feature (1)..(398): Homolog of NCBI NO: 39587211 NR Description: Hypothetical protein CBG00673 [Caenorhabditis
  misc_feature (1)..(387): Homolog of NCBI NO: 15451214 NR Description: putative GTPase [Arabidopsis thaliana]
  misc_feature (1)..(422): Homolog of NCBI NO: 15231373 NR Description: GTPase -related [Arabidopsis thaliana]
  misc_feature (1)..(442): Homolog of NCBI NO: 34914820 NR Description: putative GTPase [Oryza sativa (japonica
MEVLDARDPLGTRCIDMEKMVRKADPSKRIVLLLNKIDLVPKEAVEKWLTYLREELPTVAFKCNTQEQRTKLGWKSSKLDKTSNIPQSSDCLGAENLIKLLKNYSRSHELKLAITVGIVGLPNVGKSSLINSLKRSRVVNVGSTPGITRSMQEVQLDKKVKLLDCPGVVMLKSSNSGVSVALRNCKRVEKIEDPVAPVKEILSICPHEKLLSLYKVPNFGSVDDFLQKVATVRGKLKKGGVVDVEAAARIVLHDWNEGKIPYFTLPPKRDAGEDSDAVIISEDGKEFNIDEIYKAESSYIGGLKSIEEFHHIEIPPNAPLAIDEEMLEDGGKKPSEAIQESRDREEQMPDVKDSGGSKAASASTQNDKLYTADAILDPHKRKAEKKRRKASRPSALNDMDADYDFKVDYRMEDGGSEGAHADDEDGGDGSEDNEPMTGVDDA

SEQ ID NO: 111619 - DNA, 2342 bp, Zea mays subsp. mays
  misc_feature (1)..(2342): Ceres Seq. ID no. 15225015
gaaaaaacatgacctagaatccggtccggtacgtcctctgcgccgcgcctcctcggctcctcccatccgtcgccagcgcccagcgccgcccgactccgccccacgtcgcgcgtagctcaagaccaagcacgtcttgcaccgcctagctcacctctacggccgccgaacctgcctccgccgttgccgactccaagctccactcgcctgaggtcccctcgtccgaggtgctcgactggacttcctccccccgaggtcccctcctatccattgccgctcctccccgacatgtccaagaaggtcggtaagctaccgccgccggcggcggcgcatgaggaggcgagagaggagctgtttgcttcatgctctttcgccgacctcggcctccactctaccctctgcgcccaccttcaagataagatgagtttccaagcacccactcgaattcaagctcaggcaattccagttgccatttctggacagcacatgctagtgaaggctgctactggcactgggaagactcttgcgtaccttgctccgattgttcacgttctccagatgagggagcctcgtgtggatagaactcatggaacttttgcgttggtacttgtgccaacgcgagagctatgcttacaggtttacgggattgcacaacagctggttcatcgttttcactggattgtccctgggtatgtcatgggtggggagaacagagcaaaagagaaagcaagactgcggaaaggaatatcaattctcattgctactcctgggcgccttcttgaccatttacagcgtactgcttcatttagctattccaatctgcagtggatcgtttttgatgaggctgacagcattctcgaacttggttttggaaaagcagttgaggatattctagagcacttgggttcaaggaatggcgctactggtcaaattaaaaacaaaggtgggcatatcagaagacaaaaccttcttttatctgccactcttaatgagaaggtgaatcgtttggcaaaaattagtttgaaaaacccagtgatgatcggccttgatgatcaaagcaagccatcaggaaaatccaacaatgtagggaacaatcatacttctctattatctgatgaggatgatgaaatactgaaaaagcagaatgatttagtggagcatgcagttgatgatttcaagcttcctactcaattggttcaaagatatgttaaagtttcatgtggttcgaggcttgcagttcttcttatgattctgaaatctctatttgaaagacaagtctctcagaaggtcgttgttttcttttcaacctgcgactctgtagattttcaccacacagtactcagccagcttgagtggagctctggcccacagcgtgatatggataagaagcaaaaatttcttagctgtaaagtgttccgtttgcatggtaacatggagcaggatgatcgcaagaagtcatttttgggttttggttctgagaaatcagcaattcttgtatctaccgatatcgctgctaggggtttggactttccaaaagtcaagtacatcatacaatatgattctccaggagaagcttctgaatacgttcacagggttggaagaactgcaagaattggtgagaagggggaggctctcctctttctgcaacctattgaactcgactacttgaaagatctggagttacacggtgtatcactgacagaatatcccttgcaaagggttttggatagttttcctgtaaatggacagaaacctcacaaaaggaagcaaatatccttagacatgcatccctgcataatgtctccgcagaggtcacttgagggtttcgttgcagctgaggacgcaacgaagaagcttgccagggatgccttctgttcctgggttcgtgcctacactgcccaccgaggtgaactgaagaaaattttcatggtgaagaagctccacctgggccatgtagcgaggagcttcgggctaaaggagcagccgtcgctggttggaaggtcacatcaggtgtctcttaagaagcggaagaaagagcagaagcgcgagcggcctgccaaaaggaggaagcttccctccaagaagtgaatttgcacacccggaatgctgctgcatcgcttgacttcggatcatgacgcacgccatttttgggaccgacaaccgtggtagcctatgcctcggtctgtagactcttgacatgagctatttttgttcgcgatattacatgtagaaatgtaggaactatagcaacaaatgcacaatcacattgttcgctgcagcagctgtttgttgatgtgagatcatctgttactattattattttagtatccgcttgggtttgtctt

SEQ ID NO: 111620 - protein, 599 aa, Zea mays subsp. mays
  misc_feature (1)..(599): Ceres Seq. ID no. 15225016
  misc_feature (45)..(290): Pfam Name: DEAD/DEAH box helicase Pfam Description: DEAD/DEAH box helicase
  misc_feature (16)..(262): Homolog of NCBI NO: 38074599 NR Description: similar to DEAD (Asp-Glu-Ala-Asp) box polypeptide
  misc_feature (293)..(599): Homolog of NCBI NO: 38074599 NR Description: similar to DEAD (Asp-Glu-Ala-Asp) box polypeptide
  misc_feature (16)..(263): Homolog of NCBI NO: 17505907 NR Description: DEAD (Asp-Glu-Ala-Asp) box polypeptide 31 isoform
  misc_feature (223)..(598): Homolog of NCBI NO: 17505907 NR Description: DEAD (Asp-Glu-Ala-Asp) box polypeptide 31 isoform
  misc_feature (16)..(263): Homolog of NCBI NO: 39645219 NR Description: DDX31 protein [Homo sapiens]
  misc_feature (223)..(598): Homolog of NCBI NO: 39645219 NR Description: DDX31 protein [Homo sapiens]
  misc_feature (16)..(263): Homolog of NCBI NO: 10440004 NR Description: unnamed protein product [Homo sapiens]
  misc_feature (223)..(598): Homolog of NCBI NO: 10440004 NR Description: unnamed protein product [Homo sapiens]
  misc_feature (17)..(595): Homolog of NCBI NO: 15226735 NR Description: DEAD/DEAH box helicase, putative [Arabidopsis
  misc_feature (1)..(599): Homolog of NCBI NO: 14719335 NR Description: putative ATP-dependent RNA helicase [Oryza sativa]
MSKKVGKLPPPAAAHEEAREELFASCSFADLGLHSTLCAHLQDKMSFQAPTRIQAQAIPVAISGQHMLVKAATGTGKTLAYLAPIVHVLQMREPRVDRTHGTFALVLVPTRELCLQVYGIAQQLVHRFHWIVPGYVMGGENRAKEKARLRKGISILIATPGRLLDHLQRTASFSYSNLQWIVFDEADSILELGFGKAVEDILEHLGSRNGATGQIKNKGGHIRRQNLLLSATLNEKVNRLAKISLKNPVMIGLDDQSKPSGKSNNVGNNHTSLLSDEDDEILKKQNDLVEHAVDDFKLPTQLVQRYVKVSCGSRLAVLLMILKSLFERQVSQKVVVFFSTCDSVDFHHTVLSQLEWSSGPQRDMDKKQKFLSCKVFRLHGNMEQDDRKKSFLGFGSEKSAILVSTDIAARGLDFPKVKYIIQYDSPGEASEYVHRVGRTARIGEKGEALLFLQPIELDYLKDLELHGVSLTEYPLQRVLDSFPVNGQKPHKRKQISLDMHPCIMSPQRSLEGFVAAEDATKKLARDAFCSWVRAYTAHRGELKKIFMVKKLHLGHVARSFGLKEQPSLVGRSHQVSLKKRKKEQKRERPAKRRKLPSKK

SEQ ID NO: 111621 - protein, 555 aa, Zea mays subsp. mays
  misc_feature (1)..(555): Ceres Seq. ID no. 15225017
  misc_feature (1)..(246): Pfam Name: DEAD/DEAH box helicase Pfam Description: DEAD/DEAH box helicase
  misc_feature (1)..(219): Homolog of NCBI NO: 17505907 NR Description: DEAD (Asp-Glu-Ala-Asp) box polypeptide 31 isoform
  misc_feature (179)..(554): Homolog of NCBI NO: 17505907 NR Description: DEAD (Asp-Glu-Ala-Asp) box polypeptide 31 isoform
  misc_feature (1)..(219): Homolog of NCBI NO: 39645219 NR Description: DDX31 protein [Homo sapiens]
  misc_feature (179)..(554): Homolog of NCBI NO: 39645219 NR Description: DDX31 protein [Homo sapiens]
  misc_feature (1)..(218): Homolog of NCBI NO: 38074599 NR Description: similar to DEAD (Asp-Glu-Ala-Asp) box polypeptide
  misc_feature (249)..(555): Homolog of NCBI NO: 38074599 NR Description: similar to DEAD (Asp-Glu-Ala-Asp) box polypeptide
  misc_feature (1)..(219): Homolog of NCBI NO: 10440004 NR Description: unnamed protein product [Homo sapiens]
  misc_feature (179)..(554): Homolog of NCBI NO: 10440004 NR Description: unnamed protein product [Homo sapiens]
  misc_feature (1)..(551): Homolog of NCBI NO: 15226735 NR Description: DEAD/DEAH box helicase, putative [Arabidopsis
  misc_feature (1)..(555): Homolog of NCBI NO: 14719335 NR Description: putative ATP-dependent RNA helicase [Oryza sativa]
MSFQAPTRIQAQAIPVAISGQHMLVKAATGTGKTLAYLAPIVHVLQMREPRVDRTHGTFALVLVPTRELCLQVYGIAQQLVHRFHWIVPGYVMGGENRAKEKARLRKGISILIATPGRLLDHLQRTASFSYSNLQWIVFDEADSILELGFGKAVEDILEHLGSRNGATGQIKNKGGHIRRQNLLLSATLNEKVNRLAKISLKNPVMIGLDDQSKPSGKSNNVGNNHTSLLSDEDDEILKKQNDLVEHAVDDFKLPTQLVQRYVKVSCGSRLAVLLMILKSLFERQVSQKVVVFFSTCDSVDFHHTVLSQLEWSSGPQRDMDKKQKFLSCKVFRLHGNMEQDDRKKSFLGFGSEKSAILVSTDIAARGLDFPKVKYIIQYDSPGEASEYVHRVGRTARIGEKGEALLFLQPIELDYLKDLELHGVSLTEYPLQRVLDSFPVNGQKPHKRKQISLDMHPCIMSPQRSLEGFVAAEDATKKLARDAFCSWVRAYTAHRGELKKIFMVKKLHLGHVARSFGLKEQPSLVGRSHQVSLKKRKKEQKRERPAKRRKLPSKK

SEQ ID NO: 111622 - protein, 533 aa, Zea mays subsp. mays
  misc_feature (1)..(533): Ceres Seq. ID no. 15225018
  misc_feature (1)..(224): Pfam Name: DEAD/DEAH box helicase Pfam Description: DEAD/DEAH box helicase
  misc_feature (1)..(196): Homolog of NCBI NO: 38074599 NR Description: similar to DEAD (Asp-Glu-Ala-Asp) box polypeptide
  misc_feature (227)..(533): Homolog of NCBI NO: 38074599 NR Description: similar to DEAD (Asp-Glu-Ala-Asp) box polypeptide
  misc_feature (1)..(197): Homolog of NCBI NO: 17505907 NR Description: DEAD (Asp-Glu-Ala-Asp) box polypeptide 31 isoform
  misc_feature (157)..(532): Homolog of NCBI NO: 17505907 NR Description: DEAD (Asp-Glu-Ala-Asp) box polypeptide 31 isoform
  misc_feature (1)..(197): Homolog of NCBI NO: 39645219 NR Description: DDX31 protein [Homo sapiens]
  misc_feature (157)..(532): Homolog of NCBI NO: 39645219 NR Description: DDX31 protein [Homo sapiens]
  misc_feature (1)..(197): Homolog of NCBI NO: 10440004 NR Description: unnamed protein product [Homo sapiens]
  misc_feature (157)..(532): Homolog of NCBI NO: 10440004 NR Description: unnamed protein product [Homo sapiens]
  misc_feature (1)..(529): Homolog of NCBI NO: 15226735 NR Description: DEAD/DEAH box helicase, putative [Arabidopsis
  misc_feature (1)..(533): Homolog of NCBI NO: 14719335 NR Description: putative ATP-dependent RNA helicase [Oryza sativa]
MLVKAATGTGKTLAYLAPIVHVLQMREPRVDRTHGTFALVLVPTRELCLQVYGIAQQLVHRFHWIVPGYVMGGENRAKEKARLRKGISILIATPGRLLDHLQRTASFSYSNLQWIVFDEADSILELGFGKAVEDILEHLGSRNGATGQIKNKGGHIRRQNLLLSATLNEKVNRLAKISLKNPVMIGLDDQSKPSGKSNNVGNNHTSLLSDEDDEILKKQNDLVEHAVDDFKLPTQLVQRYVKVSCGSRLAVLLMILKSLFERQVSQKVVVFFSTCDSVDFHHTVLSQLEWSSGPQRDMDKKQKFLSCKVFRLHGNMEQDDRKKSFLGFGSEKSAILVSTDIAARGLDFPKVKYIIQYDSPGEASEYVHRVGRTARIGEKGEALLFLQPIELDYLKDLELHGVSLTEYPLQRVLDSFPVNGQKPHKRKQISLDMHPCIMSPQRSLEGFVAAEDATKKLARDAFCSWVRAYTAHRGELKKIFMVKKLHLGHVARSFGLKEQPSLVGRSHQVSLKKRKKEQKRERPAKRRKLPSKK

SEQ ID NO: 111623 - DNA, 2255 bp, Zea mays subsp. mays
  misc_feature (1)..(2255): Ceres Seq. ID no. 15226801
gacatgcagttgtagcttggctcgaggcgggcatcagcgacgacaaacatcctgctcaatttgttgtatgataaatactgcgaaacaatgctggtgtttcataagatgaccgtgcagctcatgaaaatccagagggtggagtcgagcgagacgacgtggccggcgcggcgccaggtcgtggcgtgcgccgctgtttgctggtcgtggcgtgaggtcaccaaggaggtggtgaagacgctcaaggagtgcggcaggatcaccttccccatgtcccttaagcaggttggcactctctgccttttctctactttgatgatcaatcacatgtcttcacctttgcagaggcttatgattttgaagatctagaatctatggttgaagaaatagccaaagcattcaagacaaagataatgtttatatatgttgacactgctgaagaaaaccttgcaaaaaccattcctcactctttatggcattgaatcagaaaaggcctactggtccagttcttgaaagggtgggaatgtgtccaagaagacaaaggcatcgacccgccaattcttcgctacaaattaaaacagcactagggtgagatcagtgggcttgagagtagcatcatccttcaaacatgatgatgggtttctagctgatggtgtctctatagctcactggtatccttcaaaaagaaagtatggtgttgttttataagctctcatgtttatgactaaggttgagatttgtgaagattcagaaataattagctacatgcccttgcgtagcttacaatgcacaattagctagcttcattgttttaacttctctgcaatatgaacatgcaaattttaaccacctcatttgtttttaataagctgaaacaaattgttggttattattcccccttgtttggtcgccctcatttaagttgtggcttagatattcctactcagagagttggtacatgttttttatgcttatctttttcatttatcaaccatatgtgtgtttgatgttttttctatgcttagacctaaacaaaacattcttggtagccacatctaaaacattcatttcaagttctacattaattcatttatattccatcaacttttaaaatacaacacttagtttgtttgaaaagaaatagtttttgtgaaatcttcaaacaaggcttgacaatgatttattcatcgacaatgcatctgagccctctttgcattgtaagctcctacaatgaagttatacaaaagtcttatctattcattttggtttaagctggttgagcactttttacaatatctggtcaacacatctaggatgactcttcacatctgtcaattcaaattctcttcaaaacagctaatattgctccatattgtcttttgaagcttcctggaaaaaatgtcttttgaagctaatcttgctccatacagctaatcttcacatctttcaaagcatttgctagggcccttcggtgagcaatagaatacgacttgcgctaccaaagcgtccatagctgaatgcaaaccattgagatggtccaggttgaggacctccatgacacctatgttggtgtgggttgtgccgccccatcgtgaccgtcatcgattgggcctccgagtccaggagaagacctccgatgaagaaagagacatgctgcacatgcacgagggtacttgcagatagatgtcggctctatggacgaacactcgaccaagtcagatgaggagtatgagggcctagccatgcgagacatgatggctaccggtccaacaatgagcagcaagctgtgagttaaagatgaactcacctgtcctggagagcaacatccataggagtgaggcaaaatggcgggtaccaccacaacatggacccgttcctgaagatgtccaaggaggtggtagccgacaccataatgtcttgcgcgtcattgtgtcaccggccggcaacacgctgcgctggtaccggcgggtgttatgtttcttaggcgtatgtttctgtgctttgagctgtgctatagactggttgtgccaactactgattttaaaagaaaaaggtgagctgaaaatcattgttgaaaacaaacatgtaacggttcgttctcatcagttgtgccaactaccaatcatttcattgatcagaatctgtcgttgctcatgagaaccaaaagtaagacacttcttaataaaaaaaaaaaaaaaaaaaaaaaaaaaaaaaaaaaaaaaaaaaaaaaaaaaaaaaaaaaaaaaaaaaaaaaaagg

SEQ ID NO: 111624 - protein, 119 aa, Zea mays subsp. mays
  misc_feature (1)..(119): Ceres Seq. ID no. 15226802
MNSPVLESNIHRSEAKWRVPPQHGPVPEDVQGGGSRHHNVLRVIVSPAGNTLRWYRRVLCFLGVCFCALSCAIDWLCQLLILKEKGELKIIVENKHVTVRSHQLCQLPIISLIRICRCS

SEQ ID NO: 111625 - protein, 92 aa, Zea mays subsp. mays
  misc_feature (1)..(92): Ceres Seq. ID no. 15226803
  misc_feature (14)..(55): Pfam Name: F-box domain Pfam Description: F-box domain
  misc_feature (14)..(67): Homolog of NCBI NO: 28188613 NR Description: unknown protein [Arabidopsis thaliana]
  misc_feature (14)..(67): Homolog of NCBI NO: 38637048 NR Description: putative chain A, C-terminal domain of mouse
  misc_feature (14)..(67): Homolog of NCBI NO: 15223772 NR Description: F-box containing tubby family protein
  misc_feature (14)..(67): Homolog of NCBI NO: 30694036 NR Description: F-box containing tubby family protein
  misc_feature (14)..(67): Homolog of NCBI NO: 30793997 NR Description: putative F-box containing tubby family protein
  misc_feature (14)..(67): Homolog of NCBI NO: 30680328 NR Description: F-box containing tubby family protein
  misc_feature (14)..(67): Homolog of NCBI NO: 25405194 NR Description: unknown protein, 3155-1759 [imported] -
  misc_feature (14)..(67): Homolog of NCBI NO: 25411852 NR Description: probable Tub family protein [imported] -
  misc_feature (14)..(67): Homolog of NCBI NO: 5689214 NR Description: tubby-like protein [Lemna paucicostata]
  misc_feature (14)..(67): Homolog of NCBI NO: 7635492 NR Description: tubby-like protein [Cicer arietinum]
MLVFHKMTVQLMKIQRVESSETTWPARRQVVACAAVCWSWREVTKEVVKTLKECGRITFPMSLKQVGTLCLFSTLMINHMSSPLQRLMILKI

SEQ ID NO: 111626 - protein, 86 aa, Zea mays subsp. mays
  misc_feature (1)..(86): Ceres Seq. ID no. 15226804
  misc_feature (8)..(49): Pfam Name: F-box domain Pfam Description: F-box domain
  misc_feature (8)..(61): Homolog of NCBI NO: 28188613 NR Description: unknown protein [Arabidopsis thaliana]
  misc_feature (8)..(61): Homolog of NCBI NO: 38637048 NR Description: putative chain A, C-terminal domain of mouse
  misc_feature (8)..(61): Homolog of NCBI NO: 15223772 NR Description: F-box containing tubby family protein
  misc_feature (8)..(61): Homolog of NCBI NO: 30694036 NR Description: F-box containing tubby family protein
  misc_feature (8)..(61): Homolog of NCBI NO: 30793997 NR Description: putative F-box containing tubby family protein
  misc_feature (8)..(61): Homolog of NCBI NO: 30680328 NR Description: F-box containing tubby family protein
  misc_feature (8)..(61): Homolog of NCBI NO: 25405194 NR Description: unknown protein, 3155-1759 [imported] -
  misc_feature (8)..(61): Homolog of NCBI NO: 25411852 NR Description: probable Tub family protein [imported] -
  misc_feature (8)..(61): Homolog of NCBI NO: 5689214 NR Description: tubby-like protein [Lemna paucicostata]
  misc_feature (8)..(61): Homolog of NCBI NO: 7635492 NR Description: tubby-like protein [Cicer arietinum]
MTVQLMKIQRVESSETTWPARRQVVACAAVCWSWREVTKEVVKTLKECGRITFPMSLKQVGTLCLFSTLMINHMSSPLQRLMILKI

SEQ ID NO: 111627 - DNA, 626 bp, Zea mays subsp. mays
  misc_feature (1)..(626): Ceres Seq. ID no. 13635567
agtcccccccccactgagaagaaggagagctcagaaaccaaagaagctcggaagagcacgcagagtccagaaggcggcggcaaaggcgacgagggtccagacagcaaggcggagggcgagaaggaagcggccgttgttgaccttaggccactgacgatggaagacctgaggcaggcaaagaaccaggttgcagcgagcttcgccgccgagggtgccgtgatgaacgagctcaggcagtggaacgacctgtacggcgaaggggggtccaggaagaaacagcagctgacctacttcttgtagaggtgaagcatttggcaggtggtggagaggaacagagctgggcagacggtggacccatacttgatgaaccgagcatggtttcttcaagacgtgacgtgggcatgacgcatagtactagtctttgaggttccaggatccatgagatgagatgaggtcgatggtcaatttgtaggatcatgaactattattcttttacatgcatttgtacatgagcgctagactggttatgtatatctggattgattgaacagctcttgtgtttgagggtcattttagcttctcgtagactgctgtaattatatcatatatagtgagtatatatattc

SEQ ID NO: 111628 - protein, 99 aa, Zea mays subsp. mays
  misc_feature (1)..(99): Ceres Seq. ID no. 13635568
  misc_feature (47)..(99): Homolog of NCBI NO: 20259341 NR Description: unknown protein [Arabidopsis thaliana]
  misc_feature (47)..(99): Homolog of NCBI NO: 30678418 NR Description: expressed protein [Arabidopsis thaliana]
  misc_feature (47)..(99): Homolog of NCBI NO: 25518408 NR Description: hypothetical protein F22D16.11 - Arabidopsis
  misc_feature (47)..(99): Homolog of NCBI NO: 7487016 NR Description: hypothetical protein T14P8.7 - Arabidopsis
  misc_feature (17)..(99): Homolog of NCBI NO: 25404926 NR Description: protein F22C12.12 [imported] - Arabidopsis
  misc_feature (3)..(99): Homolog of NCBI NO: 30696968 NR Description: expressed protein [Arabidopsis thaliana]
  misc_feature (3)..(99): Homolog of NCBI NO: 18407974 NR Description: expressed protein [Arabidopsis thaliana]
  misc_feature (9)..(99): Homolog of NCBI NO: 34912822 NR Description: P0501G01.20 [Oryza sativa (japonica
  misc_feature (5)..(99): Homolog of NCBI NO: 34904204 NR Description: P0492F05.26 [Oryza sativa (japonica
  misc_feature (7)..(99): Homolog of NCBI NO: 15234347 NR Description: hypothetical protein [Arabidopsis thaliana]
SPPPTEKKESSETKEARKSTQSPEGGGKGDEGPDSKAEGEKEAAVVDLRPLTMEDLRQAKNQVAASFAAEGAVMNELRQWNDLYGEGGSRKKQQLTYFL

SEQ ID NO: 111629 - protein, 50 aa, Zea mays subsp. mays
  misc_feature (1)..(50): Ceres Seq. ID no. 13635569
VPPPLRRRRAQKPKKLGRARRVQKAAAKATRVQTARRRARRKRPLLTLGH

SEQ ID NO: 111630 - protein, 47 aa, Zea mays subsp. mays; identical to SEQ ID NO: 111606
  misc_feature (1)..(47): Ceres Seq. ID no. 13635570
  misc_feature (1)..(47): Homolog of NCBI NO: 20259341 NR Description: unknown protein [Arabidopsis thaliana]
  misc_feature (1)..(47): Homolog of NCBI NO: 30678418 NR Description: expressed protein [Arabidopsis thaliana]
  misc_feature (1)..(47): Homolog of NCBI NO: 25518408 NR Description: hypothetical protein F22D16.11 - Arabidopsis
  misc_feature (1)..(47): Homolog of NCBI NO: 7487016 NR Description: hypothetical protein T14P8.7 - Arabidopsis
  misc_feature (1)..(47): Homolog of NCBI NO: 25404926 NR Description: protein F22C12.12 [imported] - Arabidopsis
  misc_feature (1)..(47): Homolog of NCBI NO: 30696968 NR Description: expressed protein [Arabidopsis thaliana]
  misc_feature (1)..(47): Homolog of NCBI NO: 18407974 NR Description: expressed protein [Arabidopsis thaliana]
  misc_feature (1)..(47): Homolog of NCBI NO: 34912822 NR Description: P0501G01.20 [Oryza sativa (japonica
  misc_feature (1)..(47): Homolog of NCBI NO: 34904204 NR Description: P0492F05.26 [Oryza sativa (japonica
  misc_feature (1)..(47): Homolog of NCBI NO: 15234347 NR Description: hypothetical protein [Arabidopsis thaliana]

SEQ ID NO: 111631 - DNA, 2228 bp, Zea mays subsp. mays
  misc_feature (1)..(2228): Ceres Seq. ID no. 14308560
  misc_feature: MA Experiment ID: 108504 Result: Down-regulated in Transcription
  misc_feature: MA Experiment 108504 PARAMETER Experiment Name: Zm_Drought_P Parameter: Age (day) Value: 8
  misc_feature: MA Experiment 108504 PARAMETER Experiment Name: Zm_Drought_P Parameter: Organism Value: Zea mays
  misc_feature: MA Experiment 108504 PARAMETER Experiment Name: Zm_Drought_P Parameter: Plant Line Value: 35A19
  misc_feature: MA Experiment 108504 PARAMETER Experiment Name: Zm_Drought_P Parameter: Timepoint (hr) Value: 12
  misc_feature: MA Experiment 108504 PARAMETER Experiment Name: Zm_Drought_P Parameter: Tissue Value: Aerial
  misc_feature: MA Experiment 108504 PARAMETER Experiment Name: Zm_Drought_P Parameter: Treatment Value: Drought vs. No Drought
  misc_feature: MA Experiment ID: 108523 Result: Down-regulated in Transcription
  misc_feature: MA Experiment 108523 PARAMETER Experiment Name: Zm_42deg_Heat_P Parameter: Age (day) Value: 8
  misc_feature: MA Experiment 108523 PARAMETER Experiment Name: Zm_42deg_Heat_P Parameter: Organism Value: Zea mays
  misc_feature: MA Experiment 108523 PARAMETER Experiment Name: Zm_42deg_Heat_P Parameter: Plant Line Value: 35A19
  misc_feature: MA Experiment 108523 PARAMETER Experiment Name: Zm_42deg_Heat_P Parameter: Temperature (deg C) Value: 42 vs. 22
  misc_feature: MA Experiment 108523 PARAMETER Experiment Name: Zm_42deg_Heat_P Parameter: Timepoint (hr) Value: 6
  misc_feature: MA Experiment 108523 PARAMETER Experiment Name: Zm_42deg_Heat_P Parameter: Tissue Value: Aerial
  misc_feature: MA Experiment ID: 108528 Result: Down-regulated in Transcription
  misc_feature: MA Experiment 108528 PARAMETER Experiment Name: Zm_Imbibed_Seeds_P Parameter: Age (day) Value: 5 vs. 2
  misc_feature: MA Experiment 108528 PARAMETER Experiment Name: Zm_Imbibed_Seeds_P Parameter: Organism Value: Zea mays
  misc_feature: MA Experiment 108528 PARAMETER Experiment Name: Zm_Imbibed_Seeds_P Parameter: Plant Line Value: 35A19
  misc_feature: MA Experiment 108528 PARAMETER Experiment Name: Zm_Imbibed_Seeds_P Parameter: Tissue Value: Aerial vs. Embryo
  misc_feature: MA Experiment ID: 108530 Result: Down-regulated in Transcription
  misc_feature: MA Experiment 108530 PARAMETER Experiment Name: Zm_Imbibed_Seeds_P Parameter: Age (day) Value: 6 vs. 2
  misc_feature: MA Experiment 108530 PARAMETER Experiment Name: Zm_Imbibed_Seeds_P Parameter: Organism Value: Zea mays
  misc_feature: MA Experiment 108530 PARAMETER Experiment Name: Zm_Imbibed_Seeds_P Parameter: Plant Line Value: 35A19
  misc_feature: MA Experiment 108530 PARAMETER Experiment Name: Zm_Imbibed_Seeds_P Parameter: Tissue Value: Aerial vs. Embryo
  misc_feature: MA Experiment ID: 108535 Result: Up-regulated in Transcription
  misc_feature: MA Experiment 108535 PARAMETER Experiment Name: Zm_Meristem_P Parameter: Age (day) Value: 8
  misc_feature: MA Experiment 108535 PARAMETER Experiment Name: Zm_Meristem_P Parameter: Organism Value: Zea mays
  misc_feature: MA Experiment 108535 PARAMETER Experiment Name: Zm_Meristem_P Parameter: Plant Line Value: 35A19
  misc_feature: MA Experiment 108535 PARAMETER Experiment Name: Zm_Meristem_P Parameter: Tissue Value: Root Meristem vs. Above Root Meristem
  misc_feature: MA Experiment ID: 108544 Result: Down-regulated in Transcription
  misc_feature: MA Experiment ID: 108556 Result: Down-regulated in Transcription
  misc_feature: MA Experiment 108556 PARAMETER Experiment Name: Zm_Drought_P Parameter: Age (day) Value: 9
  misc_feature: MA Experiment 108556 PARAMETER Experiment Name: Zm_Drought_P Parameter: Organism Value: Zea mays
  misc_feature: MA Experiment 108556 PARAMETER Experiment Name: Zm_Drought_P Parameter: Plant Line Value: 35A19
  misc_feature: MA Experiment 108556 PARAMETER Experiment Name: Zm_Drought_P Parameter: Timepoint (hr) Value: 24
  misc_feature: MA Experiment 108556 PARAMETER Experiment Name: Zm_Drought_P Parameter: Tissue Value: Aerial
  misc_feature: MA Experiment 108556 PARAMETER Experiment Name: Zm_Drought_P Parameter: Treatment Value: Drought vs. No Drought
  misc_feature: MA Experiment ID: 108597 Result: Down-regulated in Transcription
  misc_feature: MA Experiment 108597 PARAMETER Experiment Name: Zm_100uM_ABA_P Parameter: Age (day) Value: 9
  misc_feature: MA Experiment 108597 PARAMETER Experiment Name: Zm_100uM_ABA_P Parameter: Organism Value: Zea mays
  misc_feature: MA Experiment 108597 PARAMETER Experiment Name: Zm_100uM_ABA_P Parameter: Plant Line Value: 35A19
  misc_feature: MA Experiment 108597 PARAMETER Experiment Name: Zm_100uM_ABA_P Parameter: Timepoint (hr) Value: 24
  misc_feature: MA Experiment 108597 PARAMETER Experiment Name: Zm_100uM_ABA_P Parameter: Tissue Value: Aerial
  misc_feature: MA Experiment 108597 PARAMETER Experiment Name: Zm_100uM_ABA_P Parameter: Treatment Value: 100uM ABA vs. No Treatment
  misc_feature: MA Experiment ID: 20000477 Result: Down-regulated in Transcription
  misc_feature: MA Experiment 20000477 PARAMETER Experiment Name: Zm_5mM_SA_P Parameter: Age (day) Value: 10
  misc_feature: MA Experiment 20000477 PARAMETER Experiment Name: Zm_5mM_SA_P Parameter: Organism Value: Zea mays
  misc_feature: MA Experiment 20000477 PARAMETER Experiment Name: Zm_5mM_SA_P Parameter: Plant Line Value: 35A19
  misc_feature: MA Experiment 20000477 PARAMETER Experiment Name: Zm_5mM_SA_P Parameter: Timepoint (hr) Value: 48
  misc_feature: MA Experiment 20000477 PARAMETER Experiment Name: Zm_5mM_SA_P Parameter: Tissue Value: Aerial
  misc_feature: MA Experiment 20000477 PARAMETER Experiment Name: Zm_5mM_SA_P Parameter: Treatment Value: 5mM SA vs. No Treatment
  misc_feature: MA Experiment ID: 20000478 Result: Down-regulated in Transcription
  misc_feature: MA Experiment 20000478 PARAMETER Experiment Name: Zm_5mM_SA_P Parameter: Age (day) Value: 11
  misc_feature: MA Experiment 20000478 PARAMETER Experiment Name: Zm_5mM_SA_P Parameter: Organism Value: Zea mays
  misc_feature: MA Experiment 20000478 PARAMETER Experiment Name: Zm_5mM_SA_P Parameter: Plant Line Value: 35A19
  misc_feature: MA Experiment 20000478 PARAMETER Experiment Name: Zm_5mM_SA_P Parameter: Timepoint (hr) Value: 72
  misc_feature: MA Experiment 20000478 PARAMETER Experiment Name: Zm_5mM_SA_P Parameter: Tissue Value: Aerial
  misc_feature: MA Experiment 20000478 PARAMETER Experiment Name: Zm_5mM_SA_P Parameter: Treatment Value: 5mM SA vs. No Treatment
  misc_feature: MA Experiment ID: 20000488 Result: Down-regulated in Transcription
  misc_feature: MA Experiment 20000488 PARAMETER Experiment Name: Zm_50mM_NH4NO3_L_to_H_P Parameter: Organism Value: Zea mays
  misc_feature: MA Experiment 20000488 PARAMETER Experiment Name: Zm_50mM_NH4NO3_L_to_H_P Parameter: Timepoint (hr) Value: 8
  misc_feature: MA Experiment 20000488 PARAMETER Experiment Name: Zm_50mM_NH4NO3_L_to_H_P Parameter: Tissue Value: Leaves
  misc_feature: MA Experiment 20000488 PARAMETER Experiment Name: Zm_50mM_NH4NO3_L_to_H_P Parameter: Treatment Value: 50mM NH4NO3 vs. 100mM Mannitol
  misc_feature: MA Experiment ID: 20000626 Result: Down-regulated in Transcription
  misc_feature: MA Experiment 20000626 PARAMETER Experiment Name: Zm_Herbicide-Treatments_P Parameter: Timepoint (hr) Value: 12
  misc_feature: MA Experiment 20000626 PARAMETER Experiment Name: Zm_Herbicide-Treatments_P Parameter: Tissue Value: Aerial
  misc_feature: MA Experiment 20000626 PARAMETER Experiment Name: Zm_Herbicide-Treatments_P Parameter: Treatment Value: Roundup vs. No Treatment
  misc_feature: MA Experiment ID: 20001608 Result: Up-regulated in Transcription
  misc_feature: MA Experiment 20001608 PARAMETER Experiment Name: Zm_50ppm_KNO3_L-to-H_P Parameter: Age (day) Value: 21
  misc_feature: MA Experiment 20001608 PARAMETER Experiment Name: Zm_50ppm_KNO3_L-to-H_P Parameter: Organism Value: Zea mays
  misc_feature: MA Experiment 20001608 PARAMETER Experiment Name: Zm_50ppm_KNO3_L-to-H_P Parameter: Plant Line Value: 35A19
  misc_feature: MA Experiment 20001608 PARAMETER Experiment Name: Zm_50ppm_KNO3_L-to-H_P Parameter: Timepoint (hr) Value: 48
  misc_feature: MA Experiment 20001608 PARAMETER Experiment Name: Zm_50ppm_KNO3_L-to-H_P Parameter: Tissue Value: Shoots
  misc_feature: MA Experiment 20001608 PARAMETER Experiment Name: Zm_50ppm_KNO3_L-to-H_P Parameter: Treatment Value: 50ppm KNO3 vs. 50ppm KCl
atcacagtgcgggcggcgggcgccactctcacacctaccaggaaaccaatcaaaacttaaaaccaatcgaaattagaccggcgacgaggattagcgctcgccggcgatggattctgactacggcgtgcctcgcgagctctcggaggtgcagaagaagcgcacgctctaccagcccgagctgcccccctgcctccagggcaccactgtcagggtggagtatggtgatgctgcaattgcagctgacccggcaggtgctcatgtgatcagccatgcattccctcatacctatgcgcagcctattgctcattttctcaggaagacagctgttgtccctgatgctaaggtcatatctgaacaccaggcggtcagggttggcattgtcttctgtggcagacaatccccaggaggccacaatgttgtttgggggctctatgaggctatcaaggcccacaaccaaaacagcaaactcattggtttccttggtggatcagatggtctgctagcacagagaaccttggagatcactgataaagttattgcttcatataaaaatcaaggtggatatgacatgcttggtcgaacaaaggatcagattaggacgacagagcaggtcaatggtgctatggctagttgccaagctttgaagttggatgctctggttatcattggaggtgtcacttccaacactgatgctgctcaacttgccgagacatttgctgaggcaaagtgtgcaacaaaggttgtaggtgttcctgtaactttaaatggggaccttaagaaccagtttgttgagacaaccgttggctttgacaccatatgcaaggtgaacgcacaacttatcagcaatgtatgcactgatgctctatctgctgagaagtattactactttattcgcctgatgggacgcaaggcttctcatgtggcattggaatgtgctcttcaatcacatccaaacatggttatcctaggagaggaggtggctgcttccaaacttacaatttttgatattacgaagcagatttgtgatgcagttcaggcaagggctgaaaaagacaagaaccatggggttattcttattcctgagggccttgtggagagtattcctgaactatatgctctgcttcaggaaatccatggcctccatggcaaaggtgtttctgttgagaatatctcttctcagctttcaccttgggcatctgcactctttgagtttttgccccctttaatcaggaagcagctactactacatcctgaatctgatgattcagctcaactttcccagattgagactgaaaagctgctagcccagttagttgagactgagatgaacagacgtttgaaggagggcacttacaaaggaaagaagtttaatgcaatctgtcacttctttggctaccaagctaggggagcactgccttcaaagtttgattgcgattatgcctacgttttggggcatgtgtgctaccacatcatagctgccggattgaacagttacatggctacggtgacaaatcttaagaatccagtgaacaagtggcgatgcggcgcgactcctatttcgtctatgatgactgtgaagcgatggtcgcgtggcccttcagccacccaaattggaaagcccgctgttcacatggctagcgttgacttgaaaggaaaagcatacgatgtgttgagacagaattcttccagctttttgttggaagatgtctacagaaacccaggcccgctccagtttgaaggaccaggtgccgattcaaagcctatttcattgtgcgttgaggatcaagactatatgggcagaataaaaaagttgcaggaatacttggagaaggtgaagaggattgtgaagcctgggtgctcgcaggatgttcttaaagcggcgctgagtgccatgtcttctgtgacggaaacactgaacatcatgacttcatcttctaccggccagactccactgagtcattaggtaccatttcatggtatggatcataatccccacttttttcagtggtggcgattaacgagtttaggaacagcaaccctggtatcatacgggttattcttttgtagccttttggagagttctatcggttttggattcggtagtttatgaaggcttgttgatgagtttgagctcgaatagcttttgaaacagccggatgatgccatctttaataaaccaaattctgtgactgcattcacatttctgtcagtcacctgagtgagaaaag

SEQ ID NO: 111632 - protein, 618 aa, Zea mays subsp. mays
  misc_feature (1)..(618): Ceres Seq. ID no. 14308561
  misc_feature (88)..(368): Pfam Name: Phosphofructokinase Pfam Description: Phosphofructokinase
  misc_feature (12)..(558): Homolog of NCBI NO: 2507174 NR Description: PYROPHOSPHATE--FRUCTOSE 6-PHOSPHATE BETA SUBUNIT (PFP) (6-PHOSPHOFRUCTOKINASE (PYROPHOSPHATE))
  misc_feature (12)..(558): Homolog of NCBI NO: 15221156 NR Description: pyrophosphate-fructose-6-phosphate
  misc_feature (11)..(546): Homolog of NCBI NO: 11528427 NR Description: pyrophosphate-dependent phosphofructokinase
  misc_feature (88)..(485): Homolog of NCBI NO: 29367525 NR Description: fructose-6-phosphate 1-phosphotransferase
  misc_feature (1)..(618): Homolog of NCBI NO: 29647436 NR Description: putative pyrophosphate--fructose 6-phosphate
  misc_feature (1)..(613): Homolog of NCBI NO: 15218074 NR Description: pyrophosphate-dependent phosphofructokinase alpha
  misc_feature (1)..(613): Homolog of NCBI NO: 15223082 NR Description: pyrophosphate-dependent phosphofructokinase alpha
  misc_feature (1)..(615): Homolog of NCBI NO: 129881 NR Description: Pyrophosphate--fructose 6-phosphate alpha subunit (PFP) (6-phosphofructokinase, (Pyrophosphate-dependent 6-phosphofructose-1-kinase) (PPI-PFK)
  misc_feature (1)..(616): Homolog of NCBI NO: 3790102 NR Description: pyrophosphate-dependent phosphofructokinase alpha
  misc_feature (1)..(616): Homolog of NCBI NO: 2499488 NR Description: Pyrophosphate--fructose 6-phosphate alpha subunit (PFP) (6-phosphofructokinase, pyrophosphate
MDSDYGVPRELSEVQKKRTLYQPELPPCLQGTTVRVEYGDAAIAADPAGAHVISHAFPHTYAQPIAHFLRKTAVVPDAKVISEHQAVRVGIVFCGRQSPGGHNVVWGLYEAIKAHNQNSKLIGFLGGSDGLLAQRTLEITDKVIASYKNQGGYDMLGRTKDQIRTTEQVNGAMASCQALKLDALVIIGGVTSNTDAAQLAETFAEAKCATKVVGVPVTLNGDLKNQFVETTVGFDTICKVNAQLISNVCTDALSAEKYYYFIRLMGRKASHVALECALQSHPNMVILGEEVAASKLTIFDITKQICDAVQARAEKDKNHGVILIPEGLVESIPELYALLQEIHGLHGKGVSVENISSQLSPWASALFEFLPPLIRKQLLLHPESDDSAQLSQIETEKLLAQLVETEMNRRLKEGTYKGKKFNAICHFFGYQARGALPSKFDCDYAYVLGHVCYHIIAAGLNSYMATVTNLKNPVNKWRCGATPISSMMTVKRWSRGPSATQIGKPAVHMASVDLKGKAYDVLRQNSSSFLLEDVYRNPGPLQFEGPGADSKPISLCVEDQDYMGRIKKLQEYLEKVKRIVKPGCSQDVLKAALSAMSSVTETLNIMTSSSTGQTPLSH

SEQ ID NO: 111633 - protein, 464 aa, Zea mays subsp. mays
  misc_feature (1)..(464): Ceres Seq. ID no. 14308562
  misc_feature (1)..(214): Pfam Name: Phosphofructokinase Pfam Description: Phosphofructokinase
  misc_feature (1)..(404): Homolog of NCBI NO: 2507174 NR Description: PYROPHOSPHATE--FRUCTOSE 6-PHOSPHATE BETA SUBUNIT (PFP) (6-PHOSPHOFRUCTOKINASE (PYROPHOSPHATE))
  misc_feature (1)..(404): Homolog of NCBI NO: 15221156 NR Description: pyrophosphate-fructose-6-phosphate
  misc_feature (1)..(392): Homolog of NCBI NO: 11528427 NR Description: pyrophosphate-dependent phosphofructokinase
  misc_feature (1)..(331): Homolog of NCBI NO: 29367525 NR Description: fructose-6-phosphate 1-phosphotransferase
  misc_feature (1)..(464): Homolog of NCBI NO: 29647436 NR Description: putative pyrophosphate--fructose 6-phosphate
  misc_feature (1)..(459): Homolog of NCBI NO: 15218074 NR Description: pyrophosphate-dependent phosphofructokinase alpha
  misc_feature (1)..(459): Homolog of NCBI NO: 15223082 NR Description: pyrophosphate-dependent phosphofructokinase alpha
  misc_feature (1)..(461): Homolog of NCBI NO: 129881 NR Description: Pyrophosphate--fructose 6-phosphate alpha subunit (PFP) (6-phosphofructokinase, (Pyrophosphate-dependent 6-phosphofructose-1-kinase) (PPI-PFK)
  misc_feature (1)..(462): Homolog of NCBI NO: 3790102 NR Description: pyrophosphate-dependent phosphofructokinase alpha
  misc_feature (1)..(462): Homolog of NCBI NO: 2499488 NR Description: Pyrophosphate--fructose 6-phosphate alpha subunit (PFP) (6-phosphofructokinase, pyrophosphate
MLGRTKDQIRTTEQVNGAMASCQALKLDALVIIGGVTSNTDAAQLAETFAEAKCATKVVGVPVTLNGDLKNQFVETTVGFDTICKVNAQLISNVCTDALSAEKYYYFIRLMGRKASHVALECALQSHPNMVILGEEVAASKLTIFDITKQICDAVQARAEKDKNHGVILIPEGLVESIPELYALLQEIHGLHGKGVSVENISSQLSPWASALFEFLPPLIRKQLLLHPESDDSAQLSQIETEKLLAQLVETEMNRRLKEGTYKGKKFNAICHFFGYQARGALPSKFDCDYAYVLGHVCYHIIAAGLNSYMATVTNLKNPVNKWRCGATPISSMMTVKRWSRGPSATQIGKPAVHMASVDLKGKAYDVLRQNSSSFLLEDVYRNPGPLQFEGPGADSKPISLCVEDQDYMGRIKKLQEYLEKVKRIVKPGCSQDVLKAALSAMSSVTETLNIMTSSSTGQTPLSH

SEQ ID NO: 111634 - protein, 446 aa, Zea mays subsp. mays
  misc_feature (1)..(446): Ceres Seq. ID no. 14308563
  misc_feature (1)..(196): Pfam Name: Phosphofructokinase Pfam Description: Phosphofructokinase
  misc_feature (1)..(386): Homolog of NCBI NO: 2507174 NR Description: PYROPHOSPHATE--FRUCTOSE 6-PHOSPHATE BETA SUBUNIT (PFP) (6-PHOSPHOFRUCTOKINASE (PYROPHOSPHATE))
  misc_feature (1)..(386): Homolog of NCBI NO: 15221156 NR Description: pyrophosphate-fructose-6-phosphate
  misc_feature (1)..(374): Homolog of NCBI NO: 11528427 NR Description: pyrophosphate-dependent phosphofructokinase
  misc_feature (1)..(313): Homolog of NCBI NO: 29367525 NR Description: fructose-6-phosphate 1-phosphotransferase
  misc_feature (1)..(446): Homolog of NCBI NO: 29647436 NR Description: putative pyrophosphate--fructose 6-phosphate
  misc_feature (1)..(441): Homolog of NCBI NO: 15218074 NR Description: pyrophosphate-dependent phosphofructokinase alpha
  misc_feature (1)..(441): Homolog of NCBI NO: 15223082 NR Description: pyrophosphate-dependent phosphofructokinase alpha
  misc_feature (1)..(443): Homolog of NCBI NO: 129881 NR Description: Pyrophosphate--fructose 6-phosphate alpha subunit (PFP) (6-phosphofructokinase, (Pyrophosphate-dependent 6-phosphofructose-1-kinase) (PPI-PFK)
  misc_feature (1)..(444): Homolog of NCBI NO: 3790102 NR Description: pyrophosphate-dependent phosphofructokinase alpha
  misc_feature (1)..(444): Homolog of NCBI NO: 2499488 NR Description: Pyrophosphate--fructose 6-phosphate alpha subunit (PFP) (6-phosphofructokinase, pyrophosphate
MASCQALKLDALVIIGGVTSNTDAAQLAETFAEAKCATKVVGVPVTLNGDLKNQFVETTVGFDTICKVNAQLISNVCTDALSAEKYYYFIRLMGRKASHVALECALQSHPNMVILGEEVAASKLTIFDITKQICDAVQARAEKDKNHGVILIPEGLVESIPELYALLQEIHGLHGKGVSVENISSQLSPWASALFEFLPPLIRKQLLLHPESDDSAQLSQIETEKLLAQLVETEMNRRLKEGTYKGKKFNAICHFFGYQARGALPSKFDCDYAYVLGHVCYHIIAAGLNSYMATVTNLKNPVNKWRCGATPISSMMTVKRWSRGPSATQIGKPAVHMASVDLKGKAYDVLRQNSSSFLLEDVYRNPGPLQFEGPGADSKPISLCVEDQDYMGRIKKLQEYLEKVKRIVKPGCSQDVLKAALSAMSSVTETLNIMTSSSTGQTPLSH

SEQ ID NO: 111635 - DNA, 672 bp, Zea mays subsp. mays
  misc_feature (1)..(672): Ceres Seq. ID no. 13623924
ccccccccccccccggtatgatctctagtggaaaagtattatcctgcagatttctcaaatcaagaaagaatgcaattagagtgccaattgccacattttcaacttgatgtttgcaaccatccagaactaaagggtttatcatctttggctgatttaacaagtggattagttaaattggataaagattcttcttatccgatggtagataaattattgagattactcttgactctccctgtgtcaactgcgaccacagagtgagccttttcagctatgaaatttgtgaagacacgtcttcgaagcaaaatgggagatgcctatttacgggattatctggtcgtttatattgaaagggaattagcggcaatgattagttctgatgatattatcaaggcctatgatctagctaatacacgtagagctaaattcaaaataactgagatgtaattttaatttgtttgacaaaatagatgctcttttattatattgttttgtaatgaagattatatatcaatatatgcattgtggttggttcccttgccatttttatattgtgtcattgctggtttggtcgcttggaggctaagcctgccccctctgtcttcggatcctggcttcgccccctggccaccaccagtgctgctgcttcccctatggcatgcccaaggtatg

SEQ ID NO: 111636 - protein, 63 aa, Zea mays subsp. mays
  misc_feature (1)..(63): Ceres Seq. ID no. 13623925
  misc_feature (2)..(63): Pfam Name: hAT family dimerisation domain Pfam Description: hAT family dimerisation domain
  misc_feature (1)..(63): Homolog of NCBI NO: 4063770 NR Description: transposase [Ipomoea purpurea]
  misc_feature (1)..(63): Homolog of NCBI NO: 32488762 NR Description: OSJNBb0016D16.6 [Oryza sativa (japonica
  misc_feature (1)..(63): Homolog of NCBI NO: 34913676 NR Description: putative transposase [Oryza sativa (japonica
  misc_feature (1)..(63): Homolog of NCBI NO: 38344561 NR Description: OSJNBa0065B15.7 [Oryza sativa (japonica
  misc_feature (1)..(63): Homolog of NCBI NO: 32489464 NR Description: OSJNBa0028M15.10 [Oryza sativa (japonica
  misc_feature (1)..(63): Homolog of NCBI NO: 25518425 NR Description: hypothetical protein T29M8.13 [imported] -
  misc_feature (1)..(63): Homolog of NCBI NO: 15221982 NR Description: transposase -related [Arabidopsis thaliana]
  misc_feature (1)..(63): Homolog of NCBI NO: 15230070 NR Description: transposase -related [Arabidopsis thaliana]
  misc_feature (1)..(63): Homolog of NCBI NO: 37537014 NR Description: putative transposase [Oryza sativa (japonica
  misc_feature (1)..(63): Homolog of NCBI NO: 37534546 NR Description: putative transposase [Oryza sativa (japonica
MQLECQLPHFQLDVCNHPELKGLSSLADLTSGLVKLDKDSSYPMVDKLLRLLLTLPVSTATTE

SEQ ID NO: 111637 - protein, 57 aa, Zea mays subsp. mays
  misc_feature (1)..(57): Ceres Seq. ID no. 13623926
  misc_feature (1)..(51): Homolog of NCBI NO: 32488762 NR Description: OSJNBb0016D16.6 [Oryza sativa (japonica
  misc_feature (1)..(51): Homolog of NCBI NO: 34913676 NR Description: putative transposase [Oryza sativa (japonica
  misc_feature (1)..(42): Homolog of NCBI NO: 38344561 NR Description: OSJNBa0065B15.7 [Oryza sativa (japonica
  misc_feature (1)..(49): Homolog of NCBI NO: 32489464 NR Description: OSJNBa0028M15.10 [Oryza sativa (japonica
  misc_feature (1)..(49): Homolog of NCBI NO: 25518425 NR Description: hypothetical protein T29M8.13 [imported] -
  misc_feature (1)..(49): Homolog of NCBI NO: 15221982 NR Description: transposase -related [Arabidopsis thaliana]
  misc_feature (1)..(49): Homolog of NCBI NO: 15230070 NR Description: transposase -related [Arabidopsis thaliana]
  misc_feature (1)..(53): Homolog of NCBI NO: 37537014 NR Description: putative transposase [Oryza sativa (japonica
  misc_feature (1)..(49): Homolog of NCBI NO: 37534546 NR Description: putative transposase [Oryza sativa (japonica
  misc_feature (1)..(52): Homolog of NCBI NO: 4063770 NR Description: transposase [Ipomoea purpurea]
MKFVKTRLRSKMGDAYLRDYLVVYIERELAAMISSDDIIKAYDLANTRRAKFKITEM

SEQ ID NO: 111638 - protein, 46 aa, Zea mays subsp. mays
  misc_feature (1)..(46): Ceres Seq. ID no. 13623927
  misc_feature (1)..(40): Homolog of NCBI NO: 32488762 NR Description: OSJNBb0016D16.6 [Oryza sativa (japonica
  misc_feature (1)..(40): Homolog of NCBI NO: 34913676 NR Description: putative transposase [Oryza sativa (japonica
  misc_feature (1)..(31): Homolog of NCBI NO: 38344561 NR Description: OSJNBa0065B15.7 [Oryza sativa (japonica
  misc_feature (1)..(38): Homolog of NCBI NO: 32489464 NR Description: OSJNBa0028M15.10 [Oryza sativa (japonica
  misc_feature (1)..(38): Homolog of NCBI NO: 25518425 NR Description: hypothetical protein T29M8.13 [imported] -
  misc_feature (1)..(38): Homolog of NCBI NO: 15221982 NR Description: transposase -related [Arabidopsis thaliana]
  misc_feature (1)..(38): Homolog of NCBI NO: 15230070 NR Description: transposase -related [Arabidopsis thaliana]
  misc_feature (1)..(42): Homolog of NCBI NO: 37537014 NR Description: putative transposase [Oryza sativa (japonica
  misc_feature (1)..(38): Homolog of NCBI NO: 37534546 NR Description: putative transposase [Oryza sativa (japonica
  misc_feature (1)..(41): Homolog of NCBI NO: 4063770 NR Description: transposase [Ipomoea purpurea]
MGDAYLRDYLVVYIERELAAMISSDDIIKAYDLANTRRAKFKITEM

SEQ ID NO: 111639 - DNA, 2227 bp, Zea mays subsp. mays
  misc_feature (1)..(2227): Ceres Seq. ID no. 15224676
tttgggcagggaagtggaccttttcagccggcaacaatgcttgggggtaattgccagcagattgctccaaattttggaggttcgttttttgggcaagggaatttggtgtttggtcagcgcttgcaaggttcgcagttagggttcaatcaaggatttggtggcagcactggaggcaatagggatttgtcttggacacatgggcgagatcatcgtgctcggtctgcgcatgcaccccgtgctgggaagttcagtgccaacaaacatgttgtagagggtgggaaattggagaattctctgcaacaccaggggcagcgcaccaataaaatgatgcagaacaatgctgaacctgaacctatgaagctgaatgcaaaacggataatggaagaaatggttgacaataggcatgacaaaaaaggatggagaagcaagatgagaatgtaatagttcaggatgctataaagatcactccagggattgaggcaccaaaaggtaaaccaaaatggtgtttccggtgtagaactaaggggcatgctacaacagaatgtaccgcgatccttttctgcaatatatgtgagggaggtgatcatgtagcagccacttgcccaatcaagaaaaaacctcgaccggtggctctctcagtcggttatgctgtggatggtttaggtttctttcatattccacatgggccgatttctactaccaaaaatgaaaagaatatggcactaatcaaagttataggaggtgcacttcaacaagcagatttggttgcccacttacagcggctggtgcctggaaagtttgaatgggatgcacaactgcatgcaccaaataaatgggtaacatcctttccttcaaaagtagaattaaagcgaacagtgaattttggttctgctgatctaaagaatggcttagtgttaaaatttgaagaatttgaggaggaatactttggagtggaactgcctcgtgtgtggatgcgggtactgaatttacctaacgtacttcgaacatatgaggtgttgtgggctattggaacgatgattggagctactacaaaggtggatatgatcactactcgaaagagtaattttggtcgatttgaggtggctgttctaaacacatcaatagtgcctacacagatagatgttgtcattggcacaagatggtttgaattacaacttcaaattgagagcacaagttcttcttcagggacaagaacgactgaggataatggtaacgctaatggcgacaatcaggaaaaaggcaatgactcagaaatgaaggatgaagaagctggtgctaaggatcataagtcctctcattcaaatgtttctttttcagttaaaggagcagggacctctaaaggacagcaggttgatgatggttccattgaggatttagaggaagatggtttattggatgttggttgggaggtggcagatggtcctactactgatttaccctctgaattgtatctagataattatgtagtccaaaaagacaacaacaatattcaaattcagaaaaatatgggcaatgatgttgagcagatgcaaccccatgtacaggctaatttaaggaaaaatcgcttgttcacaatcagtgaaacacatgctgaatcacaacctacagcaatacaaacaaagcaaaaccagaaagaagatgatcgcggcatcgaagctactgcatcagatgccctaggtcctttgctagatagggccttgacagagcttaaagaaaggcagtttccacataatggcagcacagaggatggtcaagttctaactgacaaccagctacacactccaccataccaggtgaaaaaagctataatgctaggacaccgaagaggaggagtaaaaggagggaggactctgtcaacgaagattccatcgaacgtgctgaaaggttggtggcaaaaaggaatttggagaattctaaaggtagtgttcagaggaacccactggataagacaatggtccgtgttgcaaaaagaggaaaacatgacacaaatcaagtggggatgtcgtgcgcttgagactacaatgatgcaaattttctcatacaacggatggagttttagtaatcgaattggtttttagtagatttcgaaatatggttgttcttgagatattaaacatcatgtgttttggtttgagatgtaataattgaacagccacatgcatctattggtgcagaagctggaatatttcaatatattccccattct

SEQ ID NO: 111640 - protein, 560 aa, Zea mays subsp. mays
  misc_feature (1)..(560): Ceres Seq. ID no. 15224677
  misc_feature (18)..(285): Homolog of NCBI NO: 38346464 NR Description: OSJNBa0019G23.12 [Oryza sativa (japonica
  misc_feature (11)..(294): Homolog of NCBI NO: 37700336 NR Description: putative endonuclease/exonuclease/phosphatase
  misc_feature (28)..(184): Homolog of NCBI NO: 38345598 NR Description: OSJNBb0012E24.16 [Oryza sativa (japonica
  misc_feature (54)..(334): Homolog of NCBI NO: 37718853 NR Description: hypothetical protein [Oryza sativa (japonica
  misc_feature (76)..(332): Homolog of NCBI NO: 31126775 NR Description: hypothetical protein [Oryza sativa (japonica
  misc_feature (503)..(559): Homolog of NCBI NO: 34896522 NR Description: putative reverse transcriptase
  misc_feature (19)..(88): Homolog of NCBI NO: 34896522 NR Description: putative reverse transcriptase
  misc_feature (146)..(443): Homolog of NCBI NO: 34896522 NR Description: putative reverse transcriptase
  misc_feature (42)..(114): Homolog of NCBI NO: 37534700 NR Description: putative non-LTR retroelement reverse
  misc_feature (148)..(480): Homolog of NCBI NO: 37534700 NR Description: putative non-LTR retroelement reverse
MEKQDENVIVQDAIKITPGIEAPKGKPKWCFRCRTKGHATTECTAILFCNICEGGDHVAATCPIKKKPRPVALSVGYAVDGLGFFHIPHGPISTTKNEKNMALIKVIGGALQQADLVAHLQRLVPGKFEWDAQLHAPNKWVTSFPSKVELKRTVNFGSADLKNGLVLKFEEFEEEYFGVELPRVWMRVLNLPNVLRTYEVLWAIGTMIGATTKVDMITTRKSNFGRFEVAVLNTSIVPTQIDVVIGTRWFELQLQIESTSSSSGTRTTEDNGNANGDNQEKGNDSEMKDEEAGAKDHKSSHSNVSFSVKGAGTSKGQQVDDGSIEDLEEDGLLDVGWEVADGPTTDLPSELYLDNYVVQKDNNNIQIQKNMGNDVEQMQPHVQANLRKNRLFTISETHAESQPTAIQTKQNQKEDDRGIEATASDALGPLLDRALTELKERQFPHNGSTEDGQVLTDNQLHTPPYQVKKAIMLGHRRGGVKGGRTLSTKIPSNVLKGWWQKGIWRILKVVFRGTHWIRQWSVLQKEENMTQIKWGCRALETTMMQIFSYNGWSFSNRIGF

SEQ ID NO: 111641 - protein, 460 aa, Zea mays subsp. mays
  misc_feature (1)..(460): Ceres Seq. ID no. 15224678
  misc_feature (1)..(205): Homolog of NCBI NO: 32489466 NR Description: OSJNBa0028M15.12 [Oryza sativa (japonica
  misc_feature (1)..(185): Homolog of NCBI NO: 38346464 NR Description: OSJNBa0019G23.12 [Oryza sativa (japonica
  misc_feature (1)..(194): Homolog of NCBI NO: 37700336 NR Description: putative endonuclease/exonuclease/phosphatase
  misc_feature (1)..(84): Homolog of NCBI NO: 38345598 NR Description: OSJNBb0012E24.16 [Oryza sativa (japonica
  misc_feature (1)..(234): Homolog of NCBI NO: 37718853 NR Description: hypothetical protein [Oryza sativa (japonica
  misc_feature (1)..(232): Homolog of NCBI NO: 31126775 NR Description: hypothetical protein [Oryza sativa (japonica
  misc_feature (403)..(459): Homolog of NCBI NO: 34896522 NR Description: putative reverse transcriptase
  misc_feature (46)..(343): Homolog of NCBI NO: 34896522 NR Description: putative reverse transcriptase
  misc_feature (1)..(14): Homolog of NCBI NO: 37534700 NR Description: putative non-LTR retroelement reverse
  misc_feature (48)..(380): Homolog of NCBI NO: 37534700 NR Description: putative non-LTR retroelement reverse
MALIKVIGGALQQADLVAHLQRLVPGKFEWDAQLHAPNKWVTSFPSKVELKRTVNFGSADLKNGLVLKFEEFEEEYFGVELPRVWMRVLNLPNVLRTYEVLWAIGTMIGATTKVDMITTRKSNFGRFEVAVLNTSIVPTQIDVVIGTRWFELQLQIESTSSSSGTRTTEDNGNANGDNQEKGNDSEMKDEEAGAKDHKSSHSNVSFSVKGAGTSKGQQVDDGSIEDLEEDGLLDVGWEVADGPTTDLPSELYLDNYVVQKDNNNIQIQKNMGNDVEQMQPHVQANLRKNRLFTISETHAESQPTAIQTKQNQKEDDRGIEATASDALGPLLDRALTELKERQFPHNGSTEDGQVLTDNQLHTPPYQVKKAIMLGHRRGGVKGGRTLSTKIPSNVLKGWWQKGIWRILKVVFRGTHWIRQWSVLQKEENMTQIKWGCRALETTMMQIFSYNGWSFSNRIGF

SEQ ID NO: 111642 - protein, 375 aa, Zea mays subsp. mays
  misc_feature (1)..(375): Ceres Seq. ID no. 15224679
  misc_feature (1)..(150): Homolog of NCBI NO: 38345001 NR Description: OSJNBa0052O21.4 [Oryza sativa (japonica
  misc_feature (19)..(141): Homolog of NCBI NO: 37806138 NR Description: hypothetical protein [Oryza sativa (japonica
  misc_feature (1)..(120): Homolog of NCBI NO: 32489466 NR Description: OSJNBa0028M15.12 [Oryza sativa (japonica
  misc_feature (1)..(100): Homolog of NCBI NO: 38346464 NR Description: OSJNBa0019G23.12 [Oryza sativa (japonica
  misc_feature (1)..(109): Homolog of NCBI NO: 37700336 NR Description: putative endonuclease/exonuclease/phosphatase
  misc_feature (1)..(149): Homolog of NCBI NO: 37718853 NR Description: hypothetical protein [Oryza sativa (japonica
  misc_feature (1)..(147): Homolog of NCBI NO: 31126775 NR Description: hypothetical protein [Oryza sativa (japonica
  misc_feature (318)..(374): Homolog of NCBI NO: 34896522 NR Description: putative reverse transcriptase
  misc_feature (1)..(258): Homolog of NCBI NO: 34896522 NR Description: putative reverse transcriptase
  misc_feature (1)..(295): Homolog of NCBI NO: 37534700 NR Description: putative non-LTR retroelement reverse
MRVLNLPNVLRTYEVLWAIGTMIGATTKVDMITTRKSNFGRFEVAVLNTSIVPTQIDVVIGTRWFELQLQIESTSSSSGTRTTEDNGNANGDNQEKGNDSEMKDEEAGAKDHKSSHSNVSFSVKGAGTSKGQQVDDGSIEDLEEDGLLDVGWEVADGPTTDLPSELYLDNYVVQKDNNNIQIQKNMGNDVEQMQPHVQANLRKNRLFTISETHAESQPTAIQTKQNQKEDDRGIEATASDALGPLLDRALTELKERQFPHNGSTEDGQVLTDNQLHTPPYQVKKAIMLGHRRGGVKGGRTLSTKIPSNVLKGWWQKGIWRILKVVFRGTHWIRQWSVLQKEENMTQIKWGCRALETTMMQIFSYNGWSFSNRIGF

SEQ ID NO: 111643 - DNA, 1253 bp, Zea mays subsp. mays
  misc_feature (1)..(1253): Ceres Seq. ID no. 12637240
ggcggcactggtgcgtcgcgtggcaggcctcgagggaggcccaggaaagcagatgcctgcatggacgaagatgagattcaagacaaactggagtatccgtcggctgctgagatgttgctgcagcttctgtccatcgccacggatcctgtaaatggcaattatgactctgctcctgtgattgttagcttcttctcaaagcacaaggactccgatgtgcctagtttatatgaagacaaagaactgattgagaattttggtggcaagaagggtaagaaaaagtccatcggaagcttgggcccagctacaaagccagaagccagcgatgatactgtggatggtcagaggggccgtaggaagtctgctgggagcttgtactcagctagaaaggccgaagattcatattggtgtgatattatcatcagcgatttcgatgacggagacagtgactatgacagtcacaagaggaagcggccctgtaacaggagcaccaataagaagatgaagcaggaggagccacctcaaggagccccatcatcgaatgcaaaacctgcagatggtccagccgcccttattctacatttcagcagtccagaagctattccttctgttgatgacatcaatagcatattccgtattcatggacctattgtggagcgtgagactgtgatcactaagaagtcaaagattgcaaaagtagttttctctaagagtgttgatgcagagcaggcacatcacagttccggaaagcgtaatgcatttggtccatcgcttctcacatctgaaattaagtacttgccatcggcacctcaggtttcttaaatgccgcagtctggactggtggatacgccgtggaaatgcgccatgaagcttggagcaacggagcataagttggtgtcactgactttactgaccaggtcacagtagtcactgagttgagtgagcaaattttaggctttctgtggttacatgcatccatttgactgattgtcgacccggagtttgttgtttatgttgatagtagattagattatgtagcatgatgtgcttcctcttatgctagcaacttttttttggtattgcctagtaattgcacagctgtggatctctctattatgtttttttatttgattgtcacgaggctagtgaagccgctttagtgcaaaaaaaaaaaaaaaaaaaaaaaaaaaaaaaaaaaaaaaaaaaaaaaaaaaaaaagaaaaaaaaaaaaaaaaaaactcgagggggggcccggt

SEQ ID NO: 111644 - protein, 272 aa, Zea mays subsp. mays
  misc_feature (1)..(272): Ceres Seq. ID no. 12637241
  misc_feature (113)..(262): Homolog of NCBI NO: 15232577 NR Description: Putative protein; protein id: At3g54760.1
  misc_feature (158)..(265): Homolog of NCBI NO: 15242573 NR Description: PWWP domain protein; protein id: At5g02950.1
  misc_feature (2)..(148): Homolog of NCBI NO: 34394030 NR Description: unknown protein [Oryza sativa (japonica
  misc_feature (2)..(271): Homolog of NCBI NO: 34394029 NR Description: PWWP domain protein-like [Oryza sativa (japonica
GGTGASRGRPRGRPRKADACMDEDEIQDKLEYPSAAEMLLQLLSIATDPVNGNYDSAPVIVSFFSKHKDSDVPSLYEDKELIENFGGKKGKKKSIGSLGPATKPEASDDTVDGQRGRRKSAGSLYSARKAEDSYWCDIIISDFDDGDSDYDSHKRKRPCNRSTNKKMKQEEPPQGAPSSNAKPADGPAALILHFSSPEAIPSVDDINSIFRIHGPIVERETVITKKSKIAKVVFSKSVDAEQAHHSSGKRNAFGPSLLTSEIKYLPSAPQVS

SEQ ID NO: 111645 - protein, 252 aa, Zea mays subsp. mays
  misc_feature (1)..(252): Ceres Seq. ID no. 12637242
  misc_feature (93)..(242): Homolog of NCBI NO: 15232577 NR Description: Putative protein; protein id: At3g54760.1
  misc_feature (138)..(245): Homolog of NCBI NO: 15242573 NR Description: PWWP domain protein; protein id: At5g02950.1
  misc_feature (1)..(128): Homolog of NCBI NO: 34394030 NR Description: unknown protein [Oryza sativa (japonica
  misc_feature (1)..(251): Homolog of NCBI NO: 34394029 NR Description: PWWP domain protein-like [Oryza sativa (japonica
MDEDEIQDKLEYPSAAEMLLQLLSIATDPVNGNYDSAPVIVSFFSKHKDSDVPSLYEDKELIENFGGKKGKKKSIGSLGPATKPEASDDTVDGQRGRRKSAGSLYSARKAEDSYWCDIIISDFDDGDSDYDSHKRKRPCNRSTNKKMKQEEPPQGAPSSNAKPADGPAALILHFSSPEAIPSVDDINSIFRIHGPIVERETVITKKSKIAKVVFSKSVDAEQAHHSSGKRNAFGPSLLTSEIKYLPSAPQVS

SEQ ID NO: 111646 - protein, 235 aa, Zea mays subsp. mays
  misc_feature (1)..(235): Ceres Seq. ID no. 12637243
  misc_feature (76)..(225): Homolog of NCBI NO: 15232577 NR Description: Putative protein; protein id: At3g54760.1
  misc_feature (121)..(228): Homolog of NCBI NO: 15242573 NR Description: PWWP domain protein; protein id: At5g02950.1
  misc_feature (1)..(111): Homolog of NCBI NO: 34394030 NR Description: unknown protein [Oryza sativa (japonica
  misc_feature (1)..(234): Homolog of NCBI NO: 34394029 NR Description: PWWP domain protein-like [Oryza sativa (japonica
MLLQLLSIATDPVNGNYDSAPVIVSFFSKHKDSDVPSLYEDKELIENFGGKKGKKKSIGSLGPATKPEASDDTVDGQRGRRKSAGSLYSARKAEDSYWCDIIISDFDDGDSDYDSHKRKRPCNRSTNKKMKQEEPPQGAPSSNAKPADGPAALILHFSSPEAIPSVDDINSIFRIHGPIVERETVITKKSKIAKVVFSKSVDAEQAHHSSGKRNAFGPSLLTSEIKYLPSAPQVS

SEQ ID NO: 111647 - DNA, 1715 bp, Zea mays subsp. mays
  misc_feature (1)..(1715): Ceres Seq. ID no. 13600272
atatagtttattttatctttgatgagaaagctcttctaattaattcaagactgccttgattttcccagttattactcgagcgcgctgaggcaactctgaactaagctggtagtaggtatgcttccctccagcaccttgaagatcgaggtttttctttttgaaaagcggatttatccatcgtctttgtttgttaaagtaaagtaaagtatggaattctcaccaagagctgcggaacttacgactctattagaaagtagaatgatcaacttttacacgaatttgaaagtggatgagatcggtcgagtggtctcagttggagatggagagcccgcgcagccccgaggcggagatcggccaccgggtggaggacctctgggaggtggcggagccgcagctctcgccgtcggagaagctcaactcctgcttcgaggacatccccgtcgcgtccttcccgcgcacgcacccgtcccaagtcattgagattccttcagatgcaagtcttgctgaaactgtagaaatattatccaaaaacaaaatcttgagtgcacccataagaaatgttgaggctccagaagatgctagttggatggacaaatacatcggcattgtggaatttgctggtattgccatgtggttgctcagtcagtctgatgctgcagttaatgggacggttggttcgggaccaggatcgcctgtctccagtctagtttcgaggttgggttctttcacattcagaaggacatcatctggaagattagaaactgctactgattctgaatcagacgaagcagcatcggttggtgggagcttttttgaaaccctgacttcctctgaattctacaagaatacaaaggttggcgatatctcagggagcttccgctgggcaccatttcttgcactgcagacatctgacacattccttaccatgttgctgcttctatccaagtacagaatgaagagccttccagttgtagaagtgggaggagataagattgagaacattatcacacaatcctctgtcgtacacatgcttgcagagtgtgttgggctctcctggtttgagaactggggaaagggagttggtggcttgccagtcatggacacaagtggagcaaatgccattggtaatattagcatcagagatgtccagtatcttttaactgctcccaagatatacaaagagcacaggtcaatcacgacaaaggatttccttagtgctgttcgacaccacctccaggagcagcgtgaggcctcaccgttgctgcatgatgtcatcacttgcaaaaaggatgatacaatcaaggacatcatactgaagctggactctgagaagatccacaggatctacgttgtggatgacaaagggaacaccgagggagtcatcaccttgagggacataatctccaagctggtgcatgagccacgccattactttggggatttctttgatggtgttgttcccctgcctgcaaacagcaccgtatgacacatcttcgcggtccaatcacactgatgtatctgtgcaaatgtacattttgagctattctcttctgaagttgcttctagtgtattccttttctcagccttctcggttctcaggtaaacagaccattgcctacatggagaaaaggactaatgctctaatggatggatggcaatgttgtacattgaataatcaaaaaaaaaaaaaaaaaaaactcgagggggggcccggt

SEQ ID NO: 111648 - protein, 398 aa, Zea mays subsp. mays
  misc_feature (1)..(398): Ceres Seq. ID no. 13600273
  misc_feature (60)..(117): Pfam Name: CBS domain Pfam Description: CBS domain
  misc_feature (163)..(270): Homolog of NCBI NO: 21592917 NR Description: unknown [Arabidopsis thaliana]
  misc_feature (262)..(398): Homolog of NCBI NO: 21592917 NR Description: unknown [Arabidopsis thaliana]
  misc_feature (163)..(270): Homolog of NCBI NO: 15228397 NR Description: CBS domain containing protein [Arabidopsis
  misc_feature (262)..(398): Homolog of NCBI NO: 15228397 NR Description: CBS domain containing protein [Arabidopsis
  misc_feature (262)..(398): Homolog of NCBI NO: 19386799 NR Description: OJ1485_B09.7 [Oryza sativa (japonica
  misc_feature (16)..(273): Homolog of NCBI NO: 19386799 NR Description: OJ1485_B09.7 [Oryza sativa (japonica
  misc_feature (238)..(398): Homolog of NCBI NO: 32364482 NR Description: AKIN gamma [Medicago truncatula]
  misc_feature (12)..(270): Homolog of NCBI NO: 32364482 NR Description: AKIN gamma [Medicago truncatula]
  misc_feature (262)..(398): Homolog of NCBI NO: 38346640 NR Description: OSJNBa0072D21.10 [Oryza sativa (japonica
  misc_feature (9)..(270): Homolog of NCBI NO: 38346640 NR Description: OSJNBa0072D21.10 [Oryza sativa (japonica
MRSVEWSQLEMESPRSPEAEIGHRVEDLWEVAEPQLSPSEKLNSCFEDIPVASFPRTHPSQVIEIPSDASLAETVEILSKNKILSAPIRNVEAPEDASWMDKYIGIVEFAGIAMWLLSQSDAAVNGTVGSGPGSPVSSLVSRLGSFTFRRTSSGRLETATDSESDEAASVGGSFFETLTSSEFYKNTKVGDISGSFRWAPFLALQTSDTFLTMLLLLSKYRMKSLPVVEVGGDKIENIITQSSVVHMLAECVGLSWFENWGKGVGGLPVMDTSGANAIGNISIRDVQYLLTAPKIYKEHRSITTKDFLSAVRHHLQEQREASPLLHDVITCKKDDTIKDIILKLDSEKIHRIYVVDDKGNTEGVITLRDIISKLVHEPRHYFGDFFDGVVPLPANSTV

SEQ ID NO: 111649 - protein, 388 aa, Zea mays subsp. mays
  misc_feature (1)..(388): Ceres Seq. ID no. 13600274
  misc_feature (50)..(107): Pfam Name: CBS domain Pfam Description: CBS domain
  misc_feature (153)..(260): Homolog of NCBI NO: 21592917 NR Description: unknown [Arabidopsis thaliana]
  misc_feature (252)..(388): Homolog of NCBI NO: 21592917 NR Description: unknown [Arabidopsis thaliana]
  misc_feature (153)..(260): Homolog of NCBI NO: 15228397 NR Description: CBS domain containing protein [Arabidopsis
  misc_feature (252)..(388): Homolog of NCBI NO: 15228397 NR Description: CBS domain containing protein [Arabidopsis
  misc_feature (252)..(388): Homolog of NCBI NO: 19386799 NR Description: OJ1485_B09.7 [Oryza sativa (japonica
  misc_feature (6)..(263): Homolog of NCBI NO: 19386799 NR Description: OJ1485_B09.7 [Oryza sativa (japonica
  misc_feature (228)..(388): Homolog of NCBI NO: 32364482 NR Description: AKIN gamma [Medicago truncatula]
  misc_feature (2)..(260): Homolog of NCBI NO: 32364482 NR Description: AKIN gamma [Medicago truncatula]
  misc_feature (252)..(388): Homolog of NCBI NO: 38346640 NR Description: OSJNBa0072D21.10 [Oryza sativa (japonica
  misc_feature (1)..(260): Homolog of NCBI NO: 38346640 NR Description: OSJNBa0072D21.10 [Oryza sativa (japonica
MESPRSPEAEIGHRVEDLWEVAEPQLSPSEKLNSCFEDIPVASFPRTHPSQVIEIPSDASLAETVEILSKNKILSAPIRNVEAPEDASWMDKYIGIVEFAGIAMWLLSQSDAAVNGTVGSGPGSPVSSLVSRLGSFTFRRTSSGRLETATDSESDEAASVGGSFFETLTSSEFYKNTKVGDISGSFRWAPFLALQTSDTFLTMLLLLSKYRMKSLPVVEVGGDKIENIITQSSVVHMLAECVGLSWFENWGKGVGGLPVMDTSGANAIGNISIRDVQYLLTAPKIYKEHRSITTKDFLSAVRHHLQEQREASPLLHDVITCKKDDTIKDIILKLDSEKIHRIYVVDDKGNTEGVITLRDIISKLVHEPRHYFGDFFDGVVPLPANSTV

SEQ ID NO: 111650 - protein, 299 aa, Zea mays subsp. mays
  misc_feature (1)..(299): Ceres Seq. ID no. 13600275
  misc_feature (163)..(299): Homolog of NCBI NO: 15228397 NR Description: CBS domain containing protein [Arabidopsis
  misc_feature (163)..(299): Homolog of NCBI NO: 19386799 NR Description: OJ1485_B09.7 [Oryza sativa (japonica
  misc_feature (1)..(174): Homolog of NCBI NO: 19386799 NR Description: OJ1485_B09.7 [Oryza sativa (japonica
  misc_feature (139)..(299): Homolog of NCBI NO: 32364482 NR Description: AKIN gamma [Medicago truncatula]
  misc_feature (1)..(171): Homolog of NCBI NO: 32364482 NR Description: AKIN gamma [Medicago truncatula]
  misc_feature (163)..(299): Homolog of NCBI NO: 38346640 NR Description: OSJNBa0072D21.10 [Oryza sativa (japonica
  misc_feature (1)..(171): Homolog of NCBI NO: 38346640 NR Description: OSJNBa0072D21.10 [Oryza sativa (japonica
  misc_feature (64)..(171): Homolog of NCBI NO: 21592917 NR Description: unknown [Arabidopsis thaliana]
  misc_feature (163)..(299): Homolog of NCBI NO: 21592917 NR Description: unknown [Arabidopsis thaliana]
  misc_feature (64)..(171): Homolog of NCBI NO: 15228397 NR Description: CBS domain containing protein [Arabidopsis
MDKYIGIVEFAGIAMWLLSQSDAAVNGTVGSGPGSPVSSLVSRLGSFTFRRTSSGRLETATDSESDEAASVGGSFFETLTSSEFYKNTKVGDISGSFRWAPFLALQTSDTFLTMLLLLSKYRMKSLPVVEVGGDKIENIITQSSVVHMLAECVGLSWFENWGKGVGGLPVMDTSGANAIGNISIRDVQYLLTAPKIYKEHRSITTKDFLSAVRHHLQEQREASPLLHDVITCKKDDTIKDIILKLDSEKIHRIYVVDDKGNTEGVITLRDIISKLVHEPRHYFGDFFDGVVPLPANSTV

SEQ ID NO: 111651 - DNA, 613 bp, Zea mays subsp. mays
  misc_feature (1)..(613): Ceres Seq. ID no. 12594347
tatatttggttatttctccaccgtcagagatgcggcctagtaacctgtgtgccagatgcattttcatgaaatggcaaagtgccattgccaccctcaatatgtatatctgtgtgcaactctctgcgtgcatgattcttcacttagaggggaaaaataatcttatatcctttcgtgccataagattttcagaatccgattatcctctacgacagcacaaggtgtgacaaaccgcactgccatgcaatgcagattcagggaatctttcaacatatattcctctctccaggctttcattataaatagaggccaactgggttttgcacttcatacaaccccagaccttcagagcttacaaggagtagcagagctcagaagagcattcgtattcagcacatagtgcgccttcttgaaagaactgtacaggagatcacacaatgagctattacggcagcagctcttctggtggacgaagcagtaggagagtcgactatgggaggacatatgtggtgaggccaaagggaaggcacctagccaccattgtgtggctccatggcataggtgacaatggtgctagctggtcccagctcctggattctcttcctctacaaatatc

SEQ ID NO: 111652 - protein, 73 aa, Zea mays subsp. mays
  misc_feature (1)..(73): Ceres Seq. ID no. 12594348
YLVISPPSEMRPSNLCARCIFMKWQSAIATLNMYICVQLSACMILHLEGKNNLISFRAIRFSESDYPLRQHKV

SEQ ID NO: 111653 - protein, 64 aa, Zea mays subsp. mays
  misc_feature (1)..(64): Ceres Seq. ID no. 12594349
MRPSNLCARCIFMKWQSAIATLNMYICVQLSACMILHLEGKNNLISFRAIRFSESDYPLRQHKV

SEQ ID NO: 111654 - protein, 59 aa, Zea mays subsp. mays
  misc_feature (1)..(59): Ceres Seq. ID no. 12594350
  misc_feature (1)..(57): Homolog of NCBI NO: 15219072 NR Description: unknown protein; protein id: At1g52700.1
  misc_feature (1)..(57): Homolog of NCBI NO: 5903036 NR Description: F6D8.5 [Arabidopsis thaliana]
  misc_feature (1)..(57): Homolog of NCBI NO: 15232645 NR Description: putative lysophospholipase; protein id:
  misc_feature (1)..(57): Homolog of NCBI NO: 15241251 NR Description: putative protein
  misc_feature (1)..(57): Homolog of NCBI NO: 29409364 NR Description: biostress-resistance-related protein [Triticum
  misc_feature (2)..(57): Homolog of NCBI NO: 34910274 NR Description: OSJNBa0089K24.24 [Oryza sativa (japonica
MSYYGSSSSGGRSSRRVDYGRTYVVRPKGRHLATIVWLHGIGDNGASWSQLLDSLPLQI

SEQ ID NO: 111655 - DNA, 1524 bp, Zea mays subsp. mays
  misc_feature (1)..(1524): Ceres Seq. ID no. 15226179
ttcgttgattatatttttaggtgggtgcgttggcaaaagatgtttgcaagcgatgagttggggtgagccatgggtttgaccccattatcagggctatgtagcacagaagatagtgctgctagaaaatcttgttggcaatccctgcaaagttgagtggccacacattctttgatggtatccatgggtttaccaaccagaaatttaccaatggtatatgcatcttttactgaaatggtttgttaacatacagcaattcgataaggttcttgagccatgtcttttgcctgagctgtatctgaaaagaaaagacttgccactagaaaaatgtctattgttttaatacaaaatcttatatagtgaccaaagtggtgtctaactgtgaagacatgtatgatctgttgattatcaatatttgtttggtattttctactcaaaaaaagctgttcaggatgttcctttaacatttaatgtgatattaatagctgtgtccgcttccgctattacatatatttgtatttctatcctttaattgcttagccccctcttaacttcgtttcatgatccaccattgtttgttaggctgatgacgaggacaaacgatgcaagtggtggtgggaagcttccccggaagcgcttctatcgcgccagggcacacagcaacccgctcagcgactcgcacttcccagtcccaatatcgcctgaagaggtcgatctctcacagcactacccgcggtacttccctgctgacaagggcagcgacggtgaggaggctgcagcgccacaacagatccgcttcgccgatgtggggtgcggatttggcgggttgcttgtagggctctcgcctctcttcccagatacgctcatgattggcatggagctcagggacaaggtaacggagtatgtgaaggagaggattttagctctaagaggggcaaacccaggacagtatgataacatatccgttgtccgcacgaactcgatgaaatacattccaaattacttcagaaaggctcagctcaccaagatgttcttcctgttccccgatccccacttcaaggagaagaaccacaggaggagggttatcagcatgcagctgttagacgagtatgcttacgtgatggaagtgggaggaatcatatataccatcactgatgtcgaggagctcggagagtggatgcggtcgtgtctagagaagcacccgttattcgaaaccgttcctgaggaagagattaaggctgaccctgttttcaaactactgtctactgccactgaagaaagccagaaggtggcaagaaatggaggacagactttctatgccatcttcaggcggatctccttacaagaagaataagtcgcttaagagattattagctagatcgtgttacgtgtgtttgtcagttttatacattttttaaaaaaaatttagcagtaggtgtacttggtactaaatattgcaatgttgctttgcaaggttctgcagacccaaaaaaaaaaacaaaaaaaactcgagggggggcccggtcc

SEQ ID NO: 111656 - protein, 255 aa, Zea mays subsp. mays
  misc_feature (1)..(255): Ceres Seq. ID no. 15226180
  misc_feature (35)..(250): Pfam Name: Putative methyltransferase Pfam Description: Putative methyltransferase
  misc_feature (58)..(250): Homolog of NCBI NO: 32405284 NR Description: probable methyltransferase related protein
  misc_feature (13)..(250): Homolog of NCBI NO: 6320000 NR Description: Transfer RNA methyltransferase; Trm8p
  misc_feature (13)..(250): Homolog of NCBI NO: 17536689 NR Description: methyltransferase-like 1 (2L762) [Caenorhabditis
  misc_feature (13)..(250): Homolog of NCBI NO: 39597269 NR Description: Hypothetical protein CBG02883 [Caenorhabditis
  misc_feature (14)..(250): Homolog of NCBI NO: 6754682 NR Description: methyltransferase-like 1
  misc_feature (14)..(250): Homolog of NCBI NO: 15215058 NR Description: methyltransferase-like 1 [Mus musculus]
  misc_feature (14)..(250): Homolog of NCBI NO: 4160294 NR Description: methyltransferase-like protein 1 [Mus musculus]
  misc_feature (2)..(250): Homolog of NCBI NO: 10880981 NR Description: methyltransferase-like protein 1 isoform a
  misc_feature (2)..(250): Homolog of NCBI NO: 1418767 NR Description: D1075-like [Homo sapiens]
  misc_feature (2)..(251): Homolog of NCBI NO: 15238631 NR Description: methyltransferase-related protein [Arabidopsis
MTRTNDASGGGKLPRKRFYRARAHSNPLSDSHFPVPISPEEVDLSQHYPRYFPADKGSDGEEAAAPQQIRFADVGCGFGGLLVGLSPLFPDTLMIGMELRDKVTEYVKERILALRGANPGQYDNISVVRTNSMKYIPNYFRKAQLTKMFFLFPDPHFKEKNHRRRVISMQLLDEYAYVMEVGGIIYTITDVEELGEWMRSCLEKHPLFETVPEEEIKADPVFKLLSTATEESQKVARNGGQTFYAIFRRISLQEE

SEQ ID NO: 111657 - protein, 162 aa, Zea mays subsp. mays
  misc_feature (1)..(162): Ceres Seq. ID no. 15226181
  misc_feature (1)..(157): Pfam Name: Putative methyltransferase Pfam Description: Putative methyltransferase
  misc_feature (1)..(157): Homolog of NCBI NO: 32405284 NR Description: probable methyltransferase related protein
  misc_feature (1)..(157): Homolog of NCBI NO: 6320000 NR Description: Transfer RNA methyltransferase; Trm8p
  misc_feature (1)..(157): Homolog of NCBI NO: 17536689 NR Description: methyltransferase-like 1 (2L762) [Caenorhabditis
  misc_feature (1)..(157): Homolog of NCBI NO: 39597269 NR Description: Hypothetical protein CBG02883 [Caenorhabditis
  misc_feature (1)..(157): Homolog of NCBI NO: 15215058 NR Description: methyltransferase-like 1 [Mus musculus]
  misc_feature (1)..(157): Homolog of NCBI NO: 6754682 NR Description: methyltransferase-like 1
  misc_feature (1)..(157): Homolog of NCBI NO: 4160294 NR Description: methyltransferase-like protein 1 [Mus musculus]
  misc_feature (1)..(157): Homolog of NCBI NO: 10880981 NR Description: methyltransferase-like protein 1 isoform a
  misc_feature (1)..(157): Homolog of NCBI NO: 1418767 NR Description: D1075-like [Homo sapiens]
  misc_feature (1)..(158): Homolog of NCBI NO: 15238631 NR Description: methyltransferase-related protein [Arabidopsis
MIGMELRDKVTEYVKERILALRGANPGQYDNISVVRTNSMKYIPNYFRKAQLTKMFFLFPDPHFKEKNHRRRVISMQLLDEYAYVMEVGGIIYTITDVEELGEWMRSCLEKHPLFETVPEEEIKADPVFKLLSTATEESQKVARNGGQTFYAIFRRISLQEE

SEQ ID NO: 111658 - protein, 159 aa, Zea mays subsp. mays
  misc_feature (1)..(159): Ceres Seq. ID no. 15226182
  misc_feature (1)..(154): Pfam Name: Putative methyltransferase Pfam Description: Putative methyltransferase
  misc_feature (1)..(154): Homolog of NCBI NO: 32405284 NR Description: probable methyltransferase related protein
  misc_feature (1)..(154): Homolog of NCBI NO: 6320000 NR Description: Transfer RNA methyltransferase; Trm8p
  misc_feature (1)..(154): Homolog of NCBI NO: 17536689 NR Description: methyltransferase-like 1 (2L762) [Caenorhabditis
  misc_feature (1)..(154): Homolog of NCBI NO: 39597269 NR Description: Hypothetical protein CBG02883 [Caenorhabditis
  misc_feature (1)..(154): Homolog of NCBI NO: 15215058 NR Description: methyltransferase-like 1 [Mus musculus]
  misc_feature (1)..(154): Homolog of NCBI NO: 6754682 NR Description: methyltransferase-like 1
  misc_feature (1)..(154): Homolog of NCBI NO: 4160294 NR Description: methyltransferase-like protein 1 [Mus musculus]
  misc_feature (1)..(154): Homolog of NCBI NO: 10880981 NR Description: methyltransferase-like protein 1 isoform a
  misc_feature (1)..(154): Homolog of NCBI NO: 1418767 NR Description: D1075-like [Homo sapiens]
  misc_feature (1)..(155): Homolog of NCBI NO: 15238631 NR Description: methyltransferase-related protein [Arabidopsis
MELRDKVTEYVKERILALRGANPGQYDNISVVRTNSMKYIPNYFRKAQLTKMFFLFPDPHFKEKNHRRRVISMQLLDEYAYVMEVGGIIYTITDVEELGEWMRSCLEKHPLFETVPEEEIKADPVFKLLSTATEESQKVARNGGQTFYAIFRRISLQEE

SEQ ID NO: 111659 - DNA, 1844 bp, Zea mays subsp. mays
  misc_feature (1)..(1844): Ceres Seq. ID no. 12637271
  misc_feature: MA Experiment ID: 108535 Result: Up-regulated in Transcription
  misc_feature: MA Experiment 108535 PARAMETER Experiment Name: Zm_Meristem_P Parameter: Age (day) Value: 8
  misc_feature: MA Experiment 108535 PARAMETER Experiment Name: Zm_Meristem_P Parameter: Organism Value: Zea mays
  misc_feature: MA Experiment 108535 PARAMETER Experiment Name: Zm_Meristem_P Parameter: Plant Line Value: 35A19
  misc_feature: MA Experiment 108535 PARAMETER Experiment Name: Zm_Meristem_P Parameter: Tissue Value: Root Meristem vs. Above Root Meristem
  misc_feature: MA Experiment ID: 20000477 Result: Down-regulated in Transcription
  misc_feature: MA Experiment 20000477 PARAMETER Experiment Name: Zm_5mM_SA_P Parameter: Age (day) Value: 10
  misc_feature: MA Experiment 20000477 PARAMETER Experiment Name: Zm_5mM_SA_P Parameter: Organism Value: Zea mays
  misc_feature: MA Experiment 20000477 PARAMETER Experiment Name: Zm_5mM_SA_P Parameter: Plant Line Value: 35A19
  misc_feature: MA Experiment 20000477 PARAMETER Experiment Name: Zm_5mM_SA_P Parameter: Timepoint (hr) Value: 48
  misc_feature: MA Experiment 20000477 PARAMETER Experiment Name: Zm_5mM_SA_P Parameter: Tissue Value: Aerial
  misc_feature: MA Experiment 20000477 PARAMETER Experiment Name: Zm_5mM_SA_P Parameter: Treatment Value: 5mM SA vs. No Treatment
  misc_feature: MA Experiment ID: 20000478 Result: Down-regulated in Transcription
  misc_feature: MA Experiment 20000478 PARAMETER Experiment Name: Zm_5mM_SA_P Parameter: Age (day) Value: 11
  misc_feature: MA Experiment 20000478 PARAMETER Experiment Name: Zm_5mM_SA_P Parameter: Organism Value: Zea mays
  misc_feature: MA Experiment 20000478 PARAMETER Experiment Name: Zm_5mM_SA_P Parameter: Plant Line Value: 35A19
  misc_feature: MA Experiment 20000478 PARAMETER Experiment Name: Zm_5mM_SA_P Parameter: Timepoint (hr) Value: 72
  misc_feature: MA Experiment 20000478 PARAMETER Experiment Name: Zm_5mM_SA_P Parameter: Tissue Value: Aerial
  misc_feature: MA Experiment 20000478 PARAMETER Experiment Name: Zm_5mM_SA_P Parameter: Treatment Value: 5mM SA vs. No Treatment
  misc_feature: MA Experiment ID: 20000488 Result: Down-regulated in Transcription
  misc_feature: MA Experiment 20000488 PARAMETER Experiment Name: Zm_50mM_NH4NO3_L_to_H_P Parameter: Organism Value: Zea mays
  misc_feature: MA Experiment 20000488 PARAMETER Experiment Name: Zm_50mM_NH4NO3_L_to_H_P Parameter: Timepoint (hr) Value: 8
  misc_feature: MA Experiment 20000488 PARAMETER Experiment Name: Zm_50mM_NH4NO3_L_to_H_P Parameter: Tissue Value: Leaves
  misc_feature: MA Experiment 20000488 PARAMETER Experiment Name: Zm_50mM_NH4NO3_L_to_H_P Parameter: Treatment Value: 50mM NH4NO3 vs. 100mM Mannitol
  misc_feature: MA Experiment ID: 20000535 Result: Up-regulated in Transcription
  misc_feature: MA Experiment 20000535 PARAMETER Experiment Name: Zm_Hybrid_Seed_Dev_P Parameter: DAP Value: 30 vs. 12
  misc_feature: MA Experiment 20000535 PARAMETER Experiment Name: Zm_Hybrid_Seed_Dev_P Parameter: Organism Value: Zea mays
  misc_feature: MA Experiment 20000535 PARAMETER Experiment Name: Zm_Hybrid_Seed_Dev_P Parameter: Plant Line Value: 35A19
  misc_feature: MA Experiment 20000535 PARAMETER Experiment Name: Zm_Hybrid_Seed_Dev_P Parameter: Tissue Value: Embryo vs. Unfert Floret
gtggctagcggtgtggctccgtcagctgctccaggagctccatagttcgctgacatggagcacgctgggctactgtgatgtcagcgtcgtatatctctccatcaacctcgtctaacaccagcgcacgaagcatgtcgagctcgatctccacttcatgcgtgagcgtgtcgccattggagatgtgcgagttcatgtaccaaccacctctcagttcgccgacgtcttcaccaagggccatcccacgccggtgtttgaggagtttcggtccagtctcaacatctatcatggctagagttttgactgcggggggtgttagatgtatttgtgtgtggctgtcattgtattgggccaaggcccacctactctattattaatacatcacccaaccttattgagagagttagggtttcagtcttttccagaatgcaatattatctaagacacatatggatttgcttctctcctcaagttgatagacacatgttttttagaatgctaccttttttaatgaaaagtaggaagtattcctctgatcctataaccctatatattaatatacatgcatataaaagagtgattgtcacagtaagctacatttacattaaaatttgaatctttgtaaggtctactgttggcattggatgtcaagtagtatgatgaaagtttattttgttattatatctaagattgtgcttaaaactggtaggggcatttcacttctaggaaaagaaaaaaaaatcctactttgacctcttttttttatatcctggctggtttaggttatctgagatactgagaccagctagctatcagttagttatacttatgcacattctttgctccataagtattctttatcttcctatgttggcattttcaatttgagttgttgtcacctgaatttcaatacttcatattctataaataccccccccccccccctcaaactaacatatttcaagtatgtttgaacaatgaacagttggtagttctctaaaaaagtttaaggatcttgcaggtttcctgcttctgacaaggcctccaagatgaggaatcttgatgcctcgttgcttccgcaaaccaacaagaatgttcagcagcaaagtgaagtcgatgtgaagcttgcatcaatgctctatgaagctttacttagccttagagaacagataatggaggagtgtaacgaaggattcaatgcgtatcacatattcaaaacagacacgttgaaggaaatgagtatccgagtaccgagaacaaaagaagagcttttggatataaacggcctcggcaagacaaaggtcaagaagtacggggaccgcttgcttgcaaccatcgaggacttcctcagcaaacacccaaatccaaggagaaacagcggcggaggtggcggcggcaacgagcactccgatgcggcaaagaagcgaaggggctccaccgccatctctgcagcgagttacggcgactatgacttcgacgaacgcacgggccagcagtccaagaagcgcgcggccaagacgcgaactgtctctgcccacggcccccgctgcacggacgccgatctcgatgggcctgaggtggtggaggtggacggcgagctgcgcagcgtccggaagcccgtggcgtatggcaatggcagggttcttcccaagtgggcacccctctaacttattccaggaatttgggtacgtcaagtagagtagagtaccgctagggaataggaatgtaggcttgcacatatgtaatctcccaggttggctcgtgcacatgcagcgatgcagtgatgtcaagggttttctgtaaaaaagaaaaaaaaaaaaaaaaaaactcgagggggggcccggtac

SEQ ID NO: 111660 - protein, 205 aa, Zea mays subsp. mays
  misc_feature (1)..(205): Ceres Seq. ID no. 12637272
  misc_feature (14)..(177): Homolog of NCBI NO: 30020934 NR Description: ATP-dependent DNA helicase recQ [Bacillus cereus
  misc_feature (1)..(173): Homolog of NCBI NO: 28211708 NR Description: ATP-dependent DNA helicase recQ [Clostridium
  misc_feature (1)..(82): Homolog of NCBI NO: 30696491 NR Description: DNA helicase, putative [Arabidopsis thaliana]
  misc_feature (26)..(111): Homolog of NCBI NO: 25404300 NR Description: probable DNA helicase T7P1.7 [imported] -
  misc_feature (1)..(111): Homolog of NCBI NO: 11121451 NR Description: DNA Helicase [Arabidopsis thaliana]
  misc_feature (7)..(202): Homolog of NCBI NO: 30681987 NR Description: DNA helicase (recQl4A) [Arabidopsis thaliana]
  misc_feature (7)..(202): Homolog of NCBI NO: 11121449 NR Description: DNA Helicase [Arabidopsis thaliana]
  misc_feature (1)..(202): Homolog of NCBI NO: 38345369 NR Description: OSJNBa0088K19.8 [Oryza sativa (japonica
MRNLDASLLPQTNKNVQQQSEVDVKLASMLYEALLSLREQIMEECNEGFNAYHIFKTDTLKEMSIRVPRTKEELLDINGLGKTKVKKYGDRLLATIEDFLSKHPNPRRNSGGGGGGNEHSDAAKKRRGSTAISAASYGDYDFDERTGQQSKKRAAKTRTVSAHGPRCTDADLDGPEVVEVDGELRSVRKPVAYGNGRVLPKWAPL

SEQ ID NO: 111661 - protein, 177 aa, Zea mays subsp. mays
  misc_feature (1)..(177): Ceres Seq. ID no. 12637273
  misc_feature (1)..(149): Homolog of NCBI NO: 30020934 NR Description: ATP-dependent DNA helicase recQ [Bacillus cereus
  misc_feature (1)..(145): Homolog of NCBI NO: 28211708 NR Description: ATP-dependent DNA helicase recQ [Clostridium
  misc_feature (1)..(54): Homolog of NCBI NO: 30696491 NR Description: DNA helicase, putative [Arabidopsis thaliana]
  misc_feature (1)..(83): Homolog of NCBI NO: 25404300 NR Description: probable DNA helicase T7P1.7 [imported] -
  misc_feature (1)..(83): Homolog of NCBI NO: 11121451 NR Description: DNA Helicase [Arabidopsis thaliana]
  misc_feature (1)..(174): Homolog of NCBI NO: 30681987 NR Description: DNA helicase (recQl4A) [Arabidopsis thaliana]
  misc_feature (1)..(174): Homolog of NCBI NO: 11121449 NR Description: DNA Helicase [Arabidopsis thaliana]
  misc_feature (1)..(174): Homolog of NCBI NO: 38345369 NR Description: OSJNBa0088K19.8 [Oryza sativa (japonica
MLYEALLSLREQIMEECNEGFNAYHIFKTDTLKEMSIRVPRTKEELLDINGLGKTKVKKYGDRLLATIEDFLSKHPNPRRNSGGGGGGNEHSDAAKKRRGSTAISAASYGDYDFDERTGQQSKKRAAKTRTVSAHGPRCTDADLDGPEVVEVDGELRSVRKPVAYGNGRVLPKWAPL

SEQ ID NO: 111662 - protein, 164 aa, Zea mays subsp. mays
  misc_feature (1)..(164): Ceres Seq. ID no. 12637274
  misc_feature (1)..(136): Homolog of NCBI NO: 30020934 NR Description: ATP-dependent DNA helicase recQ [Bacillus cereus
  misc_feature (1)..(132): Homolog of NCBI NO: 28211708 NR Description: ATP-dependent DNA helicase recQ [Clostridium
  misc_feature (1)..(41): Homolog of NCBI NO: 30696491 NR Description: DNA helicase, putative [Arabidopsis thaliana]
  misc_feature (1)..(70): Homolog of NCBI NO: 25404300 NR Description: probable DNA helicase T7P1.7 [imported] -
  misc_feature (1)..(70): Homolog of NCBI NO: 11121451 NR Description: DNA Helicase [Arabidopsis thaliana]
  misc_feature (1)..(161): Homolog of NCBI NO: 30681987 NR Description: DNA helicase (recQl4A) [Arabidopsis thaliana]
  misc_feature (1)..(161): Homolog of NCBI NO: 11121449 NR Description: DNA Helicase [Arabidopsis thaliana]
  misc_feature (1)..(161): Homolog of NCBI NO: 38345369 NR Description: OSJNBa0088K19.8 [Oryza sativa (japonica
MEECNEGFNAYHIFKTDTLKEMSIRVPRTKEELLDINGLGKTKVKKYGDRLLATIEDFLSKHPNPRRNSGGGGGGNEHSDAAKKRRGSTAISAASYGDYDFDERTGQQSKKRAAKTRTVSAHGPRCTDADLDGPEVVEVDGELRSVRKPVAYGNGRVLPKWAPL

SEQ ID NO: 111663 - DNA, 2224 bp, Zea mays subsp. mays
  misc_feature (1)..(2224): Ceres Seq. ID no. 15179672
tcagtctctcagtgctgatacttctctccactctcctctttctttccctgtcccgacagagttcgaggaagctggggtgggcctgatgcttctccttctcttgcagtctagcgtccattccacttcgcaagggcttttctttctgttttaagtaaaacggatccagcaacgcaccagttcctgaaacagaaacgtgatgatggattcagtaagcatgaagctgttagcttttgtgttccttctgttgcgatgccagcgggcatcgcttgctcttgctgtcgacttccaagtcgaagcattggttgaaatgaggacgcaacttggtgacaaacgtggtgtccttagtgattggaaggataatcaaatgagcccctgctactgggccaatgttaattgccaagataacaaagtcacaacaataattttgagctcgtcagggttaacaggatccttatcacccagcattgcaaagctaacaactttacagcagctgatactggataacaacaacattactggagggattcctccggagtttggaaacctatcaggtttgacaattctaaaccttggaagaaataatttaaatgggtcaataccggactcccttggacaactttctaaactccaaaatctggatctaagccataattatttgaccggaaatatcccaagctctttctcaaatcttctgtcattgagtgatattaatctggcatataataatataagaggtgcaatcccacaacatctacttcaggtggcccaatacaactatgcaggcaaccacttgaattgtggccaaaatttatctgcatgtgaacgaggcagcacattgacaggtggatccaaaaatttcaagctaaacgtggttattggaagcattgctggagcagtcacattttctgtaactgtagttctagttttgctatggtggcaaagaatgcgttaccggcctgaaatcttcattgacgtgtcaggtcagaatgatcatatgcttgagtttgggcaaataaagcggttctcatggcgggagcttcagattgcaaccagcaatttcagtgaacagaatgttcttggcaagggtggttttggtaaggtgtataaaggagttcttccaggtccaaacagtataaagattgcagtgaaacgactactgaacgtggacagtcgtgatggggaaatggctttcctcagagaagttgaattgataagcattgctgtacacaagaacatattaaggttgataggattctgtacaacaccaacagagaggcttttggtctaccctttcatggagaatcttagtgttgcttcccgtttaagagatataaaactaaacgaaccagcattagattggtctacaagaatgcgaattgctcttggcgctgcctgtggtttggagtaccttcatgagcactgcaatcccaagatcatccaccgtgatgtcaaggctgcaaatgtcctgcttgatgggaactttgaagcagtggtaggagattttgggctggcgaagatggtagacatagggaggaatacagtaacaacaggggttcgtggaactatgggccacgtagctcctgagtacataaagacaggaaggccatcagtgaagacagatatctttggttatggtgtcatgctgttagagattgtgacaggagagcgtgcaattgcattccatcctgaccgtatagaagaagcaggcgagatcctgctcactgatcaggtcaagctatggatggaagaagggcgactactcgacctagtggatcgcaatctaggtggcgtctacaaccttgaagagctggagaaggttacccagatagcacttctctgcactcacatggatcctgaacaacgccctacaatgtctgaggtggtgcagatgctggaaggagagattgtcccagcagagcggtgggaggagtggcagctggctgagctccaacgacgacaacagcatgagatgaggcaacagggcaaactattcaacttcagtgaagagtctcaaaacatccaggaagccattgagttgtcagctggcagatgagctgtcataagaaagtgacatgattttcacttgttccttaaatagaaaggctataagagaaatattgactattaggaatagtctataaggtcctggactcctggtgtaatatcttgcacaagtaactccgtccatatgctgttaatacaacgataggaccacacctagctc

SEQ ID NO: 111664 - protein, 618 aa, Zea mays subsp. mays
  misc_feature (1)..(618): Ceres Seq. ID no. 15179673
  misc_feature (12)..(618): Homolog of NCBI NO: 22331326 NR Description: somatic embryogenesis receptor-related kinase
  misc_feature (15)..(618): Homolog of NCBI NO: 40253600 NR Description: putative somatic embryogenesis receptor kinase 1
  misc_feature (33)..(618): Homolog of NCBI NO: 21740899 NR Description: OSJNBa0036B21.13 [Oryza sativa (japonica
  misc_feature (15)..(618): Homolog of NCBI NO: 38679443 NR Description: benzothiadiazole-induced somatic embryogenesis
  misc_feature (33)..(618): Homolog of NCBI NO: 13897308 NR Description: SERK1 protein [Zea mays]
  misc_feature (25)..(618): Homolog of NCBI NO: 15238386 NR Description: receptor-related protein kinase [Arabidopsis
  misc_feature (2)..(618): Homolog of NCBI NO: 20260260 NR Description: protein serine/threonine kinase-like protein
  misc_feature (10)..(618): Homolog of NCBI NO: 11358729 NR Description: protein serine/threonine kinase-like protein -
  misc_feature (2)..(618): Homolog of NCBI NO: 22326703 NR Description: protein serine/threonine kinase-related protein
  misc_feature (1)..(618): Homolog of NCBI NO: 5596996 NR Description: putative protein serine /threonine kinase
MMDSVSMKLLAFVFLLLRCQRASLALAVDFQVEALVEMRTQLGDKRGVLSDWKDNQMSPCYWANVNCQDNKVTTIILSSSGLTGSLSPSIAKLTTLQQLILDNNNITGGIPPEFGNLSGLTILNLGRNNLNGSIPDSLGQLSKLQNLDLSHNYLTGNIPSSFSNLLSLSDINLAYNNIRGAIPQHLLQVAQYNYAGNHLNCGQNLSACERGSTLTGGSKNFKLNVVIGSIAGAVTFSVTVVLVLLWWQRMRYRPEIFIDVSGQNDHMLEFGQIKRFSWRELQIATSNFSEQNVLGKGGFGKVYKGVLPGPNSIKIAVKRLLNVDSRDGEMAFLREVELISIAVHKNILRLIGFCTTPTERLLVYPFMENLSVASRLRDIKLNEPALDWSTRMRIALGAACGLEYLHEHCNPKIIHRDVKAANVLLDGNFEAVVGDFGLAKMVDIGRNTVTTGVRGTMGHVAPEYIKTGRPSVKTDIFGYGVMLLEIVTGERAIAFHPDRIEEAGEILLTDQVKLWMEEGRLLDLVDRNLGGVYNLEELEKVTQIALLCTHMDPEQRPTMSEVVQMLEGEIVPAERWEEWQLAELQRRQQHEMRQQGKLFNFSEESQNIQEAIELSAGR

SEQ ID NO: 111665 - protein, 617 aa, Zea mays subsp. mays
  misc_feature (1)..(617): Ceres Seq. ID no. 15179674
  misc_feature (11)..(617): Homolog of NCBI NO: 22331326 NR Description: somatic embryogenesis receptor-related kinase
  misc_feature (14)..(617): Homolog of NCBI NO: 40253600 NR Description: putative somatic embryogenesis receptor kinase 1
  misc_feature (32)..(617): Homolog of NCBI NO: 21740899 NR Description: OSJNBa0036B21.13 [Oryza sativa (japonica
  misc_feature (14)..(617): Homolog of NCBI NO: 38679443 NR Description: benzothiadiazole-induced somatic embryogenesis
  misc_feature (32)..(617): Homolog of NCBI NO: 13897308 NR Description: SERK1 protein [Zea mays]
  misc_feature (24)..(617): Homolog of NCBI NO: 15238386 NR Description: receptor-related protein kinase [Arabidopsis
  misc_feature (1)..(617): Homolog of NCBI NO: 20260260 NR Description: protein serine/threonine kinase-like protein
  misc_feature (9)..(617): Homolog of NCBI NO: 11358729 NR Description: protein serine/threonine kinase-like protein -
  misc_feature (1)..(617): Homolog of NCBI NO: 22326703 NR Description: protein serine/threonine kinase-related protein
  misc_feature (1)..(617): Homolog of NCBI NO: 5596996 NR Description: putative protein serine /threonine kinase
MDSVSMKLLAFVFLLLRCQRASLALAVDFQVEALVEMRTQLGDKRGVLSDWKDNQMSPCYWANVNCQDNKVTTIILSSSGLTGSLSPSIAKLTTLQQLILDNNNITGGIPPEFGNLSGLTILNLGRNNLNGSIPDSLGQLSKLQNLDLSHNYLTGNIPSSFSNLLSLSDINLAYNNIRGAIPQHLLQVAQYNYAGNHLNCGQNLSACERGSTLTGGSKNFKLNVVIGSIAGAVTFSVTVVLVLLWWQRMRYRPEIFIDVSGQNDHMLEFGQIKRFSWRELQIATSNFSEQNVLGKGGFGKVYKGVLPGPNSIKIAVKRLLNVDSRDGEMAFLREVELISIAVHKNILRLIGFCTTPTERLLVYPFMENLSVASRLRDIKLNEPALDWSTRMRIALGAACGLEYLHEHCNPKIIHRDVKAANVLLDGNFEAVVGDFGLAKMVDIGRNTVTTGVRGTMGHVAPEYIKTGRPSVKTDIFGYGVMLLEIVTGERAIAFHPDRIEEAGEILLTDQVKLWMEEGRLLDLVDRNLGGVYNLEELEKVTQIALLCTHMDPEQRPTMSEVVQMLEGEIVPAERWEEWQLAELQRRQQHEMRQQGKLFNFSEESQNIQEAIELSAGR

SEQ ID NO: 111666 - protein, 612 aa, Zea mays subsp. mays
  misc_feature (1)..(612): Ceres Seq. ID no. 15179675
  misc_feature (9)..(612): Homolog of NCBI NO: 40253600 NR Description: putative somatic embryogenesis receptor kinase 1
  misc_feature (27)..(612): Homolog of NCBI NO: 21740899 NR Description: OSJNBa0036B21.13 [Oryza sativa (japonica
  misc_feature (9)..(612): Homolog of NCBI NO: 38679443 NR Description: benzothiadiazole-induced somatic embryogenesis
  misc_feature (27)..(612): Homolog of NCBI NO: 13897308 NR Description: SERK1 protein [Zea mays]
  misc_feature (19)..(612): Homolog of NCBI NO: 15238386 NR Description: receptor-related protein kinase [Arabidopsis
  misc_feature (1)..(612): Homolog of NCBI NO: 20260260 NR Description: protein serine/threonine kinase-like protein
  misc_feature (4)..(612): Homolog of NCBI NO: 11358729 NR Description: protein serine/threonine kinase-like protein -
  misc_feature (1)..(612): Homolog of NCBI NO: 22326703 NR Description: protein serine/threonine kinase-related protein
  misc_feature (1)..(612): Homolog of NCBI NO: 5596996 NR Description: putative protein serine /threonine kinase
  misc_feature (6)..(612): Homolog of NCBI NO: 22331326 NR Description: somatic embryogenesis receptor-related kinase
MKLLAFVFLLLRCQRASLALAVDFQVEALVEMRTQLGDKRGVLSDWKDNQMSPCYWANVNCQDNKVTTIILSSSGLTGSLSPSIAKLTTLQQLILDNNNITGGIPPEFGNLSGLTILNLGRNNLNGSIPDSLGQLSKLQNLDLSHNYLTGNIPSSFSNLLSLSDINLAYNNIRGAIPQHLLQVAQYNYAGNHLNCGQNLSACERGSTLTGGSKNFKLNVVIGSIAGAVTFSVTVVLVLLWWQRMRYRPEIFIDVSGQNDHMLEFGQIKRFSWRELQIATSNFSEQNVLGKGGFGKVYKGVLPGPNSIKIAVKRLLNVDSRDGEMAFLREVELISIAVHKNILRLIGFCTTPTERLLVYPFMENLSVASRLRDIKLNEPALDWSTRMRIALGAACGLEYLHEHCNPKIIHRDVKAANVLLDGNFEAVVGDFGLAKMVDIGRNTVTTGVRGTMGHVAPEYIKTGRPSVKTDIFGYGVMLLEIVTGERAIAFHPDRIEEAGEILLTDQVKLWMEEGRLLDLVDRNLGGVYNLEELEKVTQIALLCTHMDPEQRPTMSEVVQMLEGEIVPAERWEEWQLAELQRRQQHEMRQQGKLFNFSEESQNIQEAIELSAGR

SEQ ID NO: 111667 - DNA, 1900 bp, Zea mays subsp. mays
  misc_feature (1)..(1900): Ceres Seq. ID no. 13599990
cccccccccgggttgttgcactgtagtactggagtggaggtccggtcccacgtttgggggtggactcgacaaacgccaaaccgagcaccccccaaagcctgattctgctcaacactgcgcctgaacaattttctctggtggggctgcaaagacaaattaggagtgcttccaagttccaatccctgtttgcttgtacagggtataattaaagaggcaacggagtcatgacccttttgagggagtatcagtaactgcatgatcttttcgagggaggcacgatggaaggaaataacctaccctctggaagcttgatgcaaggaacaccttacagtaatgtggacttgcagcatcataaacatatgcaaatgcctgcaccaagctctggaaaccaggctttcaaccactctcagatgcctggcaatttccccatttgtctgaaccaggttacagattccgaccagctacctgaattccaatttggagagcacggcaaggtcagtcaccaccatcatcctcaccatcacaagcagcatgcaacgaatagcatgagcgatgatgaggagcatggtgtgcatgaggatgccactgatagccagatcggcaagggaaagaagggttccgcatggcatcggatgaagtggactgattcgatggttaggcttttgattactgcagcatcctacaccggggaagacccaggagctgatttaggaggtggtaggagaagctgtgcaatgatgcagaagaaaggcaagtggaaggccatatcaaaagtcatgggcgagcgaggctgcctcgtgtcgccgcagcagtgtgaggataagttcaatgacctaaataagaggtataaaaggcttacagatatccttggtcggggtactacttgcagagttgtggcaaacccagaacttctagatggcatggctaatctctcagataagatgaaagatgacgcgaggaagatattgagctctaagcacttgttctatgaagagatgtgctcctatcacaacaataatcggttcagtttacctgaagatcctgcacttcagcgatcgttgcagcttgctcttaagtgtaaggatgagcatgatgcaaggaagcgagcaagtggagatgctgatgaagatgatcaaagtgcagacactgataatgaagaagagaatgatgatgagcatcccatcacgcatgccaataaggggaccctactcacgcgtaaaagattgcggtacatgccggcggatatggaggatgtaggtttcggcaactcttccagctcacatgactgtagctggagatctgatccccatagcattgcagtggacatcaacaaagcttctccagatggaactaacttggcttcggttcaaaaagacttggctacacagtctgcggagattgagaaacagcgcatggaaattgaagttcaggcattggagcttgcaaaacaacgtctcaagtgggaggcatttagtaagaagaaggacagagagctagagaagatgaggttggaaaatgaacaaatgaagattgagaataaacgtttggagctagaggtaagatacaaggagttggagcttgaacacaaaccacaaggccatggcagtcatgcaacatgataatatctttaaaatcacgaagactgaaacgcaagatagtaagctttgtctcctgttatcactacccagagaaataattatgagtaactcatttctaattctgtcaccaaatccttgatattcatgggttgctagagtaggtgctatttggtaccagacagttcagtcatgtttatatttattttgttctctgtagatgtttcagagaaacgagaacttgaaattccaacgcatgcttnnnggaaaaaaaaaaaaaaaaaaaactcgagggggggcccggt

SEQ ID NO: 111668 - protein, 446 aa, Zea mays subsp. mays
  misc_feature (1)..(446): Ceres Seq. ID no. 15218635
  misc_feature (80)..(432): Homolog of NCBI NO: 15223769 NR Description: hypothetical protein [Arabidopsis thaliana]
  misc_feature (1)..(435): Homolog of NCBI NO: 18394964 NR Description: expressed protein [Arabidopsis thaliana]
MEGNNLPSGSLMQGTPYSNVDLQHHKHMQMPAPSSGNQAFNHSQMPGNFPICLNQVTDSDQLPEFQFGEHGKVSHHHHPHHHKQHATNSMSDDEEHGVHEDATDSQIGKGKKGSAWHRMKWTDSMVRLLITAASYTGEDPGADLGGGRRSCAMMQKKGKWKAISKVMGERGCLVSPQQCEDKFNDLNKRYKRLTDILGRGTTCRVVANPELLDGMANLSDKMKDDARKILSSKHLFYEEMCSYHNNNRFSLPEDPALQRSLQLALKCKDEHDARKRASGDADEDDQSADTDNEEENDDEHPITHANKGTLLTRKRLRYMPADMEDVGFGNSSSSHDCSWRSDPHSIAVDINKASPDGTNLASVQKDLATQSAEIEKQRMEIEVQALELAKQRLKWEAFSKKKDRELEKMRLENEQMKIENKRLELEVRYKELELEHKPQGHGSHAT

SEQ ID NO: 111669 - protein, 435 aa, Zea mays subsp. mays
  misc_feature (1)..(435): Ceres Seq. ID no. 15218636
  misc_feature (69)..(421): Homolog of NCBI NO: 15223769 NR Description: hypothetical protein [Arabidopsis thaliana]
  misc_feature (1)..(424): Homolog of NCBI NO: 18394964 NR Description: expressed protein [Arabidopsis thaliana]
MQGTPYSNVDLQHHKHMQMPAPSSGNQAFNHSQMPGNFPICLNQVTDSDQLPEFQFGEHGKVSHHHHPHHHKQHATNSMSDDEEHGVHEDATDSQIGKGKKGSAWHRMKWTDSMVRLLITAASYTGEDPGADLGGGRRSCAMMQKKGKWKAISKVMGERGCLVSPQQCEDKFNDLNKRYKRLTDILGRGTTCRVVANPELLDGMANLSDKMKDDARKILSSKHLFYEEMCSYHNNNRFSLPEDPALQRSLQLALKCKDEHDARKRASGDADEDDQSADTDNEEENDDEHPITHANKGTLLTRKRLRYMPADMEDVGFGNSSSSHDCSWRSDPHSIAVDINKASPDGTNLASVQKDLATQSAEIEKQRMEIEVQALELAKQRLKWEAFSKKKDRELEKMRLENEQMKIENKRLELEVRYKELELEHKPQGHGSHAT

SEQ ID NO: 111670 - protein, 419 aa, Zea mays subsp. mays
  misc_feature (1)..(419): Ceres Seq. ID no. 15218637
  misc_feature (53)..(405): Homolog of NCBI NO: 15223769 NR Description: hypothetical protein [Arabidopsis thaliana]
  misc_feature (1)..(408): Homolog of NCBI NO: 18394964 NR Description: expressed protein [Arabidopsis thaliana]
MQMPAPSSGNQAFNHSQMPGNFPICLNQVTDSDQLPEFQFGEHGKVSHHHHPHHHKQHATNSMSDDEEHGVHEDATDSQIGKGKKGSAWHRMKWTDSMVRLLITAASYTGEDPGADLGGGRRSCAMMQKKGKWKAISKVMGERGCLVSPQQCEDKFNDLNKRYKRLTDILGRGTTCRVVANPELLDGMANLSDKMKDDARKILSSKHLFYEEMCSYHNNNRFSLPEDPALQRSLQLALKCKDEHDARKRASGDADEDDQSADTDNEEENDDEHPITHANKGTLLTRKRLRYMPADMEDVGFGNSSSSHDCSWRSDPHSIAVDINKASPDGTNLASVQKDLATQSAEIEKQRMEIEVQALELAKQRLKWEAFSKKKDRELEKMRLENEQMKIENKRLELEVRYKELELEHKPQGHGSHAT

SEQ ID NO: 111671 - DNA, 2163 bp, Zea mays subsp. mays
  misc_feature (1)..(2163): Ceres Seq. ID no. 15226186
cccccccccccccccccccaaacattccagggagcatgctgatcaagaacttgaagtagagagaactgcacaggctgggttggaacaagagtgtgactctgtgccaatggattctgaggaacacggttgcctgacttcatatgctcatactgatgatgagcaagatgaggtgaagcagaaagttacttctggaacagcagatgttatgcattatgcagcagacacttttaatgttaacacaaattcatggaaagaagatattgaagaggatccaactgaagctgctctaacagccatacatcaaatttgttacgaacctttgacgagcatagtcaagttctctctagatcatagtgtctccgaagaagacagagagcctgatacgccgactcatattgaaggtatatgtgattcacaggaactgctggattctaaaacagttgtttctgatgctaaatctgtagattcaagtgttgctactttgtctactgatctggaaagcactgaattggtgagtgtcgatcaactaaaatctgctttggcttccacacgcaaatcattgaacaccctatattctgaacttgaaaatgagaggaacgctgctgctatagctgccgatgaaaccatggcaatgataaaccgcttgcaagaacagaaagctgcaatgcagatggaggcgattcaataccagcggcttatggaggaacagtcagagtatgaccaagaagcactgcagaggttgaatgaactagttgttaagagagagaaggagaagcaagatctggagagagaactcgagctgtatcgccacaaggttcatctctatgaggtaaaggtgaggaaaatgtccaggcacaaggctgatgaccagaatggatcatcgtcaacttcatcgagtgctgaggatagtgatgacctttcacaaagtttctatgaaggtgatgaatcttcccatggtattaatggaagtaatgggagtattcctactgatgtggtgctacaagaaactgccaggcatcttgttacccttgatggctcactagctgattttgaggaagagagactatccatactggaacagcttaaagtgctagaagataaactttttgatcttgaggatgaagagtccgatgacatgaagcatttctcagaagaaaaccatttaagtggtgcctcgaatggtttctctgatgatgatagctgctttaagcttcatgacaagagaaagaatgtaacctatagaggaaagaaactccttccattgttcgacgatgctaccgtggaagctggaaacgtcccccaaggtaatgatgcacagcattcaacagaggtcacactggaccttgctagagagcaacataagcttgcaattgccaatgaaatcgatcaggtacacgagaggctgcatgctcttgaggcagatagggaatacataaaacagtgcgtgaggactttgaagaagggagggaaagggtttgatcttcttcaggagatattacagcatcttcgggacctaagaaggattgagcaacgtgcaagtgcaaggaactctggggagctttcgcctcattacctacatcatcacacggattgaagattccagatcagctgcctatgtccagcgaatattgcttgaagatggaaatcatacaacaatgataagggaaaaaaaagattgccgactaagtagtattgtcattggagaagttttgttggttcccggagaggaaggagctcctcctggaacacccgtcacagtcggttcgaagataccattgggaaggcagatcacggagcaattctgccttccaaggtccaggattttttttgtggaccacatcccacgttctctttttgtgttggtttagttttcccggtgggttccaaacttttgcccaagggcaagagggtggttggtgagccgcccgggcccctgtggggctgtgtgtttgttgtgggggtgtggcggcaatcatggccttgtgcagaagctttagaattcattaacctgaaaacatgccgatgccagctttgctgccagatatgttgggcttcactagtttttgttttcttctttttttctaaatcctttccctgtaaatcttctagctgtatgtaatgtgctttcggcctttggaatgatgaggtgttgggtgtgtgcat

SEQ ID NO: 111672 - protein, 530 aa, Zea mays subsp. mays
  misc_feature (1)..(530): Ceres Seq. ID no. 15226187
  misc_feature (173)..(266): Pfam Name: Protein of unknown function, DUF593 Pfam Description: Protein of unknown function, DUF593
  misc_feature (152)..(516): Homolog of NCBI NO: 11357812 NR Description: hypothetical protein F5E19_60 - Arabidopsis
  misc_feature (115)..(384): Homolog of NCBI NO: 26451391 NR Description: unknown protein [Arabidopsis thaliana]
  misc_feature (115)..(384): Homolog of NCBI NO: 30699047 NR Description: expressed protein [Arabidopsis thaliana]
  misc_feature (115)..(384): Homolog of NCBI NO: 25406384 NR Description: hypothetical protein F9E10.32 [imported] -
  misc_feature (161)..(307): Homolog of NCBI NO: 4101564 NR Description: IFA-binding protein [Arabidopsis thaliana]
  misc_feature (38)..(424): Homolog of NCBI NO: 30685989 NR Description: expressed protein [Arabidopsis thaliana]
  misc_feature (38)..(424): Homolog of NCBI NO: 11357812 NR Description: hypothetical protein F5E19_60 - Arabidopsis
  misc_feature (161)..(521): Homolog of NCBI NO: 18409667 NR Description: IFA-binding protein [Arabidopsis thaliana]
  misc_feature (73)..(521): Homolog of NCBI NO: 25406071 NR Description: unknown protein F5A18.7 [imported] - Arabidopsis
  misc_feature (6)..(530): Homolog of NCBI NO: 13702818 NR Description: unknown protein [Oryza sativa]
PPPPPPKHSREHADQELEVERTAQAGLEQECDSVPMDSEEHGCLTSYAHTDDEQDEVKQKVTSGTADVMHYAADTFNVNTNSWKEDIEEDPTEAALTAIHQICYEPLTSIVKFSLDHSVSEEDREPDTPTHIEGICDSQELLDSKTVVSDAKSVDSSVATLSTDLESTELVSVDQLKSALASTRKSLNTLYSELENERNAAAIAADETMAMINRLQEQKAAMQMEAIQYQRLMEEQSEYDQEALQRLNELVVKREKEKQDLERELELYRHKVHLYEVKVRKMSRHKADDQNGSSSTSSSAEDSDDLSQSFYEGDESSHGINGSNGSIPTDVVLQETARHLVTLDGSLADFEEERLSILEQLKVLEDKLFDLEDEESDDMKHFSEENHLSGASNGFSDDDSCFKLHDKRKNVTYRGKKLLPLFDDATVEAGNVPQGNDAQHSTEVTLDLAREQHKLAIANEIDQVHERLHALEADREYIKQCVRTLKKGGKGFDLLQEILQHLRDLRRIEQRASARNSGELSPHYLHHHTD

SEQ ID NO: 111673 - protein, 495 aa, Zea mays subsp. mays
  misc_feature (1)..(495): Ceres Seq. ID no. 15226188
  misc_feature (138)..(231): Pfam Name: Protein of unknown function, DUF593 Pfam Description: Protein of unknown function, DUF593
  misc_feature (117)..(481): Homolog of NCBI NO: 11357812 NR Description: hypothetical protein F5E19_60 - Arabidopsis
  misc_feature (80)..(349): Homolog of NCBI NO: 26451391 NR Description: unknown protein [Arabidopsis thaliana]
  misc_feature (80)..(349): Homolog of NCBI NO: 30699047 NR Description: expressed protein [Arabidopsis thaliana]
  misc_feature (80)..(349): Homolog of NCBI NO: 25406384 NR Description: hypothetical protein F9E10.32 [imported] -
  misc_feature (126)..(272): Homolog of NCBI NO: 4101564 NR Description: IFA-binding protein [Arabidopsis thaliana]
  misc_feature (3)..(389): Homolog of NCBI NO: 30685989 NR Description: expressed protein [Arabidopsis thaliana]
  misc_feature (3)..(389): Homolog of NCBI NO: 11357812 NR Description: hypothetical protein F5E19_60 - Arabidopsis
  misc_feature (126)..(486): Homolog of NCBI NO: 18409667 NR Description: IFA-binding protein [Arabidopsis thaliana]
  misc_feature (38)..(486): Homolog of NCBI NO: 25406071 NR Description: unknown protein F5A18.7 [imported] - Arabidopsis
  misc_feature (1)..(495): Homolog of NCBI NO: 13702818 NR Description: unknown protein [Oryza sativa]
MDSEEHGCLTSYAHTDDEQDEVKQKVTSGTADVMHYAADTFNVNTNSWKEDIEEDPTEAALTAIHQICYEPLTSIVKFSLDHSVSEEDREPDTPTHIEGICDSQELLDSKTVVSDAKSVDSSVATLSTDLESTELVSVDQLKSALASTRKSLNTLYSELENERNAAAIAADETMAMINRLQEQKAAMQMEAIQYQRLMEEQSEYDQEALQRLNELVVKREKEKQDLERELELYRHKVHLYEVKVRKMSRHKADDQNGSSSTSSSAEDSDDLSQSFYEGDESSHGINGSNGSIPTDVVLQETARHLVTLDGSLADFEEERLSILEQLKVLEDKLFDLEDEESDDMKHFSEENHLSGASNGFSDDDSCFKLHDKRKNVTYRGKKLLPLFDDATVEAGNVPQGNDAQHSTEVTLDLAREQHKLAIANEIDQVHERLHALEADREYIKQCVRTLKKGGKGFDLLQEILQHLRDLRRIEQRASARNSGELSPHYLHHHTD

SEQ ID NO: 111674 - protein, 462 aa, Zea mays subsp. mays
  misc_feature (1)..(462): Ceres Seq. ID no. 15226189
  misc_feature (105)..(198): Pfam Name: Protein of unknown function, DUF593 Pfam Description: Protein of unknown function, DUF593
  misc_feature (84)..(448): Homolog of NCBI NO: 11357812 NR Description: hypothetical protein F5E19_60 - Arabidopsis
  misc_feature (47)..(316): Homolog of NCBI NO: 26451391 NR Description: unknown protein [Arabidopsis thaliana]
  misc_feature (47)..(316): Homolog of NCBI NO: 30699047 NR Description: expressed protein [Arabidopsis thaliana]
  misc_feature (47)..(316): Homolog of NCBI NO: 25406384 NR Description: hypothetical protein F9E10.32 [imported] -
  misc_feature (93)..(239): Homolog of NCBI NO: 4101564 NR Description: IFA-binding protein [Arabidopsis thaliana]
  misc_feature (1)..(356): Homolog of NCBI NO: 30685989 NR Description: expressed protein [Arabidopsis thaliana]
  misc_feature (1)..(356): Homolog of NCBI NO: 11357812 NR Description: hypothetical protein F5E19_60 - Arabidopsis
  misc_feature (93)..(453): Homolog of NCBI NO: 18409667 NR Description: IFA-binding protein [Arabidopsis thaliana]
  misc_feature (5)..(453): Homolog of NCBI NO: 25406071 NR Description: unknown protein F5A18.7 [imported] - Arabidopsis
  misc_feature (1)..(462): Homolog of NCBI NO: 13702818 NR Description: unknown protein [Oryza sativa]
MHYAADTFNVNTNSWKEDIEEDPTEAALTAIHQICYEPLTSIVKFSLDHSVSEEDREPDTPTHIEGICDSQELLDSKTVVSDAKSVDSSVATLSTDLESTELVSVDQLKSALASTRKSLNTLYSELENERNAAAIAADETMAMINRLQEQKAAMQMEAIQYQRLMEEQSEYDQEALQRLNELVVKREKEKQDLERELELYRHKVHLYEVKVRKMSRHKADDQNGSSSTSSSAEDSDDLSQSFYEGDESSHGINGSNGSIPTDVVLQETARHLVTLDGSLADFEEERLSILEQLKVLEDKLFDLEDEESDDMKHFSEENHLSGASNGFSDDDSCFKLHDKRKNVTYRGKKLLPLFDDATVEAGNVPQGNDAQHSTEVTLDLAREQHKLAIANEIDQVHERLHALEADREYIKQCVRTLKKGGKGFDLLQEILQHLRDLRRIEQRASARNSGELSPHYLHHHTD

SEQ ID NO: 111675 - DNA, 2055 bp, Zea mays subsp. mays
  misc_feature (1)..(2055): Ceres Seq. ID no. 13666169
taatcgcattttctcaaattcgtctgcccctaatagggattcttacaacagtatgggctcagtcaatgaggtctctgctcagccgatttatattgattctttccccaagctaagtgcttggtatttccagaatcaagcttgcatcgcctctacactttctggtctttgcaacaaaaaccctgtccatcaagttgcgaacaaaattttgaatatgatttgccgaaaaatgaataaaggtggagtatcatctagtaatctttcatctacttctagtagtagcgttagtggttcttctgtaagtgcatcggatgattcttaccaaaggcctgctgttcctgcttgggaatttttagaagctgttccttttgtacttgaagctgttctgacagcatgtgctcatgggcggctttccagccgagacttgactacaagcttaagggatcttgtggactttttgcctgcttctcttgctgcaattgtaagctacttctcagcagaaattacacggggaatctggaaacctgttccaatgaatggaactgaatggcccagtcctggtgcttctcttcattccattgaagctgaagtaaaggaaattcttgcatctgctggtgttcagattaacagctgctatccacgtggtgtgccgccaatgcttcctttgcctatggctgcacttgtcagcttgacaattacatttaagctagataggagtttggagtacattcaaggggtcattggacatgcactagagaactgcgcagggggaagttcctggccaagcatgcccattatcggggcattgtggacacagaaagtgcgaagatggcatgacttcattgtcctctcttgtatgcgttctccatttggcagagacaaagatgcagttgcgcagctcatccgaagctgcttttcgtcctttctgcagtcatcatccagtggttctgacataatcgcaaaccgtggagttggggctttattaggggactcaatcacggatcaaggtcttaggctcccaatggcacctggtttcgtctacctgagaacatgtcgaactttccatgacacatacttcgttagtgaagtgatcctcaagcaagtgattgaatgggctcacaaacttgcaaatggatggtctttcaatgggcctccgcagttgaaatcaggccggacaccactatcttgtgcagcatctatggcgcatcaggtcgcgatgcttggtggtggtctcctatgcatagcaggtggaccacttgtggtccaggtgttgtatgaagacacactaccgaccactgctgctgtcagccagagaacagagtttgaaagaccctgggccagtttctagcacactacaaggttacgccatggccaacatgctcttttactgtggtagcctactttggggagcggacaggagttctcctgtcatgaaattgtctttcctctcgaggcggccacgggtggtgagaaaccacatggatttcatagctggtgtactggacggacacattcttctgggctgtgacccgggtacctggaaagcgtatgtttctcagtttatgttcctggtggtgaagtttgttccatcatggttgccggacataaagctggacacgctaaagaagatagcagctggacttcggagttggcatgaacatgaccttgctctatcccttcttgagcgaggaggaccacaagcaatctctgttgtagtcgagacctttctgtgatcctgccatttggacattttgccccccacctgacatcgcagccgctgttagggtttgaagtcggtggtctgaggtctagctgaagtaatcaggatgacccttccagaattccacttgagcaaccaggataactgatgtttttctcatgtatggcgaacccattttgtttttgtgaattcaatacggaagaacattcaacctactagagtctagagtgtattgacatcagccctaacatgtaacctrtgttaaacacaataaagtgggaaaaaaaaaaaaaaaaaaatgtttaaacacaataaagttggaactggaggggggaaag

SEQ ID NO: 111676 - protein, 447 aa, Zea mays subsp. mays
  misc_feature (1)..(447): Ceres Seq. ID no. 15220510
  misc_feature (262)..(430): Homolog of NCBI NO: 34394478 NR Description: unknown protein [Oryza sativa (japonica
  misc_feature (245)..(430): Homolog of NCBI NO: 1223579 NR Description: cDNA101 [Arabidopsis thaliana]
  misc_feature (8)..(235): Homolog of NCBI NO: 20197556 NR Description: unknown protein [Arabidopsis thaliana]
  misc_feature (8)..(430): Homolog of NCBI NO: 18407529 NR Description: hypothetical protein [Arabidopsis thaliana]
  misc_feature (8)..(430): Homolog of NCBI NO: 25370851 NR Description: hypothetical protein At2g48110 [imported] -
  misc_feature (25)..(442): Homolog of NCBI NO: 26449340 NR Description: unknown protein [Arabidopsis thaliana]
  misc_feature (25)..(442): Homolog of NCBI NO: 15229478 NR Description: expressed protein [Arabidopsis thaliana]
  misc_feature (1)..(439): Homolog of NCBI NO: 33146669 NR Description: unknown protein [Oryza sativa (japonica
  misc_feature (1)..(439): Homolog of NCBI NO: 33146668 NR Description: unknown protein [Oryza sativa (japonica
NRIFSNSSAPNRDSYNSMGSVNEVSAQPIYIDSFPKLSAWYFQNQACIASTLSGLCNKNPVHQVANKILNMICRKMNKGGVSSSNLSSTSSSSVSGSSVSASDDSYQRPAVPAWEFLEAVPFVLEAVLTACAHGRLSSRDLTTSLRDLVDFLPASLAAIVSYFSAEITRGIWKPVPMNGTEWPSPGASLHSIEAEVKEILASAGVQINSCYPRGVPPMLPLPMAALVSLTITFKLDRSLEYIQGVIGHALENCAGGSSWPSMPIIGALWTQKVRRWHDFIVLSCMRSPFGRDKDAVAQLIRSCFSSFLQSSSSGSDIIANRGVGALLGDSITDQGLRLPMAPGFVYLRTCRTFHDTYFVSEVILKQVIEWAHKLANGWSFNGPPQLKSGRTPLSCAASMAHQVAMLGGGLLCIAGGPLVVQVLYEDTLPTTAAVSQRTEFERPWASF

SEQ ID NO: 111677 - protein, 430 aa, Zea mays subsp. mays
  misc_feature (1)..(430): Ceres Seq. ID no. 15220511
  misc_feature (245)..(413): Homolog of NCBI NO: 34394478 NR Description: unknown protein [Oryza sativa (japonica
  misc_feature (228)..(413): Homolog of NCBI NO: 1223579 NR Description: cDNA101 [Arabidopsis thaliana]
  misc_feature (1)..(218): Homolog of NCBI NO: 20197556 NR Description: unknown protein [Arabidopsis thaliana]
  misc_feature (1)..(413): Homolog of NCBI NO: 18407529 NR Description: hypothetical protein [Arabidopsis thaliana]
  misc_feature (1)..(413): Homolog of NCBI NO: 25370851 NR Description: hypothetical protein At2g48110 [imported] -
  misc_feature (8)..(425): Homolog of NCBI NO: 26449340 NR Description: unknown protein [Arabidopsis thaliana]
  misc_feature (8)..(425): Homolog of NCBI NO: 15229478 NR Description: expressed protein [Arabidopsis thaliana]
  misc_feature (1)..(422): Homolog of NCBI NO: 33146669 NR Description: unknown protein [Oryza sativa (japonica
  misc_feature (1)..(422): Homolog of NCBI NO: 33146668 NR Description: unknown protein [Oryza sativa (japonica
MGSVNEVSAQPIYIDSFPKLSAWYFQNQACIASTLSGLCNKNPVHQVANKILNMICRKMNKGGVSSSNLSSTSSSSVSGSSVSASDDSYQRPAVPAWEFLEAVPFVLEAVLTACAHGRLSSRDLTTSLRDLVDFLPASLAAIVSYFSAEITRGIWKPVPMNGTEWPSPGASLHSIEAEVKEILASAGVQINSCYPRGVPPMLPLPMAALVSLTITFKLDRSLEYIQGVIGHALENCAGGSSWPSMPIIGALWTQKVRRWHDFIVLSCMRSPFGRDKDAVAQLIRSCFSSFLQSSSSGSDIIANRGVGALLGDSITDQGLRLPMAPGFVYLRTCRTFHDTYFVSEVILKQVIEWAHKLANGWSFNGPPQLKSGRTPLSCAASMAHQVAMLGGGLLCIAGGPLVVQVLYEDTLPTTAAVSQRTEFERPWASF

SEQ ID NO: 111678 - protein, 377 aa, Zea mays subsp. mays
  misc_feature (1)..(377): Ceres Seq. ID no. 15220512
  misc_feature (192)..(360): Homolog of NCBI NO: 34394478 NR Description: unknown protein [Oryza sativa (japonica
  misc_feature (175)..(360): Homolog of NCBI NO: 1223579 NR Description: cDNA101 [Arabidopsis thaliana]
  misc_feature (1)..(165): Homolog of NCBI NO: 20197556 NR Description: unknown protein [Arabidopsis thaliana]
  misc_feature (1)..(360): Homolog of NCBI NO: 18407529 NR Description: hypothetical protein [Arabidopsis thaliana]
  misc_feature (1)..(360): Homolog of NCBI NO: 25370851 NR Description: hypothetical protein At2g48110 [imported] -
  misc_feature (1)..(372): Homolog of NCBI NO: 26449340 NR Description: unknown protein [Arabidopsis thaliana]
  misc_feature (1)..(372): Homolog of NCBI NO: 15229478 NR Description: expressed protein [Arabidopsis thaliana]
  misc_feature (1)..(369): Homolog of NCBI NO: 33146669 NR Description: unknown protein [Oryza sativa (japonica
  misc_feature (1)..(369): Homolog of NCBI NO: 33146668 NR Description: unknown protein [Oryza sativa (japonica
MICRKMNKGGVSSSNLSSTSSSSVSGSSVSASDDSYQRPAVPAWEFLEAVPFVLEAVLTACAHGRLSSRDLTTSLRDLVDFLPASLAAIVSYFSAEITRGIWKPVPMNGTEWPSPGASLHSIEAEVKEILASAGVQINSCYPRGVPPMLPLPMAALVSLTITFKLDRSLEYIQGVIGHALENCAGGSSWPSMPIIGALWTQKVRRWHDFIVLSCMRSPFGRDKDAVAQLIRSCFSSFLQSSSSGSDIIANRGVGALLGDSITDQGLRLPMAPGFVYLRTCRTFHDTYFVSEVILKQVIEWAHKLANGWSFNGPPQLKSGRTPLSCAASMAHQVAMLGGGLLCIAGGPLVVQVLYEDTLPTTAAVSQRTEFERPWASF

SEQ ID NO: 111679 - DNA, 417 bp, Zea mays subsp. mays
  misc_feature (1)..(417): Ceres Seq. ID no. 14306114
  misc_feature: MA Experiment ID: 108535 Result: Up-regulated in Transcription
  misc_feature: MA Experiment 108535 PARAMETER Experiment Name: Zm_Meristem_P Parameter: Age (day) Value: 8
  misc_feature: MA Experiment 108535 PARAMETER Experiment Name: Zm_Meristem_P Parameter: Organism Value: Zea mays
  misc_feature: MA Experiment 108535 PARAMETER Experiment Name: Zm_Meristem_P Parameter: Plant Line Value: 35A19
  misc_feature: MA Experiment 108535 PARAMETER Experiment Name: Zm_Meristem_P Parameter: Tissue Value: Root Meristem vs. Above Root Meristem
  misc_feature: MA Experiment ID: 108544 Result: Down-regulated in Transcription
  misc_feature: MA Experiment ID: 108556 Result: Down-regulated in Transcription
  misc_feature: MA Experiment 108556 PARAMETER Experiment Name: Zm_Drought_P Parameter: Age (day) Value: 9
  misc_feature: MA Experiment 108556 PARAMETER Experiment Name: Zm_Drought_P Parameter: Organism Value: Zea mays
  misc_feature: MA Experiment 108556 PARAMETER Experiment Name: Zm_Drought_P Parameter: Plant Line Value: 35A19
  misc_feature: MA Experiment 108556 PARAMETER Experiment Name: Zm_Drought_P Parameter: Timepoint (hr) Value: 24
  misc_feature: MA Experiment 108556 PARAMETER Experiment Name: Zm_Drought_P Parameter: Tissue Value: Aerial
  misc_feature: MA Experiment 108556 PARAMETER Experiment Name: Zm_Drought_P Parameter: Treatment Value: Drought vs. No Drought
  misc_feature: MA Experiment ID: 108689 Result: Down-regulated in Transcription
  misc_feature: MA Experiment 108689 PARAMETER Experiment Name: Zm_Drought_Roots_P Parameter: Age (day) Value: 9
  misc_feature: MA Experiment 108689 PARAMETER Experiment Name: Zm_Drought_Roots_P Parameter: Organism Value: Zea mays
  misc_feature: MA Experiment 108689 PARAMETER Experiment Name: Zm_Drought_Roots_P Parameter: Plant Line Value: 35A19
  misc_feature: MA Experiment 108689 PARAMETER Experiment Name: Zm_Drought_Roots_P Parameter: Timepoint (hr) Value: 24
  misc_feature: MA Experiment 108689 PARAMETER Experiment Name: Zm_Drought_Roots_P Parameter: Tissue Value: Roots
  misc_feature: MA Experiment 108689 PARAMETER Experiment Name: Zm_Drought_Roots_P Parameter: Treatment Value: Drought vs. No Drought
  misc_feature: MA Experiment ID: 20000478 Result: Down-regulated in Transcription
  misc_feature: MA Experiment 20000478 PARAMETER Experiment Name: Zm_5mM_SA_P Parameter: Age (day) Value: 11
  misc_feature: MA Experiment 20000478 PARAMETER Experiment Name: Zm_5mM_SA_P Parameter: Organism Value: Zea mays
  misc_feature: MA Experiment 20000478 PARAMETER Experiment Name: Zm_5mM_SA_P Parameter: Plant Line Value: 35A19
  misc_feature: MA Experiment 20000478 PARAMETER Experiment Name: Zm_5mM_SA_P Parameter: Timepoint (hr) Value: 72
  misc_feature: MA Experiment 20000478 PARAMETER Experiment Name: Zm_5mM_SA_P Parameter: Tissue Value: Aerial
  misc_feature: MA Experiment 20000478 PARAMETER Experiment Name: Zm_5mM_SA_P Parameter: Treatment Value: 5mM SA vs. No Treatment
  misc_feature: MA Experiment ID: 20000480 Result: Down-regulated in Transcription
  misc_feature: MA Experiment 20000480 PARAMETER Experiment Name: Zm_Drought_P Parameter: Age (day) Value: 11
  misc_feature: MA Experiment 20000480 PARAMETER Experiment Name: Zm_Drought_P Parameter: Organism Value: Zea mays
  misc_feature: MA Experiment 20000480 PARAMETER Experiment Name: Zm_Drought_P Parameter: Plant Line Value: 35A19
  misc_feature: MA Experiment 20000480 PARAMETER Experiment Name: Zm_Drought_P Parameter: Timepoint (hr) Value: 72
  misc_feature: MA Experiment 20000480 PARAMETER Experiment Name: Zm_Drought_P Parameter: Tissue Value: Aerial
  misc_feature: MA Experiment 20000480 PARAMETER Experiment Name: Zm_Drought_P Parameter: Treatment Value: Drought vs. No Drought
atgctgtcgttccggcgccaggtgaccaaggacaacaacttgtcagtgaaatcggggtcacgcaaatctggccctgatgaccaccattggagctccccagccaaactgccacataaggacgttgacaagatttccagagaaaagaagcagccgtggatgccgttcatctgctgccactccgtgcgctgataatatattttgcatcagttgacaactctacatacatgtgctgctgtaactaatgctatccgtctttgtgtagatagtctgcaatctagtatctgatattttgaatcagtgcaattttgatgtatccgctacctgacttgttagacatttgcgcgtgaatctgtcctgatgttcagattcagctagtgtttctgtggactgaacaggcctggaatcttgtaccggatt

SEQ ID NO: 111680 - protein, 62 aa, Zea mays subsp. mays
  misc_feature (1)..(62): Ceres Seq. ID no. 14306115
  misc_feature (1)..(61): Homolog of NCBI NO: 29647493 NR Description: OJ1191_A10.17 [Oryza sativa (japonica
MLSFRRQVTKDNNLSVKSGSRKSGPDDHHWSSPAKLPHKDVDKISREKKQPWMPFICCHSVR

SEQ ID NO: 111681 - protein, 44 aa, Zea mays subsp. mays
  misc_feature (1)..(44): Ceres Seq. ID no. 14306116
MTTIGAPQPNCHIRTLTRFPEKRSSRGCRSSAATPCADNIFCIS

SEQ ID NO: 111682 - DNA, 739 bp, Zea mays subsp. mays
  misc_feature (1)..(739): Ceres Seq. ID no. 12566963
gaaatgttttgcggtttcacaaggcagaagcgacgtgggagcacaagcgccaagtagtccaacagcactggcggacggacctcaagcaattcgcttccatgtgttctctctctgtcccctcggtctcagtagtgtcgaaggaaaacacacacaggcatgaggcatccctgtgagtttgttggtcttgaactcttgatgctgaaaatggagattaaagagcattattttgaggtctgtgacattatagatgacttgtccgtatcaatattaaaccacttgactgaaaactgcaagaaagaactcgagacaataaacgggcagtatccattttgaacctctgaagtatctagacaaaaccttgaagatcacttacgacgaatgagttcaaatgttaaaggtacaaacttacagctgtctcttgctactgtaacggagtccttctgttagatattacgatcctaacgccttccttttcattttcccatgctttgctatatttgagtccggtagacaaatgcttgttctgctgccctaggcccctagcagcttagtgcaaggagcagttcagcttgattgatatgacgttatttgcattgtntaagcttggtttagttgtgctgtggtgagcttagggagatgcaatccgaccattcacttgcaattgctntcaaagcttcaatttggggtgtatcacacncaaattanagagttaggaagttttagtgatccttttagcttt

SEQ ID NO: 111683 - protein, 58 aa, Zea mays subsp. mays
  misc_feature (1)..(58): Ceres Seq. ID no. 12566964
  misc_feature (2)..(58): Pfam Name: tRNA synthetases class II (D, K and N) Pfam Description: tRNA synthetases class II (D, K and N)
  misc_feature (2)..(58): Homolog of NCBI NO: 30688944 NR Description: aspartyl-tRNA synthetase (aspartate--tRNA
  misc_feature (2)..(58): Homolog of NCBI NO: 18252211 NR Description: aspartate--tRNA ligase - like protein
MRHPCEFVGLELLMLKMEIKEHYFEVCDIIDDLSVSILNHLTENCKKELETINGQYPF

SEQ ID NO: 111684 - protein, 56 aa, Zea mays subsp. mays
  misc_feature (1)..(56): Ceres Seq. ID no. 12566965
NVLRFHKAEATWEHKRQVVQQHWRTDLKQFASMCSLSVPSVSVVSKENTHRHEASL

SEQ ID NO: 111685 - protein, 52 aa, Zea mays subsp. mays
  misc_feature (1)..(52): Ceres Seq. ID no. 12566966
KCFAVSQGRSDVGAQAPSSPTALADGPQAIRFHVFSLCPLGLSSVEGKHTQA

SEQ ID NO: 111686 - DNA, 1022 bp, Zea mays subsp. mays
  misc_feature (1)..(1022): Ceres Seq. ID no. 15224539
ccccctcgagtcagctacgtaggccccccccccggagctccagtagggcaaccatctccttctgcaggagacacctctggtcaaccagagtgcaagggtgagaagcttgacaagctaataaggattggcctgttgcaactcattagtagtgtggagggcttgcaattgcagtcaactcctgaaagttttcagattaatctgctgaggctgagggccgtgcagagccaattccaacaggtgatcgtgatcgccacaagcatgctcgtcctgcgccaagttctgatgagcgagaactcgagggccactcctctggaactggaaaatgccatctcagaactcgtcaaggctctcgcggacatactggacagctcacccgattccggcacggaagagattgtgcaggcgatggtcaatgcatcagcctcagttggctcaccatcagaggagaaggttcaggccaggatgcagatgatcacccgggtgttcctcaagagcctccagcccggtgacgtggtcttcaagaaggtatcccgtgcggtctactgcgccttccgtggcatcatcttaggtggcagtggtcccaagggccagaagctggcggacgcggcattgcgccgcatcggcgccaccaaggttgtcgacagggtgttgaaggctgctgaggtgctgatcaaggtggcaacggtatcagagaaggtccacggtccctggtacaaagctctgatagtctgatgtgagcgtgaatgtgaatggtttggcttttgtgaatacagacagtgaaagtgtaaattccttgttccactgggtgggatgggagatatggtgttgtacagcaatttatagttgttggtcagtaggcagttcaggatgtgaagaattctggtgagctgggcgaatatggatgctctttcaccaggatttagtcaggctcgatggatggatgctaaaacgcgtctggaaatgtaaattgtggcaccttgtttgattttcgaactgaaataatgtaaataattgattgcgtt

SEQ ID NO: 111687 - protein, 243 aa, Zea mays subsp. mays
  misc_feature (1)..(243): Ceres Seq. ID no. 15224540
  misc_feature (30)..(242): Pfam Name: T-complex protein 11 Pfam Description: T-complex protein 11
  misc_feature (107)..(242): Homolog of NCBI NO: 15219971 NR Description: expressed protein [Arabidopsis thaliana]
  misc_feature (13)..(138): Homolog of NCBI NO: 15219971 NR Description: expressed protein [Arabidopsis thaliana]
  misc_feature (30)..(242): Homolog of NCBI NO: 15233756 NR Description: expressed protein [Arabidopsis thaliana]
  misc_feature (12)..(241): Homolog of NCBI NO: 39545651 NR Description: OJ000114_01.6 [Oryza sativa (japonica
  misc_feature (12)..(241): Homolog of NCBI NO: 39545653 NR Description: OJ000114_01.8 [Oryza sativa (japonica
PPRVSYVGPPPGAPVGQPSPSAGDTSGQPECKGEKLDKLIRIGLLQLISSVEGLQLQSTPESFQINLLRLRAVQSQFQQVIVIATSMLVLRQVLMSENSRATPLELENAISELVKALADILDSSPDSGTEEIVQAMVNASASVGSPSEEKVQARMQMITRVFLKSLQPGDVVFKKVSRAVYCAFRGIILGGSGPKGQKLADAALRRIGATKVVDRVLKAAEVLIKVATVSEKVHGPWYKALIV

SEQ ID NO: 111688 - protein, 157 aa, Zea mays subsp. mays
  misc_feature (1)..(157): Ceres Seq. ID no. 15224541
  misc_feature (1)..(156): Pfam Name: T-complex protein 11 Pfam Description: T-complex protein 11
  misc_feature (21)..(156): Homolog of NCBI NO: 15219971 NR Description: expressed protein [Arabidopsis thaliana]
  misc_feature (1)..(52): Homolog of NCBI NO: 15219971 NR Description: expressed protein [Arabidopsis thaliana]
  misc_feature (1)..(156): Homolog of NCBI NO: 15233756 NR Description: expressed protein [Arabidopsis thaliana]
  misc_feature (1)..(155): Homolog of NCBI NO: 39545651 NR Description: OJ000114_01.6 [Oryza sativa (japonica
  misc_feature (1)..(155): Homolog of NCBI NO: 39545653 NR Description: OJ000114_01.8 [Oryza sativa (japonica
MLVLRQVLMSENSRATPLELENAISELVKALADILDSSPDSGTEEIVQAMVNASASVGSPSEEKVQARMQMITRVFLKSLQPGDVVFKKVSRAVYCAFRGIILGGSGPKGQKLADAALRRIGATKVVDRVLKAAEVLIKVATVSEKVHGPWYKALIV

SEQ ID NO: 111689 - protein, 149 aa, Zea mays subsp. mays
  misc_feature (1)..(149): Ceres Seq. ID no. 15224542
  misc_feature (1)..(148): Pfam Name: T-complex protein 11 Pfam Description: T-complex protein 11
  misc_feature (13)..(148): Homolog of NCBI NO: 15219971 NR Description: expressed protein [Arabidopsis thaliana]
  misc_feature (1)..(44): Homolog of NCBI NO: 15219971 NR Description: expressed protein [Arabidopsis thaliana]
  misc_feature (1)..(148): Homolog of NCBI NO: 15233756 NR Description: expressed protein [Arabidopsis thaliana]
  misc_feature (1)..(147): Homolog of NCBI NO: 39545651 NR Description: OJ000114_01.6 [Oryza sativa (japonica
  misc_feature (1)..(147): Homolog of NCBI NO: 39545653 NR Description: OJ000114_01.8 [Oryza sativa (japonica
MSENSRATPLELENAISELVKALADILDSSPDSGTEEIVQAMVNASASVGSPSEEKVQARMQMITRVFLKSLQPGDVVFKKVSRAVYCAFRGIILGGSGPKGQKLADAALRRIGATKVVDRVLKAAEVLIKVATVSEKVHGPWYKALIV

SEQ ID NO: 111690 - DNA, 838 bp, Zea mays subsp. mays
  misc_feature (1)..(838): Ceres Seq. ID no. 14305784
aaaagagagtactccgttcatgaaatagaggagatgcttgattataagaagatggccgagagggagcacaggcagacggatgagatcaagaacatggaaacattcctcactgcactcagctgcaccaagacgctccagttgcacttatcgactgaatactccgaggttttggacatggtcaaggcttcaacgttgacgagtttgcccaagaaaaagtacctgcatggcttgaaatcactcagccttactctggaccacaaccatgcagttcttgctactctagtctcatgcttgctgaacagctctcccaacctcaaggatctcagaatcattgagctccggcacccggggagcccggtgcccttggctgcggagttctgggagaagaagataaccgcggacgggtttctgtaccacctggcgagcgtcaccttctacaccgactcgctcctggaaggccacccttgcgagggcatctgcaagttcctggtgatgaacgcgagggtcctcaagaggatgagcatcgtgtaccaccactcgcaggtcaggccggagcatgcagccaagctcgaggcggcccggagggagctccgtgtctggccgagggcttccgcggacgtgctgctggagttgactcctgtccatcggttcccatggttctgaggggcgaggtcgctgatccattgctcacatgcagatcctgcactgcagcttttgttctactcctgttctatctatgcctctcattgactctggcttgctctaagatgtagacaccagatgctaggcaccgtttaaggggatgtttgtttctagtgactaatgtttagtccctaag

SEQ ID NO: 111691 - protein, 220 aa, Zea mays subsp. mays
  misc_feature (1)..(220): Ceres Seq. ID no. 14305785
  misc_feature (68)..(206): Homolog of NCBI NO: 34910584 NR Description: B1131B07.20 [Oryza sativa (japonica
  misc_feature (80)..(110): Homolog of NCBI NO: 34910586 NR Description: B1131B07.21 [Oryza sativa (japonica
  misc_feature (139)..(220): Homolog of NCBI NO: 34910586 NR Description: B1131B07.21 [Oryza sativa (japonica
KREYSVHEIEEMLDYKKMAEREHRQTDEIKNMETFLTALSCTKTLQLHLSTEYSEVLDMVKASTLTSLPKKKYLHGLKSLSLTLDHNHAVLATLVSCLLNSSPNLKDLRIIELRHPGSPVPLAAEFWEKKITADGFLYHLASVTFYTDSLLEGHPCEGICKFLVMNARVLKRMSIVYHHSQVRPEHAAKLEAARRELRVWPRASADVLLELTPVHRFPWF

SEQ ID NO: 111692 - protein, 209 aa, Zea mays subsp. mays
  misc_feature (1)..(209): Ceres Seq. ID no. 14305786
  misc_feature (57)..(195): Homolog of NCBI NO: 34910584 NR Description: B1131B07.20 [Oryza sativa (japonica
  misc_feature (69)..(99): Homolog of NCBI NO: 34910586 NR Description: B1131B07.21 [Oryza sativa (japonica
  misc_feature (128)..(209): Homolog of NCBI NO: 34910586 NR Description: B1131B07.21 [Oryza sativa (japonica
MLDYKKMAEREHRQTDEIKNMETFLTALSCTKTLQLHLSTEYSEVLDMVKASTLTSLPKKKYLHGLKSLSLTLDHNHAVLATLVSCLLNSSPNLKDLRIIELRHPGSPVPLAAEFWEKKITADGFLYHLASVTFYTDSLLEGHPCEGICKFLVMNARVLKRMSIVYHHSQVRPEHAAKLEAARRELRVWPRASADVLLELTPVHRFPWF

SEQ ID NO: 111693 - protein, 203 aa, Zea mays subsp. mays
  misc_feature (1)..(203): Ceres Seq. ID no. 14305787
  misc_feature (51)..(189): Homolog of NCBI NO: 34910584 NR Description: B1131B07.20 [Oryza sativa (japonica
  misc_feature (63)..(93): Homolog of NCBI NO: 34910586 NR Description: B1131B07.21 [Oryza sativa (japonica
  misc_feature (122)..(203): Homolog of NCBI NO: 34910586 NR Description: B1131B07.21 [Oryza sativa (japonica
MAEREHRQTDEIKNMETFLTALSCTKTLQLHLSTEYSEVLDMVKASTLTSLPKKKYLHGLKSLSLTLDHNHAVLATLVSCLLNSSPNLKDLRIIELRHPGSPVPLAAEFWEKKITADGFLYHLASVTFYTDSLLEGHPCEGICKFLVMNARVLKRMSIVYHHSQVRPEHAAKLEAARRELRVWPRASADVLLELTPVHRFPWF

SEQ ID NO: 111694 - DNA, 768 bp, Zea mays subsp. mays
  misc_feature (1)..(768): Ceres Seq. ID no. 12589383
  misc_feature: MA Experiment ID: 108522 Result: Up-regulated in Transcription
  misc_feature: MA Experiment 108522 PARAMETER Experiment Name: Zm_42deg_Heat_P Parameter: Age (day) Value: 8
  misc_feature: MA Experiment 108522 PARAMETER Experiment Name: Zm_42deg_Heat_P Parameter: Organism Value: Zea mays
  misc_feature: MA Experiment 108522 PARAMETER Experiment Name: Zm_42deg_Heat_P Parameter: Plant Line Value: 35A19
  misc_feature: MA Experiment 108522 PARAMETER Experiment Name: Zm_42deg_Heat_P Parameter: Temperature (deg C) Value: 42 vs. 22
  misc_feature: MA Experiment 108522 PARAMETER Experiment Name: Zm_42deg_Heat_P Parameter: Timepoint (hr) Value: 1
  misc_feature: MA Experiment 108522 PARAMETER Experiment Name: Zm_42deg_Heat_P Parameter: Tissue Value: Aerial
  misc_feature: MA Experiment ID: 108536 Result: Up-regulated in Transcription
  misc_feature: MA Experiment 108536 PARAMETER Experiment Name: Zm_Meristem_P Parameter: Age (day) Value: 8
  misc_feature: MA Experiment 108536 PARAMETER Experiment Name: Zm_Meristem_P Parameter: Organism Value: Zea mays
  misc_feature: MA Experiment 108536 PARAMETER Experiment Name: Zm_Meristem_P Parameter: Plant Line Value: 35A19
  misc_feature: MA Experiment 108536 PARAMETER Experiment Name: Zm_Meristem_P Parameter: Tissue Value: Shoot Meristem vs. Above Shoot Meristem
  misc_feature: MA Experiment ID: 108556 Result: Up-regulated in Transcription
  misc_feature: MA Experiment 108556 PARAMETER Experiment Name: Zm_Drought_P Parameter: Age (day) Value: 9
  misc_feature: MA Experiment 108556 PARAMETER Experiment Name: Zm_Drought_P Parameter: Organism Value: Zea mays
  misc_feature: MA Experiment 108556 PARAMETER Experiment Name: Zm_Drought_P Parameter: Plant Line Value: 35A19
  misc_feature: MA Experiment 108556 PARAMETER Experiment Name: Zm_Drought_P Parameter: Timepoint (hr) Value: 24
  misc_feature: MA Experiment 108556 PARAMETER Experiment Name: Zm_Drought_P Parameter: Tissue Value: Aerial
  misc_feature: MA Experiment 108556 PARAMETER Experiment Name: Zm_Drought_P Parameter: Treatment Value: Drought vs. No Drought
  misc_feature: MA Experiment ID: 20000479 Result: Up-regulated in Transcription
  misc_feature: MA Experiment 20000479 PARAMETER Experiment Name: Zm_Drought_P Parameter: Age (day) Value: 10
  misc_feature: MA Experiment 20000479 PARAMETER Experiment Name: Zm_Drought_P Parameter: Organism Value: Zea mays
  misc_feature: MA Experiment 20000479 PARAMETER Experiment Name: Zm_Drought_P Parameter: Plant Line Value: 35A19
  misc_feature: MA Experiment 20000479 PARAMETER Experiment Name: Zm_Drought_P Parameter: Timepoint (hr) Value: 48
  misc_feature: MA Experiment 20000479 PARAMETER Experiment Name: Zm_Drought_P Parameter: Tissue Value: Aerial
  misc_feature: MA Experiment 20000479 PARAMETER Experiment Name: Zm_Drought_P Parameter: Treatment Value: Drought vs. No Drought
  misc_feature: MA Experiment ID: 20000480 Result: Up-regulated in Transcription
  misc_feature: MA Experiment 20000480 PARAMETER Experiment Name: Zm_Drought_P Parameter: Age (day) Value: 11
  misc_feature: MA Experiment 20000480 PARAMETER Experiment Name: Zm_Drought_P Parameter: Organism Value: Zea mays
  misc_feature: MA Experiment 20000480 PARAMETER Experiment Name: Zm_Drought_P Parameter: Plant Line Value: 35A19
  misc_feature: MA Experiment 20000480 PARAMETER Experiment Name: Zm_Drought_P Parameter: Timepoint (hr) Value: 72
  misc_feature: MA Experiment 20000480 PARAMETER Experiment Name: Zm_Drought_P Parameter: Tissue Value: Aerial
  misc_feature: MA Experiment 20000480 PARAMETER Experiment Name: Zm_Drought_P Parameter: Treatment Value: Drought vs. No Drought
agaaagcttcgaacatattcaaacgtattgatctgataaatttctctgcatgccaatttgctaacccagctttgcaaagacactatgggatcttggaggccttagctttaggcgaagatgagatgcctgatataaaggatgagaccctgcctgacgaagaaggcttgtctaagccaggggtagccaatgctattgaggaattcaagacttcagtctatggtgaaaattatgaccaagaggaggcagaagcggcagcagggaaagcttcccgtggtaatgcttcaaaaaagcggaaggaggtcactgatgcagctgcgcagataagtgctgcttatgattgggcagaacttgcagacaatggaaaactgaaggaaatgaccacggtggaattgagatcctacctgaccgcgcatgatctcccggtttctggtaagaaagatgtacttatcagcaggatcttgactcacctgggtaagtgaagccgggtatccgaactgttagtttcctgagacccgactgacatctgtagtgctgtctcgcggatccttgtggaccgtaatcctcccccgtgcaggctacgtgccgattttttgtatagcgacaggacagcaccagttgccaatgtaacctgtgttaagtttcgtcttgtggtatcatctgcttgtcattgtcaacatgaaacataatgtaattctggatacttagacccncaatatggagcataactgcataaggtatgttaaagcataggccctctttagcatggcc

SEQ ID NO: 111695 - protein, 158 aa, Zea mays subsp. mays
  misc_feature (1)..(158): Ceres Seq. ID no. 12589384
  misc_feature (19)..(158): Homolog of NCBI NO: 3241858 NR Description: Ku70 [Mus musculus]
  misc_feature (19)..(158): Homolog of NCBI NO: 110652 NR Description: Lupus autoantigen p70 - mouse (fragment)
  misc_feature (1)..(158): Homolog of NCBI NO: 25518483 NR Description: hypothetical protein F6I1.2 - Arabidopsis
  misc_feature (57)..(158): Homolog of NCBI NO: 25518483 NR Description: hypothetical protein F6I1.2 - Arabidopsis
  misc_feature (1)..(158): Homolog of NCBI NO: 18394425 NR Description: expressed protein
  misc_feature (1)..(158): Homolog of NCBI NO: 34393279 NR Description: putative ATP-dependent DNA helicase II 70 kDa
  misc_feature (13)..(158): Homolog of NCBI NO: 4630797 NR Description: human Ku70 autoantigen homologue [Xenopus laevis]
  misc_feature (19)..(158): Homolog of NCBI NO: 21717799 NR Description: thyroid autoantigen
  misc_feature (19)..(158): Homolog of NCBI NO: 19548754 NR Description: Ku70 [Mus musculus]
  misc_feature (19)..(158): Homolog of NCBI NO: 6753928 NR Description: thyroid autoantigen; thyroid autoantigen 70 kDa;
KASNIFKRIDLINFSACQFANPALQRHYGILEALALGEDEMPDIKDETLPDEEGLSKPGVANAIEEFKTSVYGENYDQEEAEAAAGKASRGNASKKRKEVTDAAAQISAAYDWAELADNGKLKEMTTVELRSYLTAHDLPVSGKKDVLISRILTHLGK

SEQ ID NO: 111696 - protein, 118 aa, Zea mays subsp. mays
  misc_feature (1)..(118): Ceres Seq. ID no. 12589385
  misc_feature (1)..(118): Homolog of NCBI NO: 4630797 NR Description: human Ku70 autoantigen homologue [Xenopus laevis]
  misc_feature (1)..(118): Homolog of NCBI NO: 21717799 NR Description: thyroid autoantigen
  misc_feature (1)..(118): Homolog of NCBI NO: 6753928 NR Description: thyroid autoantigen; thyroid autoantigen 70 kDa;
  misc_feature (1)..(118): Homolog of NCBI NO: 19548754 NR Description: Ku70 [Mus musculus]
  misc_feature (1)..(118): Homolog of NCBI NO: 3241858 NR Description: Ku70 [Mus musculus]
  misc_feature (1)..(118): Homolog of NCBI NO: 110652 NR Description: Lupus autoantigen p70 - mouse (fragment)
  misc_feature (1)..(118): Homolog of NCBI NO: 25518483 NR Description: hypothetical protein F6I1.2 - Arabidopsis
  misc_feature (17)..(118): Homolog of NCBI NO: 25518483 NR Description: hypothetical protein F6I1.2 - Arabidopsis
  misc_feature (1)..(118): Homolog of NCBI NO: 18394425 NR Description: expressed protein
  misc_feature (1)..(118): Homolog of NCBI NO: 34393279 NR Description: putative ATP-dependent DNA helicase II 70 kDa
MPDIKDETLPDEEGLSKPGVANAIEEFKTSVYGENYDQEEAEAAAGKASRGNASKKRKEVTDAAAQISAAYDWAELADNGKLKEMTTVELRSYLTAHDLPVSGKKDVLISRILTHLGK

SEQ ID NO: 111697 - DNA, 575 bp, Zea mays subsp. mays
  misc_feature (1)..(575): Ceres Seq. ID no. 13577582
gccaatcaagaaacgagagagcatagatcatatcagaacgaagaacaaaaaccaacaagtcaatatggccgacggctctgctttgtgcattattatcattactttattcataccacctctcggcgtcttcctgatctcaggctgtagcgttgacttgctaatcaacatccttctcaccattctcggatacttcccaggccacatacatgcctattacctagaatatgtgtattaccatcgtcgcggtcttgctgctggcggaacgacgtttgcgaagcccgctacgggagtttattccgagcggattcagtcgggaggtcatcatcagcagacgcaatatgggactatacggacttgatcgagcgtggcttattggaaagtggctagtcattagagatttgcagcttgagtctttgcatgtctagttaggggtgggagtttgggtaggttggcagtggtggatgatacctatttgttatggcgtcggtttgggaggttttgtcgaaagctagttactgggttacttgatattggtgcccattaagtatagctttaataccatggttttacgattt

SEQ ID NO: 111698 - protein, 118 aa, Zea mays subsp. mays
  misc_feature (1)..(118): Ceres Seq. ID no. 13577583
  misc_feature (31)..(73): Pfam Name: Uncharacterized protein family UPF0057 Pfam Description: Uncharacterized protein family UPF0057
  misc_feature (32)..(77): Homolog of NCBI NO: 39598070 NR Description: Hypothetical protein CBG14697 [Caenorhabditis
  misc_feature (22)..(73): Homolog of NCBI NO: 34896280 NR Description: putative low temperature and salt responsive
  misc_feature (30)..(73): Homolog of NCBI NO: 39590745 NR Description: Hypothetical protein CBG09982 [Caenorhabditis
  misc_feature (28)..(80): Homolog of NCBI NO: 15234810 NR Description: stress responsive protein homolog [Arabidopsis
  misc_feature (31)..(73): Homolog of NCBI NO: 15214248 NR Description: Protein Ric1
  misc_feature (28)..(73): Homolog of NCBI NO: 17556987 NR Description: Putative membrane protein, with a transmembrane
  misc_feature (28)..(73): Homolog of NCBI NO: 482177 NR Description: hypothetical protein ZK632.10 - Caenorhabditis
  misc_feature (31)..(77): Homolog of NCBI NO: 19112142 NR Description: UPF0057 family protein; possible stress response
  misc_feature (26)..(82): Homolog of NCBI NO: 6320080 NR Description: Homology to PMP3/SNA1 (Sensitivity to Na+); Sna4p
  misc_feature (22)..(116): Homolog of NCBI NO: 28949921 NR Description: conserved hypothetical protein [Neurospora crassa]
PIKKRESIDHIRTKNKNQQVNMADGSALCIIIITLFIPPLGVFLISGCSVDLLINILLTILGYFPGHIHAYYLEYVYYHRRGLAAGGTTFAKPATGVYSERIQSGGHHQQTQYGTIRT

SEQ ID NO: 111699 - protein, 97 aa, Zea mays subsp. mays
  misc_feature (1)..(97): Ceres Seq. ID no. 13577584
  misc_feature (10)..(52): Pfam Name: Uncharacterized protein family UPF0057 Pfam Description: Uncharacterized protein family UPF0057
  misc_feature (11)..(56): Homolog of NCBI NO: 39598070 NR Description: Hypothetical protein CBG14697 [Caenorhabditis
  misc_feature (1)..(52): Homolog of NCBI NO: 34896280 NR Description: putative low temperature and salt responsive
  misc_feature (9)..(52): Homolog of NCBI NO: 39590745 NR Description: Hypothetical protein CBG09982 [Caenorhabditis
  misc_feature (7)..(59): Homolog of NCBI NO: 15234810 NR Description: stress responsive protein homolog [Arabidopsis
  misc_feature (10)..(52): Homolog of NCBI NO: 15214248 NR Description: Protein Ric1
  misc_feature (7)..(52): Homolog of NCBI NO: 17556987 NR Description: Putative membrane protein, with a transmembrane
  misc_feature (7)..(52): Homolog of NCBI NO: 482177 NR Description: hypothetical protein ZK632.10 - Caenorhabditis
  misc_feature (10)..(56): Homolog of NCBI NO: 19112142 NR Description: UPF0057 family protein; possible stress response
  misc_feature (5)..(61): Homolog of NCBI NO: 6320080 NR Description: Homology to PMP3/SNA1 (Sensitivity to Na+); Sna4p
  misc_feature (1)..(95): Homolog of NCBI NO: 28949921 NR Description: conserved hypothetical protein [Neurospora crassa]
MADGSALCIIIITLFIPPLGVFLISGCSVDLLINILLTILGYFPGHIHAYYLEYVYYHRRGLAAGGTTFAKPATGVYSERIQSGGHHQQTQYGTIRT

SEQ ID NO: 111700 - protein, 66 aa, Zea mays subsp. mays
  misc_feature (1)..(66): Ceres Seq. ID no. 13577585
MCITIVAVLLLAERRLRSPLREFIPSGFSREVIISRRNMGLYGLDRAWLIGKWLVIRDLQLESLHV

SEQ ID NO: 111701 - DNA, 1000 bp, Zea mays subsp. mays
  misc_feature (1)..(1000): Ceres Seq. ID no. 15225689
aaggggattaatgttgggtattgccggggtttttccatgcaggacttgttaaaaggcgggccaggaaattttatttggcccccttttggggggaattgggttcgggggcccccctcgrgttmagctwygtwggggcccccccccccccccctccctgcgacgtcmrgaactgaaggaagtcatagcaaagcaacaagagctgggttttgacccacctgagctaccgcctggctatctatcagaaattggggatcaatgcattgaaaataaaaataataggaaaactcaattcagggattctcattttggaaatcgtttcaataataacaaaagatcaaggtatgagcgtggaggttttcagtctaaaagatctaaggtatggaaccgtactcctcacgctgatcacgggatggtcaagagcagagaaccaaccctcctgcagaagcttcttagctctgatatcaagagggataaacgtagacttattcacgtgttcagattcatgaccttgaacaatttctttaaggactggcctgacaggcctttacagtttcctagtgttaagatgaatcagattgaaataggaagcaatattagcacagatgatttggagaatgctgggatgtccaaagacagcatccttggtgtaaacgaaaatggtgattggaaagagttgagctcgattgatgaagaggataccgatagcgccaaccacaatgatgaagacgtcgatgatgacagtgttgacagcagcattgaggatggggccgaggaggacgggtacgaagagcagtttaatgagcctgaagatgatacggcagtctgaaaatttgactgagccgggtatccacatcaaaaagacaaagcgcttctccttgagtagagtttttgcacaacacattctgtagctcttcgcatattccagttataggagagggtctggtgtttaaagaaactttgtactttgttgtagttgaattgttatgttatcgccgggaat

SEQ ID NO: 111702 - protein, 138 aa, Zea mays subsp. mays
  misc_feature (1)..(138): Ceres Seq. ID no. 15225690
  misc_feature (1)..(95): Homolog of NCBI NO: 15238815 NR Description: hypothetical protein [Arabidopsis thaliana]
  misc_feature (1)..(110): Homolog of NCBI NO: 34909224 NR Description: P0432B10.22 [Oryza sativa (japonica
MVKSREPTLLQKLLSSDIKRDKRRLIHVFRFMTLNNFFKDWPDRPLQFPSVKMNQIEIGSNISTDDLENAGMSKDSILGVNENGDWKELSSIDEEDTDSANHNDEDVDDDSVDSSIEDGAEEDGYEEQFNEPEDDTAV

SEQ ID NO: 111703 - protein, 107 aa, Zea mays subsp. mays
  misc_feature (1)..(107): Ceres Seq. ID no. 15225691
  misc_feature (1)..(64): Homolog of NCBI NO: 15238815 NR Description: hypothetical protein [Arabidopsis thaliana]
  misc_feature (1)..(79): Homolog of NCBI NO: 34909224 NR Description: P0432B10.22 [Oryza sativa (japonica
MTLNNFFKDWPDRPLQFPSVKMNQIEIGSNISTDDLENAGMSKDSILGVNENGDWKELSSIDEEDTDSANHNDEDVDDDSVDSSIEDGAEEDGYEEQFNEPEDDTAV

SEQ ID NO: 111704 - protein, 86 aa, Zea mays subsp. mays
  misc_feature (1)..(86): Ceres Seq. ID no. 15225692
  misc_feature (1)..(43): Homolog of NCBI NO: 15238815 NR Description: hypothetical protein [Arabidopsis thaliana]
  misc_feature (1)..(58): Homolog of NCBI NO: 34909224 NR Description: P0432B10.22 [Oryza sativa (japonica
MNQIEIGSNISTDDLENAGMSKDSILGVNENGDWKELSSIDEEDTDSANHNDEDVDDDSVDSSIEDGAEEDGYEEQFNEPEDDTAV

SEQ ID NO: 111705 - DNA, 822 bp, Zea mays subsp. mays
  misc_feature (1)..(822): Ceres Seq. ID no. 14303237
gcgtgatctctctcccttcctcccttccggcgacgcctgggccaccgccgcggccgccctacgccaggtgcccaggtcctcgtccggcccttcgccggcgatgagcacccaccaggccaatacgctgcggttgtacctcacctgcatccggaacactctggaggcggcgatgtgcctccagaatttcccttgccaagaagtcgagaggcacaacaaaccggaggtggagctcaagacaagccctgaacttctgctgaatccggtattgatatgccgcaacgaagcagaaaaatgcttgatagagacttcaatcaactccatacgtataagcatgaaggttaagcaggcagatgaattggagaacattcttgccaagaagttccttaggtttttgtcaatgagggcagaggcattccaagtgttgaggagaaaaccggttcagggctatgatatcagtttcctgataacaaactaccattgtgaggacatgcataagcacaagctcatagatttcatcgtgcaatttatggaggatattgacaaggagatcagtgagctgaagctgtcagtaaacactcgtggccggctagtggccactgaattcttgaagcagttcttatgactcggccatggccgtagtcagtgttgattatcatggcctgcaactaagctgccgttctgcaacagctttaagatttttttacacgacagctcttgtaaatgccttgccaaagatgcattcgtggccctgggccacctgattaacagctgacaattacagtatcaggacgcacatagcgctctgagattgttcatgtgatc

SEQ ID NO: 111706 - protein, 206 aa, Zea mays subsp. mays
  misc_feature (1)..(206): Ceres Seq. ID no. 14303238
  misc_feature (45)..(205): Pfam Name: ARP2/3 complex 20 kDa subunit (ARPC4) Pfam Description: ARP2/3 complex 20 kDa subunit (ARPC4)
  misc_feature (41)..(203): Homolog of NCBI NO: 33244031 NR Description: Actin related protein 2/3 complex, subunit 4 [Mus
  misc_feature (41)..(205): Homolog of NCBI NO: 26345244 NR Description: unnamed protein product [Mus musculus]
  misc_feature (39)..(205): Homolog of NCBI NO: 31242821 NR Description: ENSANGP00000020957 [Anopheles gambiae]
  misc_feature (39)..(205): Homolog of NCBI NO: 27525268 NR Description: putative ARP2/3 complex 20KD subunit (P20-ARC)
  misc_feature (41)..(205): Homolog of NCBI NO: 34783179 NR Description: ARPC4 protein [Homo sapiens]
  misc_feature (41)..(205): Homolog of NCBI NO: 12857620 NR Description: unnamed protein product [Mus musculus]
  misc_feature (41)..(205): Homolog of NCBI NO: 5031595 NR Description: actin related protein 2/3 complex subunit 4
  misc_feature (45)..(205): Homolog of NCBI NO: 4093169 NR Description: p20-Arc [Dictyostelium discoideum]
  misc_feature (39)..(201): Homolog of NCBI NO: 29244680 NR Description: putative ARP2/3 complex 20 kDa subunit,
  misc_feature (39)..(206): Homolog of NCBI NO: 34897476 NR Description: putative actin-related complex protein
RDLSPFLPSGDAWATAAAALRQVPRSSSGPSPAMSTHQANTLRLYLTCIRNTLEAAMCLQNFPCQEVERHNKPEVELKTSPELLLNPVLICRNEAEKCLIETSINSIRISMKVKQADELENILAKKFLRFLSMRAEAFQVLRRKPVQGYDISFLITNYHCEDMHKHKLIDFIVQFMEDIDKEISELKLSVNTRGRLVATEFLKQFL

SEQ ID NO: 111707 - protein, 173 aa, Zea mays subsp. mays
  misc_feature (1)..(173): Ceres Seq. ID no. 14303239
  misc_feature (12)..(172): Pfam Name: ARP2/3 complex 20 kDa subunit (ARPC4) Pfam Description: ARP2/3 complex 20 kDa subunit (ARPC4)
  misc_feature (8)..(170): Homolog of NCBI NO: 33244031 NR Description: Actin related protein 2/3 complex, subunit 4 [Mus
  misc_feature (8)..(172): Homolog of NCBI NO: 26345244 NR Description: unnamed protein product [Mus musculus]
  misc_feature (6)..(172): Homolog of NCBI NO: 31242821 NR Description: ENSANGP00000020957 [Anopheles gambiae]
  misc_feature (6)..(172): Homolog of NCBI NO: 27525268 NR Description: putative ARP2/3 complex 20KD subunit (P20-ARC)
  misc_feature (8)..(172): Homolog of NCBI NO: 34783179 NR Description: ARPC4 protein [Homo sapiens]
  misc_feature (8)..(172): Homolog of NCBI NO: 12857620 NR Description: unnamed protein product [Mus musculus]
  misc_feature (8)..(172): Homolog of NCBI NO: 5031595 NR Description: actin related protein 2/3 complex subunit 4
  misc_feature (12)..(172): Homolog of NCBI NO: 4093169 NR Description: p20-Arc [Dictyostelium discoideum]
  misc_feature (6)..(168): Homolog of NCBI NO: 29244680 NR Description: putative ARP2/3 complex 20 kDa subunit,
  misc_feature (6)..(173): Homolog of NCBI NO: 34897476 NR Description: putative actin-related complex protein
MSTHQANTLRLYLTCIRNTLEAAMCLQNFPCQEVERHNKPEVELKTSPELLLNPVLICRNEAEKCLIETSINSIRISMKVKQADELENILAKKFLRFLSMRAEAFQVLRRKPVQGYDISFLITNYHCEDMHKHKLIDFIVQFMEDIDKEISELKLSVNTRGRLVATEFLKQFL

SEQ ID NO: 111708 - protein, 150 aa, Zea mays subsp. mays
  misc_feature (1)..(150): Ceres Seq. ID no. 14303240
  misc_feature (1)..(149): Pfam Name: ARP2/3 complex 20 kDa subunit (ARPC4) Pfam Description: ARP2/3 complex 20 kDa subunit (ARPC4)
  misc_feature (1)..(147): Homolog of NCBI NO: 33244031 NR Description: Actin related protein 2/3 complex, subunit 4 [Mus
  misc_feature (1)..(149): Homolog of NCBI NO: 26345244 NR Description: unnamed protein product [Mus musculus]
  misc_feature (1)..(149): Homolog of NCBI NO: 31242821 NR Description: ENSANGP00000020957 [Anopheles gambiae]
  misc_feature (1)..(149): Homolog of NCBI NO: 27525268 NR Description: putative ARP2/3 complex 20KD subunit (P20-ARC)
  misc_feature (1)..(149): Homolog of NCBI NO: 34783179 NR Description: ARPC4 protein [Homo sapiens]
  misc_feature (1)..(149): Homolog of NCBI NO: 12857620 NR Description: unnamed protein product [Mus musculus]
  misc_feature (1)..(149): Homolog of NCBI NO: 5031595 NR Description: actin related protein 2/3 complex subunit 4
  misc_feature (1)..(149): Homolog of NCBI NO: 4093169 NR Description: p20-Arc [Dictyostelium discoideum]
  misc_feature (1)..(145): Homolog of NCBI NO: 29244680 NR Description: putative ARP2/3 complex 20 kDa subunit,
  misc_feature (1)..(150): Homolog of NCBI NO: 34897476 NR Description: putative actin-related complex protein
MCLQNFPCQEVERHNKPEVELKTSPELLLNPVLICRNEAEKCLIETSINSIRISMKVKQADELENILAKKFLRFLSMRAEAFQVLRRKPVQGYDISFLITNYHCEDMHKHKLIDFIVQFMEDIDKEISELKLSVNTRGRLVATEFLKQFL

SEQ ID NO: 111709 - DNA, 936 bp, Zea mays subsp. mays
  misc_feature (1)..(936): Ceres Seq. ID no. 13599030
gatggtggtagcgatcaaaaacttatctggttttgttgaggctgacaaggatggaaattggtcttgtcccactgacaagaagcataagcatgagatatttccaaacccggtattagaagtcaacagactagctgctaatcttcaatcatacttggagcaaaggggagcaaaactgcctgatgggcatatcatcgggagagttgttctgccaaatcccaactgcaggccttcctatactataagcacccaaccagaggtcatgctgtatgatcaatggaaggatctcaagacagactcaaagactggactctcagcatggattaaaggtgcatttactggaagcagaagtgacatgcaagattctgtactccagaatctacattttattctcagctcatcgcctatgtgggacaggttggaactcaaaggagacaaaaatgttcttggtgaattcattgaattcaaaggcaggcatgaggacgttcaacttctcaaaattctcaaggggtcaaaagtcagtcgcttcatcatccagaagtcaactctttttggtggttttggtaggtcacgagttcaaatattgtattctcctcgtgactatcgagctgaggggacttcatcttcagagttgaaagagatttctgtgaagcaatacacggagatcgttttccaaccactgcgttccaaaaaggctcggaagttcaagctgtccaatgttgtttctgtcacactgagtgcctagcaagcagaagcttgcctttcaaatttaggctagccaagtagccatatctcttgtattttatatttctcgtccgtgtgtgtaactcatcagttgtgtgcttctctgtttgcacttgtaattatgtgtctgttcttgatgatgagggaagtaacttacaacgacggctaactgaatatgcttcgtactgttgcttg

SEQ ID NO: 111710 - protein, 246 aa, Zea mays subsp. mays
  misc_feature (1)..(246): Ceres Seq. ID no. 13599031
  misc_feature (1)..(184): Homolog of NCBI NO: 25373168 NR Description: hypothetical protein F16G16.1 [imported] -
  misc_feature (1)..(246): Homolog of NCBI NO: 15220924 NR Description: hypothetical protein [Arabidopsis thaliana]
  misc_feature (1)..(246): Homolog of NCBI NO: 37537134 NR Description: unknown protein [Oryza sativa (japonica
MVVAIKNLSGFVEADKDGNWSCPTDKKHKHEIFPNPVLEVNRLAANLQSYLEQRGAKLPDGHIIGRVVLPNPNCRPSYTISTQPEVMLYDQWKDLKTDSKTGLSAWIKGAFTGSRSDMQDSVLQNLHFILSSSPMWDRLELKGDKNVLGEFIEFKGRHEDVQLLKILKGSKVSRFIIQKSTLFGGFGRSRVQILYSPRDYRAEGTSSSELKEISVKQYTEIVFQPLRSKKARKFKLSNVVSVTLSA

SEQ ID NO: 111711 - protein, 160 aa, Zea mays subsp. mays
  misc_feature (1)..(160): Ceres Seq. ID no. 13599032
  misc_feature (1)..(98): Homolog of NCBI NO: 25373168 NR Description: hypothetical protein F16G16.1 [imported] -
  misc_feature (1)..(160): Homolog of NCBI NO: 15220924 NR Description: hypothetical protein [Arabidopsis thaliana]
  misc_feature (1)..(160): Homolog of NCBI NO: 37537134 NR Description: unknown protein [Oryza sativa (japonica
MLYDQWKDLKTDSKTGLSAWIKGAFTGSRSDMQDSVLQNLHFILSSSPMWDRLELKGDKNVLGEFIEFKGRHEDVQLLKILKGSKVSRFIIQKSTLFGGFGRSRVQILYSPRDYRAEGTSSSELKEISVKQYTEIVFQPLRSKKARKFKLSNVVSVTLSA

SEQ ID NO: 111712 - protein, 129 aa, Zea mays subsp. mays
  misc_feature (1)..(129): Ceres Seq. ID no. 13599033
  misc_feature (1)..(67): Homolog of NCBI NO: 25373168 NR Description: hypothetical protein F16G16.1 [imported] -
  misc_feature (1)..(129): Homolog of NCBI NO: 15220924 NR Description: hypothetical protein [Arabidopsis thaliana]
  misc_feature (1)..(129): Homolog of NCBI NO: 37537134 NR Description: unknown protein [Oryza sativa (japonica
MQDSVLQNLHFILSSSPMWDRLELKGDKNVLGEFIEFKGRHEDVQLLKILKGSKVSRFIIQKSTLFGGFGRSRVQILYSPRDYRAEGTSSSELKEISVKQYTEIVFQPLRSKKARKFKLSNVVSVTLSA

SEQ ID NO: 111713 - DNA, 1507 bp, Zea mays subsp. mays
  misc_feature (1)..(1507): Ceres Seq. ID no. 13586716
tcagctacgtaggccccccccccacctgctctgctcctcagccccagcccaggccttcgctctcgctgccctgagccctccgcgttccccgcccgccacgcgatgccggcgtgggccgaagcggcgctcgtgctcgcctcaccatcccccgccaccgcctcctcgaccacgtcatcatgtggcgccaggccgcgcgccgccgtggggtccgtcaggctcttctgcaagggattcccttgtagcattcgttccaaagctggattccagattcataattaccgtacaaggatgtttaagattaaagcaaaagcagaatctggtgatggctacacacggcttgctccacttagatttgaatctccaagtggccagcttctgattcaaatactacaatcacaccctcatcttatccctgcaacagttgatcagcaacttggaaatcttcaatcagagaaatctgcccaaagtgaagaagcctcaaaagttccccaggacctcctctacaagagaattgcagaagtcaaagagaaggaaaggcaaaatgccttagaagagattatctactgttgggttacatataggttcatggaaaatgacatatatatgacacctgcattatcaccagggggtggccctgtacgtgacatatccgcattgcctaatcaagaagacaaattgcgaaacatacactccgcagacgcctttgagatgatacaaaaccatctcaatcttatcatgggagaaaagatagcatcaccgcccgatactgttgttgagatcagcaacttgaatcttggaaagctgtatgcagcatccatcatgtatggttactttctgaagagagtggatgagcgattccaacttgagaaaactatgaagactctcccaccaaagcccaaccagcagatagtatttgaaaacctacagcctaatccattctgggatatggagtccttagtacagattacacctgatggggaggagataagtttggacgatgaaaaatcaaatccaaacaagttgaggtcttatgtctcacaactggatgctgacacattgcaaagatatgctactatcagatcgaaggaagccgtctcactgatcgagaagcaaactcaggcgttgtttggacggccagacatcaaagtattggacgatggttcggtcaatgcaaaggatggcagaatgataacaatcacatttacagagctcaatcatctggtcttggaggcagttgctttcggttccttcctttgggaagctgagagttacgtagaatcaaaataccattttgtcaacagttgaatgtgccttttcttatttgaattttggaaatggtttgtgtacatgtgatagggtaggatccatatctgatctattttttcagtgtattcatggttcttgctcgctatcagtaacagccaaagcatcaccacccatgaaccatgcctgtaacaggtttgagatttttcatcaaaggaagcgggcctgatccatagtgtaatct

SEQ ID NO: 111714 - protein, 400 aa, Zea mays subsp. mays
  misc_feature (1)..(400): Ceres Seq. ID no. 13586717
  misc_feature (41)..(400): Pfam Name: Protein of unknown function (DUF760) Pfam Description: Protein of unknown function (DUF760)
  misc_feature (67)..(261): Homolog of NCBI NO: 18397912 NR Description: expressed protein [Arabidopsis thaliana]
  misc_feature (281)..(392): Homolog of NCBI NO: 32470642 NR Description: hypothetical protein [Solanum bulbocastanum]
  misc_feature (62)..(262): Homolog of NCBI NO: 15221185 NR Description: expressed protein [Arabidopsis thaliana]
  misc_feature (149)..(398): Homolog of NCBI NO: 13561930 NR Description: unknown [Brassica napus]
  misc_feature (90)..(398): Homolog of NCBI NO: 15221185 NR Description: expressed protein [Arabidopsis thaliana]
  misc_feature (79)..(398): Homolog of NCBI NO: 28301943 NR Description: unknown protein [Oryza sativa (japonica
  misc_feature (70)..(398): Homolog of NCBI NO: 18401645 NR Description: expressed protein [Arabidopsis thaliana]
  misc_feature (70)..(398): Homolog of NCBI NO: 17064820 NR Description: Unknown protein [Arabidopsis thaliana]
  misc_feature (41)..(400): Homolog of NCBI NO: 18398302 NR Description: expressed protein [Arabidopsis thaliana]
  misc_feature (1)..(400): Homolog of NCBI NO: 32489097 NR Description: OSJNBa0093F12.3 [Oryza sativa (japonica
MPAWAEAALVLASPSPATASSTTSSCGARPRAAVGSVRLFCKGFPCSIRSKAGFQIHNYRTRMFKIKAKAESGDGYTRLAPLRFESPSGQLLIQILQSHPHLIPATVDQQLGNLQSEKSAQSEEASKVPQDLLYKRIAEVKEKERQNALEEIIYCWVTYRFMENDIYMTPALSPGGGPVRDISALPNQEDKLRNIHSADAFEMIQNHLNLIMGEKIASPPDTVVEISNLNLGKLYAASIMYGYFLKRVDERFQLEKTMKTLPPKPNQQIVFENLQPNPFWDMESLVQITPDGEEISLDDEKSNPNKLRSYVSQLDADTLQRYATIRSKEAVSLIEKQTQALFGRPDIKVLDDGSVNAKDGRMITITFTELNHLVLEAVAFGSFLWEAESYVESKYHFVNS

SEQ ID NO: 111715 - protein, 338 aa, Zea mays subsp. mays
  misc_feature (1)..(338): Ceres Seq. ID no. 13586718
  misc_feature (1)..(338): Pfam Name: Protein of unknown function (DUF760) Pfam Description: Protein of unknown function (DUF760)
  misc_feature (1)..(338): Homolog of NCBI NO: 32489097 NR Description: OSJNBa0093F12.3 [Oryza sativa (japonica
  misc_feature (5)..(199): Homolog of NCBI NO: 18397912 NR Description: expressed protein [Arabidopsis thaliana]
  misc_feature (219)..(330): Homolog of NCBI NO: 32470642 NR Description: hypothetical protein [Solanum bulbocastanum]
  misc_feature (1)..(200): Homolog of NCBI NO: 15221185 NR Description: expressed protein [Arabidopsis thaliana]
  misc_feature (87)..(336): Homolog of NCBI NO: 13561930 NR Description: unknown [Brassica napus]
  misc_feature (28)..(336): Homolog of NCBI NO: 15221185 NR Description: expressed protein [Arabidopsis thaliana]
  misc_feature (17)..(336): Homolog of NCBI NO: 28301943 NR Description: unknown protein [Oryza sativa (japonica
  misc_feature (8)..(336): Homolog of NCBI NO: 18401645 NR Description: expressed protein [Arabidopsis thaliana]
  misc_feature (8)..(336): Homolog of NCBI NO: 17064820 NR Description: Unknown protein [Arabidopsis thaliana]
  misc_feature (1)..(338): Homolog of NCBI NO: 18398302 NR Description: expressed protein [Arabidopsis thaliana]
MFKIKAKAESGDGYTRLAPLRFESPSGQLLIQILQSHPHLIPATVDQQLGNLQSEKSAQSEEASKVPQDLLYKRIAEVKEKERQNALEEIIYCWVTYRFMENDIYMTPALSPGGGPVRDISALPNQEDKLRNIHSADAFEMIQNHLNLIMGEKIASPPDTVVEISNLNLGKLYAASIMYGYFLKRVDERFQLEKTMKTLPPKPNQQIVFENLQPNPFWDMESLVQITPDGEEISLDDEKSNPNKLRSYVSQLDADTLQRYATIRSKEAVSLIEKQTQALFGRPDIKVLDDGSVNAKDGRMITITFTELNHLVLEAVAFGSFLWEAESYVESKYHFVNS

SEQ ID NO: 111716 - protein, 239 aa, Zea mays subsp. mays
  misc_feature (1)..(239): Ceres Seq. ID no. 13586719
  misc_feature (1)..(239): Pfam Name: Protein of unknown function (DUF760) Pfam Description: Protein of unknown function (DUF760)
  misc_feature (1)..(100): Homolog of NCBI NO: 18397912 NR Description: expressed protein [Arabidopsis thaliana]
  misc_feature (120)..(231): Homolog of NCBI NO: 32470642 NR Description: hypothetical protein [Solanum bulbocastanum]
  misc_feature (1)..(101): Homolog of NCBI NO: 15221185 NR Description: expressed protein [Arabidopsis thaliana]
  misc_feature (1)..(237): Homolog of NCBI NO: 13561930 NR Description: unknown [Brassica napus]
  misc_feature (1)..(237): Homolog of NCBI NO: 15221185 NR Description: expressed protein [Arabidopsis thaliana]
  misc_feature (1)..(237): Homolog of NCBI NO: 28301943 NR Description: unknown protein [Oryza sativa (japonica
  misc_feature (1)..(237): Homolog of NCBI NO: 18401645 NR Description: expressed protein [Arabidopsis thaliana]
  misc_feature (1)..(237): Homolog of NCBI NO: 17064820 NR Description: Unknown protein [Arabidopsis thaliana]
  misc_feature (1)..(239): Homolog of NCBI NO: 18398302 NR Description: expressed protein [Arabidopsis thaliana]
  misc_feature (1)..(239): Homolog of NCBI NO: 32489097 NR Description: OSJNBa0093F12.3 [Oryza sativa (japonica
MENDIYMTPALSPGGGPVRDISALPNQEDKLRNIHSADAFEMIQNHLNLIMGEKIASPPDTVVEISNLNLGKLYAASIMYGYFLKRVDERFQLEKTMKTLPPKPNQQIVFENLQPNPFWDMESLVQITPDGEEISLDDEKSNPNKLRSYVSQLDADTLQRYATIRSKEAVSLIEKQTQALFGRPDIKVLDDGSVNAKDGRMITITFTELNHLVLEAVAFGSFLWEAESYVESKYHFVNS

SEQ ID NO: 111717 - DNA, 832 bp, Zea mays subsp. mays
  misc_feature (1)..(832): Ceres Seq. ID no. 15177512
  misc_feature: MA Experiment ID: 108597 Result: Up-regulated in Transcription
  misc_feature: MA Experiment 108597 PARAMETER Experiment Name: Zm_100uM_ABA_P Parameter: Age (day) Value: 9
  misc_feature: MA Experiment 108597 PARAMETER Experiment Name: Zm_100uM_ABA_P Parameter: Organism Value: Zea mays
  misc_feature: MA Experiment 108597 PARAMETER Experiment Name: Zm_100uM_ABA_P Parameter: Plant Line Value: 35A19
  misc_feature: MA Experiment 108597 PARAMETER Experiment Name: Zm_100uM_ABA_P Parameter: Timepoint (hr) Value: 24
  misc_feature: MA Experiment 108597 PARAMETER Experiment Name: Zm_100uM_ABA_P Parameter: Tissue Value: Aerial
  misc_feature: MA Experiment 108597 PARAMETER Experiment Name: Zm_100uM_ABA_P Parameter: Treatment Value: 100uM ABA vs. No Treatment
atcgaacagtggtattttttatttcttctaatgaaaatggttaccatttcagtcccttttatttcttttctactagaaatatttttcttgtaaggacctttaattgtataagtttttgttcacagtggattgcagatatctgaagccctcaaactgcagatggaggtccaaaagcggctgcacgaacagttagaagtacaaaggcagctgcagttacgaattgaggctcagggaaagtacctccagaagatcatcgaagagcagcagcgcttaacaggtgtgaaatctgaaactcctgctggaggtgcttctgtcactgtatcaagtgatcaattcccagactcggagcggactgagccctccacacctgcaccagcatccgagtctccaactcaagttggtgcttccaatagggacactggagaccgaactgaagcaaccaagagcacctgtcatggtgattctctttcccgcaacgagccactaacccctgattccaactgccagaacggttctcctgtcgctagtccaaaccatgaaagggcagccaagaggcagcgaggcagtggtactgaattcttagattctgaggctgagttttcccttccgcgccacatcttcgagtcgagttcaggctcagagttccaacaatactcaatgtcctactcaggacagtagcttctgatgttcacatcatctctgcaccgttgctagcttgttcagcacgatgcgcatggtccgtaggtctgggtaggttgatgtctcaaggagcgtgttgttggtaaacaaagctgtaggtgttcagtgattgtctacatggtaaaaataaaag

SEQ ID NO: 111718 - protein, 172 aa, Zea mays subsp. mays
  misc_feature (1)..(172): Ceres Seq. ID no. 15177513
  misc_feature (1)..(67): Homolog of NCBI NO: 14596181 NR Description: transfactor-like protein [Arabidopsis thaliana]
  misc_feature (1)..(81): Homolog of NCBI NO: 4519671 NR Description: transfactor [Nicotiana tabacum]
  misc_feature (1)..(131): Homolog of NCBI NO: 34394528 NR Description: transfactor-like protein [Oryza sativa (japonica
  misc_feature (1)..(107): Homolog of NCBI NO: 21536970 NR Description: transfactor-like protein [Arabidopsis thaliana]
  misc_feature (1)..(97): Homolog of NCBI NO: 15229298 NR Description: transfactor -related [Arabidopsis thaliana]
  misc_feature (1)..(97): Homolog of NCBI NO: 26452281 NR Description: putative transfactor [Arabidopsis thaliana]
  misc_feature (1)..(107): Homolog of NCBI NO: 15795136 NR Description: transfactor-like protein [Arabidopsis thaliana]
  misc_feature (1)..(107): Homolog of NCBI NO: 18399836 NR Description: expressed protein [Arabidopsis thaliana]
  misc_feature (1)..(134): Homolog of NCBI NO: 15226170 NR Description: transfactor-related protein [Arabidopsis
  misc_feature (1)..(171): Homolog of NCBI NO: 29647445 NR Description: putative transfactor [Oryza sativa (japonica
MEVQKRLHEQLEVQRQLQLRIEAQGKYLQKIIEEQQRLTGVKSETPAGGASVTVSSDQFPDSERTEPSTPAPASESPTQVGASNRDTGDRTEATKSTCHGDSLSRNEPLTPDSNCQNGSPVASPNHERAAKRQRGSGTEFLDSEAEFSLPRHIFESSSGSEFQQYSMSYSGQ

SEQ ID NO: 111719 - DNA, 693 bp, Zea mays subsp. mays
  misc_feature (1)..(693): Ceres Seq. ID no. 13622871
  misc_feature: MA Experiment ID: 20000492 Result: Up-regulated in Transcription
  misc_feature: MA Experiment 20000492 PARAMETER Experiment Name: Zm_Hybrid_Seed_Dev_P Parameter: DAP Value: 12
  misc_feature: MA Experiment 20000492 PARAMETER Experiment Name: Zm_Hybrid_Seed_Dev_P Parameter: Organism Value: Zea mays
  misc_feature: MA Experiment 20000492 PARAMETER Experiment Name: Zm_Hybrid_Seed_Dev_P Parameter: Plant Line Value: 35A19
  misc_feature: MA Experiment 20000492 PARAMETER Experiment Name: Zm_Hybrid_Seed_Dev_P Parameter: Tissue Value: Fert Kernel vs. Unfert Floret
gtctgtctccactctacagttgtgccgcctcgtctctctcctttcygctgcgcccccctatcgtgcgtgattctatccaggattctagggttcgttcgcctcgtctcgcgatggacaagggcagcgtcgtcgtgcccccggcccctgccgccgccgccgcgaagaaggccaagcgcttcgagatcaagaagtggaacgccgtctctctctgggcctgggacatcgtggtggacaactgcgccatctgccgcaaccacatcatggacctttgcatcgagtgccaggcgaaccaggcgagcgccaccagcgaggagtgcaccgtcgcttggggaatttgcaaccatgcattccacttccactgtatcagccgttggctaaagacccgtcaagtgtgccctcttgacaacagtgagtgggagttccagaagtatggtcactagagagaatggcttcggcgtggaattgcttcatgtttctcgtcgtttagcagtagtggttactgaatagattctggtgaacatgctatggatctgtaacgtttctgaagttctgccttacttgaagctgtaggcgaatactctggttatgccatattcgtccttcggggcgctgttgaacagctcttcctcacatgaaggtgtagacgaattactcagtttgcagaaattaattggtaattgtgggctataggct

SEQ ID NO: 111720 - protein, 145 aa, Zea mays subsp. mays
  misc_feature (1)..(145): Ceres Seq. ID no. 15219336
  misc_feature (112)..(133): Pfam Name: Zinc finger, C3HC4 type (RING finger) Pfam Description: Zinc finger, C3HC4 type (RING finger)
  misc_feature (51)..(145): Homolog of NCBI NO: 20502055 NR Description: ZYP protein [Homo sapiens]
  misc_feature (48)..(145): Homolog of NCBI NO: 18543187 NR Description: CG16982-PA [Drosophila melanogaster]
  misc_feature (36)..(145): Homolog of NCBI NO: 32425477 NR Description: RBX1 protein [Homo sapiens]
  misc_feature (36)..(145): Homolog of NCBI NO: 7657508 NR Description: ring-box 1
  misc_feature (47)..(145): Homolog of NCBI NO: 31210271 NR Description: ENSANGP00000010437 [Anopheles gambiae]
  misc_feature (36)..(145): Homolog of NCBI NO: 37537963 NR Description: RING-box protein 1 (Rbx1) (Hyperosmotic protein
  misc_feature (36)..(145): Homolog of NCBI NO: 19067884 NR Description: hyperosmotic protein 21 [Salmo salar]
  misc_feature (49)..(145): Homolog of NCBI NO: 18420256 NR Description: ring-box protein - like [Arabidopsis thaliana]
  misc_feature (37)..(145): Homolog of NCBI NO: 31747517 NR Description: ring box protein [Populus tomentosa]
  misc_feature (37)..(145): Homolog of NCBI NO: 19387246 NR Description: putative ring box-1 protein
LSPLYSCAASSLSFXLRPPIVRDSIQDSRVRSPRLAMDKGSVVVPPAPAAAAAKKAKRFEIKKWNAVSLWAWDIVVDNCAICRNHIMDLCIECQANQASATSEECTVAWGICNHAFHFHCISRWLKTRQVCPLDNSEWEFQKYGH

SEQ ID NO: 111721 - protein, 125 aa, Zea mays subsp. mays
  misc_feature (1)..(125): Ceres Seq. ID no. 15219337
  misc_feature (41)..(125): Homolog of NCBI NO: 12835172 NR Description: unnamed protein product [Mus musculus]
VCLHSTVVPPRLSPFXCAPLSCVILSRILGFVRLVSRWTRAASSCPRPLPPPPRRRPSASRSRSGTPSLSGPGTSWWTTAPSAATTSWTFASSARRTRRAPPARSAPSLGEFATMHSTSTVSAVG

SEQ ID NO: 111722 - protein, 109 aa, Zea mays subsp. mays
  misc_feature (1)..(109): Ceres Seq. ID no. 15219338
  misc_feature (76)..(97): Pfam Name: Zinc finger, C3HC4 type (RING finger) Pfam Description: Zinc finger, C3HC4 type (RING finger)
  misc_feature (15)..(109): Homolog of NCBI NO: 20502055 NR Description: ZYP protein [Homo sapiens]
  misc_feature (12)..(109): Homolog of NCBI NO: 18543187 NR Description: CG16982-PA [Drosophila melanogaster]
  misc_feature (1)..(109): Homolog of NCBI NO: 32425477 NR Description: RBX1 protein [Homo sapiens]
  misc_feature (1)..(109): Homolog of NCBI NO: 7657508 NR Description: ring-box 1
  misc_feature (11)..(109): Homolog of NCBI NO: 31210271 NR Description: ENSANGP00000010437 [Anopheles gambiae]
  misc_feature (1)..(109): Homolog of NCBI NO: 37537963 NR Description: RING-box protein 1 (Rbx1) (Hyperosmotic protein
  misc_feature (1)..(109): Homolog of NCBI NO: 19067884 NR Description: hyperosmotic protein 21 [Salmo salar]
  misc_feature (13)..(109): Homolog of NCBI NO: 18420256 NR Description: ring-box protein - like [Arabidopsis thaliana]
  misc_feature (1)..(109): Homolog of NCBI NO: 31747517 NR Description: ring box protein [Populus tomentosa]
  misc_feature (1)..(109): Homolog of NCBI NO: 19387246 NR Description: putative ring box-1 protein
MDKGSVVVPPAPAAAAAKKAKRFEIKKWNAVSLWAWDIVVDNCAICRNHIMDLCIECQANQASATSEECTVAWGICNHAFHFHCISRWLKTRQVCPLDNSEWEFQKYGH

SEQ ID NO: 111723 - DNA, 790 bp, Zea mays subsp. mays
  misc_feature (1)..(790): Ceres Seq. ID no. 14305455
atttattctgcatttggctcctctgcgccatactcggcgtttcctgattcgcagcccttcctaaggtgggcacgcgaaaagggactcactgttggcatcgtcagcaatgcagaataccgctacaaagatgtaatcctgccagctttaggattgaatcagagctccgaatgggactttggggtgttctcaggtgtcgttggcgttgagaagccagacccaagaatttacaagatagcgctggagatggcaggaaacgtcgctccggaagaagcgctccacataggtgacagcatgcggaaggactacaccccagctaggagcatcgggatgcatgcgctgctcctggaccggttcaagactgccgacgctgagagctggaggcagtcaggcgccacggtgctcccggaccttgtcgccactcaagagtggctcaccaaggatcagaatgacgaacaggaggaaacagtggcagcacgagtgctgaagagaatgtccgaaaagctatagatgggggctttaaccatgcattaattctacgagtgttcctttatattatctagctatggactgaaggtccaaaagcaacttatgctgatgagaggttggtgacgattcttggctactggctactgtaattagcttgagctactattctggttgcagcatctgtggctgaacacgagtaccatatctgagtgtcataagtcatgttgcgaagaacatgagtagcatatttcaggtgccgtttggttcatatatttgtaatgtaatgggtaacggataacgttag

SEQ ID NO: 111724 - protein, 168 aa, Zea mays subsp. mays
  misc_feature (1)..(168): Ceres Seq. ID no. 14305456
  misc_feature (1)..(118): Pfam Name: haloacid dehalogenase-like hydrolase Pfam Description: haloacid dehalogenase-like hydrolase
  misc_feature (1)..(159): Homolog of NCBI NO: 7505080 NR Description: hypothetical protein K01G5.1 - Caenorhabditis
  misc_feature (1)..(124): Homolog of NCBI NO: 17553988 NR Description: predicted CDS, haloacid dehalogenase-like
  misc_feature (1)..(117): Homolog of NCBI NO: 23041810 NR Description: hypothetical protein [Trichodesmium erythraeum
  misc_feature (1)..(117): Homolog of NCBI NO: 23130292 NR Description: hypothetical protein [Nostoc punctiforme]
  misc_feature (11)..(125): Homolog of NCBI NO: 11559439 NR Description: hypothetical protein [Thermus thermophilus]
  misc_feature (1)..(119): Homolog of NCBI NO: 17231587 NR Description: hypothetical protein [Nostoc sp. PCC 7120]
  misc_feature (1)..(115): Homolog of NCBI NO: 21312204 NR Description: RIKEN cDNA 2810435D12 [Mus musculus]
  misc_feature (1)..(115): Homolog of NCBI NO: 27714603 NR Description: similar to RIKEN cDNA 2810435D12
  misc_feature (81)..(168): Homolog of NCBI NO: 1362147 NR Description: hypothetical protein (clone AFD1) - wild oat
  misc_feature (1)..(148): Homolog of NCBI NO: 15241564 NR Description: haloacid dehalogenase-like hydrolase family
IYSAFGSSAPYSAFPDSQPFLRWAREKGLTVGIVSNAEYRYKDVILPALGLNQSSEWDFGVFSGVVGVEKPDPRIYKIALEMAGNVAPEEALHIGDSMRKDYTPARSIGMHALLLDRFKTADAESWRQSGATVLPDLVATQEWLTKDQNDEQEETVAARVLKRMSEKL

SEQ ID NO: 111725 - protein, 87 aa, Zea mays subsp. mays
  misc_feature (1)..(87): Ceres Seq. ID no. 14305457
  misc_feature (1)..(78): Homolog of NCBI NO: 7505080 NR Description: hypothetical protein K01G5.1 - Caenorhabditis
  misc_feature (1)..(43): Homolog of NCBI NO: 17553988 NR Description: predicted CDS, haloacid dehalogenase-like
  misc_feature (1)..(36): Homolog of NCBI NO: 23041810 NR Description: hypothetical protein [Trichodesmium erythraeum
  misc_feature (1)..(36): Homolog of NCBI NO: 23130292 NR Description: hypothetical protein [Nostoc punctiforme]
  misc_feature (1)..(44): Homolog of NCBI NO: 11559439 NR Description: hypothetical protein [Thermus thermophilus]
  misc_feature (1)..(38): Homolog of NCBI NO: 17231587 NR Description: hypothetical protein [Nostoc sp. PCC 7120]
  misc_feature (1)..(34): Homolog of NCBI NO: 21312204 NR Description: RIKEN cDNA 2810435D12 [Mus musculus]
  misc_feature (1)..(34): Homolog of NCBI NO: 27714603 NR Description: similar to RIKEN cDNA 2810435D12
  misc_feature (1)..(87): Homolog of NCBI NO: 1362147 NR Description: hypothetical protein (clone AFD1) - wild oat
  misc_feature (1)..(67): Homolog of NCBI NO: 15241564 NR Description: haloacid dehalogenase-like hydrolase family
MAGNVAPEEALHIGDSMRKDYTPARSIGMHALLLDRFKTADAESWRQSGATVLPDLVATQEWLTKDQNDEQEETVAARVLKRMSEKL

SEQ ID NO: 111726 - DNA, 1414 bp, Zea mays subsp. mays
  misc_feature (1)..(1414): Ceres Seq. ID no. 15224940
aattgggttccgggccccccctcgagtcagctacgtaggccccccccccccccaaaccttgtaaaagcattaacaaacttatggaatactctggatactcatatggaagagcgtcaaccttatgggcaaattaaggtactcgcaatgacttcagtaaacggtatgctaggtcctggaagcctcacacttgagacaattcaacaggtaaaagaccagagattaaacttcaaagcagaatgaattatgtcagacaagtaactgtcttgaagctgataggttattagtttcaccatgttgaataaaataggttgaaactgaagttcagcggctgaatcagttgaaggcaagcaaaatggaagagctattcgtaaagaagagagcagaagtcgacgaaatttgcaagaaatcacacatgggcatgccttatcaaacagaaatggacaagataatgaatctgataatgtcaggagatgtggtccatgatgatttattaaagacaatggatgaatatatatacagagcaaaagaggaggccacaagccggaaagacataatggataaggttgacaaatggatggcttcatgggatgaagaacgatggctagaagaatacagcagggtgcactagctgcctgatgaccatagccatggacattgccttctctagaactttaatttttactatgttgattataattttccacaggatgaccgaaggtactcagtaagcagaggagcgcacaagcacttgaaaagggcagagcgtgctcgaattatagttaacaaaattccaggcttggtagaacagttaatggtcaagacacaattctgggaacaggagagaaacaagatcttctactatgatgagctcccgcttctggcaatgctgaaagactacatgttcacgctcaaagaaaaagaagaagagaaatacaggcaacgggagaataaaaagatacagactctacttgtaaagaggcatgagaattcaataatgttaaggcccaacacaagcttcagccgtccatcaagcagaggcttcaatacgagtcctggctccacatccatctggagcagccaagtttctgcaaaagttcagctgcctgactcagagaactccccagctgaaaaagatatgcgtgcaaaaataattaggaacagaggtatgcagggcattttgggaaataacagaagctgttcaatctctcatgaagataaagcagaagtctccacagtgaagcaagacatttcaccaatttaattttttctcactttaaatttctacagaaatttgtctgcctgacgtgaagttgcaacagcccccttaatctattagataagtgaagaaaaatatgtttgtatgcagcttacaccatattcatatatttatttatgtatgattcattaaaatgtc

SEQ ID NO: 111727 - protein, 149 aa, Zea mays subsp. mays
  misc_feature (1)..(149): Ceres Seq. ID no. 15224941
  misc_feature (1)..(85): Pfam Name: Microtubule associated protein (MAP65/ASE1 family) Pfam Description: Microtubule associated protein (MAP65/ASE1
  misc_feature (1)..(86): Homolog of NCBI NO: 8778239 NR Description: F10B6.9 [Arabidopsis thaliana]
  misc_feature (1)..(86): Homolog of NCBI NO: 21539547 NR Description: unknown protein [Arabidopsis thaliana]
  misc_feature (1)..(137): Homolog of NCBI NO: 11558254 NR Description: microtubule-associated protein MAP65-1b
  misc_feature (1)..(137): Homolog of NCBI NO: 11558256 NR Description: microtubule-associated protein MAP65-1c
  misc_feature (1)..(81): Homolog of NCBI NO: 15240485 NR Description: microtubule associated protein (MAP65/ASE1)
  misc_feature (1)..(86): Homolog of NCBI NO: 25410943 NR Description: hypothetical protein At2g01910 [imported] -
  misc_feature (1)..(86): Homolog of NCBI NO: 30677965 NR Description: microtubule associated protein (MAP65/ASE1)
  misc_feature (1)..(73): Homolog of NCBI NO: 28200790 NR Description: 65kD microtubule associated protein [Daucus
  misc_feature (1)..(102): Homolog of NCBI NO: 11558252 NR Description: microtubule-associated protein MAP65-1a
  misc_feature (1)..(85): Homolog of NCBI NO: 15217774 NR Description: microtubule associated protein (MAP65/ASE1)
MVKTQFWEQERNKIFYYDELPLLAMLKDYMFTLKEKEEEKYRQRENKKIQTLLVKRHENSIMLRPNTSFSRPSSRGFNTSPGSTSIWSSQVSAKVQLPDSENSPAEKDMRAKIIRNRGMQGILGNNRSCSISHEDKAEVSTVKQDISPI

SEQ ID NO: 111728 - protein, 125 aa, Zea mays subsp. mays
  misc_feature (1)..(125): Ceres Seq. ID no. 15224942
  misc_feature (1)..(61): Pfam Name: Microtubule associated protein (MAP65/ASE1 family) Pfam Description: Microtubule associated protein (MAP65/ASE1
  misc_feature (1)..(62): Homolog of NCBI NO: 8778239 NR Description: F10B6.9 [Arabidopsis thaliana]
  misc_feature (1)..(62): Homolog of NCBI NO: 21539547 NR Description: unknown protein [Arabidopsis thaliana]
  misc_feature (1)..(113): Homolog of NCBI NO: 11558254 NR Description: microtubule-associated protein MAP65-1b
  misc_feature (1)..(113): Homolog of NCBI NO: 11558256 NR Description: microtubule-associated protein MAP65-1c
  misc_feature (1)..(57): Homolog of NCBI NO: 15240485 NR Description: microtubule associated protein (MAP65/ASE1)
  misc_feature (1)..(62): Homolog of NCBI NO: 25410943 NR Description: hypothetical protein At2g01910 [imported] -
  misc_feature (1)..(62): Homolog of NCBI NO: 30677965 NR Description: microtubule associated protein (MAP65/ASE1)
  misc_feature (1)..(49): Homolog of NCBI NO: 28200790 NR Description: 65kD microtubule associated protein [Daucus
  misc_feature (1)..(78): Homolog of NCBI NO: 11558252 NR Description: microtubule-associated protein MAP65-1a
  misc_feature (1)..(61): Homolog of NCBI NO: 15217774 NR Description: microtubule associated protein (MAP65/ASE1)
MLKDYMFTLKEKEEEKYRQRENKKIQTLLVKRHENSIMLRPNTSFSRPSSRGFNTSPGSTSIWSSQVSAKVQLPDSENSPAEKDMRAKIIRNRGMQGILGNNRSCSISHEDKAEVSTVKQDISPI

SEQ ID NO: 111729 - protein, 120 aa, Zea mays subsp. mays
  misc_feature (1)..(120): Ceres Seq. ID no. 15224943
  misc_feature (1)..(56): Pfam Name: Microtubule associated protein (MAP65/ASE1 family) Pfam Description: Microtubule associated protein (MAP65/ASE1
  misc_feature (1)..(57): Homolog of NCBI NO: 8778239 NR Description: F10B6.9 [Arabidopsis thaliana]
  misc_feature (1)..(57): Homolog of NCBI NO: 21539547 NR Description: unknown protein [Arabidopsis thaliana]
  misc_feature (1)..(108): Homolog of NCBI NO: 11558254 NR Description: microtubule-associated protein MAP65-1b
  misc_feature (1)..(108): Homolog of NCBI NO: 11558256 NR Description: microtubule-associated protein MAP65-1c
  misc_feature (1)..(52): Homolog of NCBI NO: 15240485 NR Description: microtubule associated protein (MAP65/ASE1)
  misc_feature (1)..(57): Homolog of NCBI NO: 25410943 NR Description: hypothetical protein At2g01910 [imported] -
  misc_feature (1)..(57): Homolog of NCBI NO: 30677965 NR Description: microtubule associated protein (MAP65/ASE1)
  misc_feature (1)..(44): Homolog of NCBI NO: 28200790 NR Description: 65kD microtubule associated protein [Daucus
  misc_feature (1)..(73): Homolog of NCBI NO: 11558252 NR Description: microtubule-associated protein MAP65-1a
  misc_feature (1)..(56): Homolog of NCBI NO: 15217774 NR Description: microtubule associated protein (MAP65/ASE1)
MFTLKEKEEEKYRQRENKKIQTLLVKRHENSIMLRPNTSFSRPSSRGFNTSPGSTSIWSSQVSAKVQLPDSENSPAEKDMRAKIIRNRGMQGILGNNRSCSISHEDKAEVSTVKQDISPI

SEQ ID NO: 111730 - DNA, 963 bp, Zea mays subsp. mays
  misc_feature (1)..(963): Ceres Seq. ID no. 15178498
  misc_feature: MA Experiment ID: 108515 Result: Up-regulated in Transcription
  misc_feature: MA Experiment 108515 PARAMETER Experiment Name: Zm_2mM_SA_P Parameter: Age (day) Value: 8
  misc_feature: MA Experiment 108515 PARAMETER Experiment Name: Zm_2mM_SA_P Parameter: Organism Value: Zea mays
  misc_feature: MA Experiment 108515 PARAMETER Experiment Name: Zm_2mM_SA_P Parameter: Plant Line Value: 35A19
  misc_feature: MA Experiment 108515 PARAMETER Experiment Name: Zm_2mM_SA_P Parameter: Timepoint (hr) Value: 12
  misc_feature: MA Experiment 108515 PARAMETER Experiment Name: Zm_2mM_SA_P Parameter: Tissue Value: Aerial
  misc_feature: MA Experiment 108515 PARAMETER Experiment Name: Zm_2mM_SA_P Parameter: Treatment Value: 2mM SA vs. No Treatment
  misc_feature: MA Experiment ID: 108527 Result: Up-regulated in Transcription
  misc_feature: MA Experiment 108527 PARAMETER Experiment Name: Zm_5mM_NO_P Parameter: Age (day) Value: 8
  misc_feature: MA Experiment 108527 PARAMETER Experiment Name: Zm_5mM_NO_P Parameter: Organism Value: Zea mays
  misc_feature: MA Experiment 108527 PARAMETER Experiment Name: Zm_5mM_NO_P Parameter: Plant Line Value: 35A19
  misc_feature: MA Experiment 108527 PARAMETER Experiment Name: Zm_5mM_NO_P Parameter: Timepoint (hr) Value: 6
  misc_feature: MA Experiment 108527 PARAMETER Experiment Name: Zm_5mM_NO_P Parameter: Tissue Value: Aerial
  misc_feature: MA Experiment 108527 PARAMETER Experiment Name: Zm_5mM_NO_P Parameter: Treatment Value: 5mM NO vs. No Treatment
  misc_feature: MA Experiment ID: 108534 Result: Up-regulated in Transcription
  misc_feature: MA Experiment 108534 PARAMETER Experiment Name: Zm_4deg_Cold_P Parameter: Age (hr) Value: 8
  misc_feature: MA Experiment 108534 PARAMETER Experiment Name: Zm_4deg_Cold_P Parameter: Organism Value: Zea mays
  misc_feature: MA Experiment 108534 PARAMETER Experiment Name: Zm_4deg_Cold_P Parameter: Plant Line Value: 35A19
  misc_feature: MA Experiment 108534 PARAMETER Experiment Name: Zm_4deg_Cold_P Parameter: Temperature (deg C) Value: 4 vs. 22
  misc_feature: MA Experiment 108534 PARAMETER Experiment Name: Zm_4deg_Cold_P Parameter: Timepoint (hr) Value: 6
  misc_feature: MA Experiment 108534 PARAMETER Experiment Name: Zm_4deg_Cold_P Parameter: Tissue Value: Aerial
gtgtccatttcaactctgctccatccatatcccattcccatcacgattcacgaacccaccaaaacatcctctccgtccccggtacatgcacagaaccagagtctgcaagagaagaaggccaatgggttcgtgcgtctcccgctccggcgcgatgtcgacggcggcggagtccgtgcacgcgctcacggccaaggtcgtggacctcgacggctccgtggcgcagttcgcgccgcccgtcacggcgcaagaggccctggcggccaccgccagcggagcgcagccctcgtcgtcgtcgcgcttcctctgctgctccgacgcgctggacttcgacgcgcccatcagcgcgctggccgcgcacgacgcgctgcacccggggcagctctacttcgccctgccagcgtccatgctcggccggccgctgtccgcccagggcatggccgcgctcgccgtcaaggcctgcgcggctctggggacagcgccggtcggcagcgtcccgtcgtcgtcgctggacagaagcgaggcccgtgcggccagcagctggccgcagcggtggcagtccacgggacgagtcgcgccgctcgtcgtcgtgcacgctgacgcgcacggggagtggaagagttacccggtgcacggcgggtacaaggcggcgcgtgttggcggcggcggcggcggcggcgaccatacggtggggaagacgagaaacggagtcggttacaagggtatcgcccgtgaccttgcacccattcagaggctaagcgtgatcgtggaaggagcagagctagtgagtgatccattcattgatcagtattcagtagtactagtaaactagtacggagtagtttgatcaagccggcaatttagtttacctgctcccctgttccgtttgagaggagatcggtgtactgtacgtgtacaatatgttttcaataaacttttgattctttggaaaaaaaaaaaaaaaaa

SEQ ID NO: 111731 - protein, 275 aa, Zea mays subsp. mays
  misc_feature (1)..(275): Ceres Seq. ID no. 15178499
  misc_feature (41)..(160): Homolog of NCBI NO: 5441882 NR Description: Similar to Arabidopsis thaliana DNA contig
  misc_feature (41)..(159): Homolog of NCBI NO: 14596201 NR Description: Unknown protein [Arabidopsis thaliana]
  misc_feature (41)..(159): Homolog of NCBI NO: 18411155 NR Description: expressed protein [Arabidopsis thaliana]
  misc_feature (41)..(261): Homolog of NCBI NO: 13699079 NR Description: TMV response-related gene product [Nicotiana
  misc_feature (63)..(193): Homolog of NCBI NO: 5441883 NR Description: Similar to Arabidopsis thaliana BAC genomic
  misc_feature (41)..(156): Homolog of NCBI NO: 15240014 NR Description: expressed protein [Arabidopsis thaliana]
  misc_feature (41)..(156): Homolog of NCBI NO: 21592697 NR Description: unknown [Arabidopsis thaliana]
  misc_feature (41)..(183): Homolog of NCBI NO: 31126784 NR Description: hypothetical protein [Oryza sativa (japonica
  misc_feature (41)..(256): Homolog of NCBI NO: 34394505 NR Description: hypothetical protein [Oryza sativa (japonica
  misc_feature (54)..(167): Homolog of NCBI NO: 34904464 NR Description: OSJNBa0086P08.11 [Oryza sativa (japonica
CPFQLCSIHIPFPSRFTNPPKHPLRPRYMHRTRVCKRRRPMGSCVSRSGAMSTAAESVHALTAKVVDLDGSVAQFAPPVTAQEALAATASGAQPSSSSRFLCCSDALDFDAPISALAAHDALHPGQLYFALPASMLGRPLSAQGMAALAVKACAALGTAPVGSVPSSSLDRSEARAASSWPQRWQSTGRVAPLVVVHADAHGEWKSYPVHGGYKAARVGGGGGGGDHTVGKTRNGVGYKGIARDLAPIQRLSVIVEGAELVSDPFIDQYSVVLVN

SEQ ID NO: 111732 - protein, 250 aa, Zea mays subsp. mays
  misc_feature (1)..(250): Ceres Seq. ID no. 15178500
  misc_feature (35)..(239): Homolog of NCBI NO: 19923466 NR Description: splicing coactivator subunit SRm300
  misc_feature (12)..(239): Homolog of NCBI NO: 19923466 NR Description: splicing coactivator subunit SRm300
  misc_feature (5)..(244): Homolog of NCBI NO: 28972153 NR Description: mKIAA0324 protein [Mus musculus]
  misc_feature (35)..(239): Homolog of NCBI NO: 7512967 NR Description: hypothetical protein KIAA0324 - human (fragment)
  misc_feature (35)..(239): Homolog of NCBI NO: 6634015 NR Description: KIAA0324 protein [Homo sapiens]
  misc_feature (12)..(239): Homolog of NCBI NO: 7512967 NR Description: hypothetical protein KIAA0324 - human (fragment)
  misc_feature (12)..(239): Homolog of NCBI NO: 6634015 NR Description: KIAA0324 protein [Homo sapiens]
  misc_feature (6)..(245): Homolog of NCBI NO: 25143299 NR Description: pre-mRNA splicing SR protein related (68.2 kD)
  misc_feature (35)..(239): Homolog of NCBI NO: 5821151 NR Description: RNA binding protein [Homo sapiens]
  misc_feature (12)..(239): Homolog of NCBI NO: 5821151 NR Description: RNA binding protein [Homo sapiens]
VHFNSAPSISHSHHDSRTHQNILSVPGTCTEPESAREEGQWVRASPAPARCRRRRSPCTRSRPRSWTSTAPWRSSRRPSRRKRPWRPPPAERSPRRRRASSAAPTRWTSTRPSARWPRTTRCTRGSSTSPCQRPCSAGRCPPRAWPRSPSRPARLWGQRRSAASRRRRWTEARPVRPAAGRSGGSPRDESRRSSSCTLTRTGSGRVTRCTAGTRRRVLAAAAAAATIRWGRRETESVTRVSPVTLHPFRG

SEQ ID NO: 111733 - protein, 247 aa, Zea mays subsp. mays
  misc_feature (1)..(247): Ceres Seq. ID no. 15178501
  misc_feature (13)..(132): Homolog of NCBI NO: 5441882 NR Description: Similar to Arabidopsis thaliana DNA contig
  misc_feature (13)..(131): Homolog of NCBI NO: 14596201 NR Description: Unknown protein [Arabidopsis thaliana]
  misc_feature (13)..(131): Homolog of NCBI NO: 18411155 NR Description: expressed protein [Arabidopsis thaliana]
  misc_feature (13)..(233): Homolog of NCBI NO: 13699079 NR Description: TMV response-related gene product [Nicotiana
  misc_feature (35)..(165): Homolog of NCBI NO: 5441883 NR Description: Similar to Arabidopsis thaliana BAC genomic
  misc_feature (13)..(128): Homolog of NCBI NO: 15240014 NR Description: expressed protein [Arabidopsis thaliana]
  misc_feature (13)..(128): Homolog of NCBI NO: 21592697 NR Description: unknown [Arabidopsis thaliana]
  misc_feature (13)..(155): Homolog of NCBI NO: 31126784 NR Description: hypothetical protein [Oryza sativa (japonica
  misc_feature (13)..(228): Homolog of NCBI NO: 34394505 NR Description: hypothetical protein [Oryza sativa (japonica
  misc_feature (26)..(139): Homolog of NCBI NO: 34904464 NR Description: OSJNBa0086P08.11 [Oryza sativa (japonica
MHRTRVCKRRRPMGSCVSRSGAMSTAAESVHALTAKVVDLDGSVAQFAPPVTAQEALAATASGAQPSSSSRFLCCSDALDFDAPISALAAHDALHPGQLYFALPASMLGRPLSAQGMAALAVKACAALGTAPVGSVPSSSLDRSEARAASSWPQRWQSTGRVAPLVVVHADAHGEWKSYPVHGGYKAARVGGGGGGGDHTVGKTRNGVGYKGIARDLAPIQRLSVIVEGAELVSDPFIDQYSVVLVN

SEQ ID NO: 111734 - DNA, 1202 bp, Zea mays subsp. mays
  misc_feature (1)..(1202): Ceres Seq. ID no. 12388689
  misc_feature: MA Experiment ID: 108544 Result: Up-regulated in Transcription
  misc_feature: MA Experiment ID: 20000477 Result: Up-regulated in Transcription
  misc_feature: MA Experiment 20000477 PARAMETER Experiment Name: Zm_5mM_SA_P Parameter: Age (day) Value: 10
  misc_feature: MA Experiment 20000477 PARAMETER Experiment Name: Zm_5mM_SA_P Parameter: Organism Value: Zea mays
  misc_feature: MA Experiment 20000477 PARAMETER Experiment Name: Zm_5mM_SA_P Parameter: Plant Line Value: 35A19
  misc_feature: MA Experiment 20000477 PARAMETER Experiment Name: Zm_5mM_SA_P Parameter: Timepoint (hr) Value: 48
  misc_feature: MA Experiment 20000477 PARAMETER Experiment Name: Zm_5mM_SA_P Parameter: Tissue Value: Aerial
  misc_feature: MA Experiment 20000477 PARAMETER Experiment Name: Zm_5mM_SA_P Parameter: Treatment Value: 5mM SA vs. No Treatment
  misc_feature: MA Experiment ID: 20000534 Result: Down-regulated in Transcription
  misc_feature: MA Experiment 20000534 PARAMETER Experiment Name: Zm_Hybrid_Pollen_P Parameter: Age (day) Value: 8
  misc_feature: MA Experiment 20000534 PARAMETER Experiment Name: Zm_Hybrid_Pollen_P Parameter: Organism Value: Zea mays
  misc_feature: MA Experiment 20000534 PARAMETER Experiment Name: Zm_Hybrid_Pollen_P Parameter: Plant Line Value: 35A19
  misc_feature: MA Experiment 20000534 PARAMETER Experiment Name: Zm_Hybrid_Pollen_P Parameter: Tissue Value: Pollen vs. Aerial
  misc_feature: MA Experiment ID: 20000535 Result: Down-regulated in Transcription
  misc_feature: MA Experiment 20000535 PARAMETER Experiment Name: Zm_Hybrid_Seed_Dev_P Parameter: DAP Value: 30 vs. 12
  misc_feature: MA Experiment 20000535 PARAMETER Experiment Name: Zm_Hybrid_Seed_Dev_P Parameter: Organism Value: Zea mays
  misc_feature: MA Experiment 20000535 PARAMETER Experiment Name: Zm_Hybrid_Seed_Dev_P Parameter: Plant Line Value: 35A19
  misc_feature: MA Experiment 20000535 PARAMETER Experiment Name: Zm_Hybrid_Seed_Dev_P Parameter: Tissue Value: Embryo vs. Unfert Floret
actgctcagcagtcagtcagcactcgccacccacacgcctccgctccgcccacgggtccactccaactctccgatctccaggaatccgcggctgaggcgccggcgatggcggctcccatggtcgacgccgaatacctgcgccaggtcgacagggcgcgccgccacctccgcgccctcatctccaacaagggatgcgccccgatcatgctccgcctcgcatggcatgatgctggaacttatgacctgaagacaaaaactggtggtgcaaatggttcgattagatatgaagaagagtacactcatggttcaaatgctggtttaaagattgctatcgatctccttgagcctatcaaagcaaagaatccaaagataacatatgcagacctgtatcagcttgctggagtggttgcagtcgaagtgactggggggccaactgttgaatttattcctggcagacgtgattcgtcggtgtgcccccgtgaagggcgtctgccagatgctaagaaaggtgcaccacatctgagggacatcttttatcggatgggcttatcggacaaagatattgtagctctatcagggggacatactctgggaagggctcaccctgagaggtctggattcgatggtgcctggacaaaggagcctcttaagtttgataactcatactttcttgagctgttgaatgaggaatctgagggacttttaaagctcccaactgacaaggcactgttatcagatcctgaatttaggcgctatgtggagctctatgcaaaggatgaagatgcgttcttcaaagattatgctgaatcacacaagaaactctctgagcttggcttcacgcctcgcagcacagcaccatccaaatcagatcttccaaccgccgccgtgcttgcacagagtgcctttggggtagcagttgctgcagccgtagttatcgctggctacttgtacgaggcttccaagaaggccaagtagagggcgaagttcttctccacatggctttgctttagtaagtctgaagatcgaataacaggaccatatctgaagatcgaataacggatcatataaatgagttactcggaaaatgttctgaaatccttacgaacagaacgttgccttcatgtttacactgtactcatgagtcacagtgatatggagatggcatagcctactattggaagtatatgcattctgtgtaatcc

SEQ ID NO: 111735 - protein, 324 aa, Zea mays subsp. mays
  misc_feature (1)..(324): Ceres Seq. ID no. 12388690
  misc_feature (52)..(259): Pfam Name: Peroxidase Pfam Description: Peroxidase
  misc_feature (39)..(324): Homolog of NCBI NO: 4835909 NR Description: cytosolic ascorbate peroxidase [Mesembryanthemum
  misc_feature (37)..(322): Homolog of NCBI NO: 37030052 NR Description: putative peroxisome-bound ascorbate peroxidase
  misc_feature (37)..(322): Homolog of NCBI NO: 38344123 NR Description: OSJNBb0072N21.2 [Oryza sativa (japonica
  misc_feature (36)..(324): Homolog of NCBI NO: 3288066 NR Description: ascorbate peroxidase [Arabidopsis thaliana]
  misc_feature (36)..(324): Homolog of NCBI NO: 17066705 NR Description: ascorbate peroxidase [Capsicum annuum]
  misc_feature (36)..(324): Homolog of NCBI NO: 15430584 NR Description: peroxisomal ascorbate peroxidase [Cucurbita cv.
  misc_feature (36)..(324): Homolog of NCBI NO: 15236239 NR Description: ascorbate peroxidase, putative (APX)
  misc_feature (36)..(324): Homolog of NCBI NO: 5442410 NR Description: ascorbate peroxidase [Zantedeschia aethiopica]
  misc_feature (36)..(324): Homolog of NCBI NO: 7484726 NR Description: L-ascorbate peroxidase (EC 1.11.1.11),
  misc_feature (36)..(324): Homolog of NCBI NO: 15080682 NR Description: peroxisome type ascorbate peroxidase
TAQQSVSTRHPHASAPPTGPLQLSDLQESAAEAPAMAAPMVDAEYLRQVDRARRHLRALISNKGCAPIMLRLAWHDAGTYDLKTKTGGANGSIRYEEEYTHGSNAGLKIAIDLLEPIKAKNPKITYADLYQLAGVVAVEVTGGPTVEFIPGRRDSSVCPREGRLPDAKKGAPHLRDIFYRMGLSDKDIVALSGGHTLGRAHPERSGFDGAWTKEPLKFDNSYFLELLNEESEGLLKLPTDKALLSDPEFRRYVELYAKDEDAFFKDYAESHKKLSELGFTPRSTAPSKSDLPTAAVLAQSAFGVAVAAAVVIAGYLYEASKKAK

SEQ ID NO: 111736 - protein, 289 aa, Zea mays subsp. mays
  misc_feature (1)..(289): Ceres Seq. ID no. 12388691
  misc_feature (17)..(224): Pfam Name: Peroxidase Pfam Description: Peroxidase
  misc_feature (4)..(289): Homolog of NCBI NO: 4835909 NR Description: cytosolic ascorbate peroxidase [Mesembryanthemum
  misc_feature (2)..(287): Homolog of NCBI NO: 37030052 NR Description: putative peroxisome-bound ascorbate peroxidase
  misc_feature (2)..(287): Homolog of NCBI NO: 38344123 NR Description: OSJNBb0072N21.2 [Oryza sativa (japonica
  misc_feature (1)..(289): Homolog of NCBI NO: 3288066 NR Description: ascorbate peroxidase [Arabidopsis thaliana]
  misc_feature (1)..(289): Homolog of NCBI NO: 17066705 NR Description: ascorbate peroxidase [Capsicum annuum]
  misc_feature (1)..(289): Homolog of NCBI NO: 15430584 NR Description: peroxisomal ascorbate peroxidase [Cucurbita cv.
  misc_feature (1)..(289): Homolog of NCBI NO: 15236239 NR Description: ascorbate peroxidase, putative (APX)
  misc_feature (1)..(289): Homolog of NCBI NO: 5442410 NR Description: ascorbate peroxidase [Zantedeschia aethiopica]
  misc_feature (1)..(289): Homolog of NCBI NO: 7484726 NR Description: L-ascorbate peroxidase (EC 1.11.1.11),
  misc_feature (1)..(289): Homolog of NCBI NO: 15080682 NR Description: peroxisome type ascorbate peroxidase
MAAPMVDAEYLRQVDRARRHLRALISNKGCAPIMLRLAWHDAGTYDLKTKTGGANGSIRYEEEYTHGSNAGLKIAIDLLEPIKAKNPKITYADLYQLAGVVAVEVTGGPTVEFIPGRRDSSVCPREGRLPDAKKGAPHLRDIFYRMGLSDKDIVALSGGHTLGRAHPERSGFDGAWTKEPLKFDNSYFLELLNEESEGLLKLPTDKALLSDPEFRRYVELYAKDEDAFFKDYAESHKKLSELGFTPRSTAPSKSDLPTAAVLAQSAFGVAVAAAVVIAGYLYEASKKAK

SEQ ID NO: 111737 - protein, 285 aa, Zea mays subsp. mays
  misc_feature (1)..(285): Ceres Seq. ID no. 12388692
  misc_feature (13)..(220): Pfam Name: Peroxidase Pfam Description: Peroxidase
  misc_feature (1)..(285): Homolog of NCBI NO: 4835909 NR Description: cytosolic ascorbate peroxidase [Mesembryanthemum
  misc_feature (1)..(283): Homolog of NCBI NO: 37030052 NR Description: putative peroxisome-bound ascorbate peroxidase
  misc_feature (1)..(283): Homolog of NCBI NO: 38344123 NR Description: OSJNBb0072N21.2 [Oryza sativa (japonica
  misc_feature (1)..(285): Homolog of NCBI NO: 3288066 NR Description: ascorbate peroxidase [Arabidopsis thaliana]
  misc_feature (1)..(285): Homolog of NCBI NO: 17066705 NR Description: ascorbate peroxidase [Capsicum annuum]
  misc_feature (1)..(285): Homolog of NCBI NO: 15430584 NR Description: peroxisomal ascorbate peroxidase [Cucurbita cv.
  misc_feature (1)..(285): Homolog of NCBI NO: 15236239 NR Description: ascorbate peroxidase, putative (APX)
  misc_feature (1)..(285): Homolog of NCBI NO: 5442410 NR Description: ascorbate peroxidase [Zantedeschia aethiopica]
  misc_feature (1)..(285): Homolog of NCBI NO: 7484726 NR Description: L-ascorbate peroxidase (EC 1.11.1.11),
  misc_feature (1)..(285): Homolog of NCBI NO: 15080682 NR Description: peroxisome type ascorbate peroxidase
MVDAEYLRQVDRARRHLRALISNKGCAPIMLRLAWHDAGTYDLKTKTGGANGSIRYEEEYTHGSNAGLKIAIDLLEPIKAKNPKITYADLYQLAGVVAVEVTGGPTVEFIPGRRDSSVCPREGRLPDAKKGAPHLRDIFYRMGLSDKDIVALSGGHTLGRAHPERSGFDGAWTKEPLKFDNSYFLELLNEESEGLLKLPTDKALLSDPEFRRYVELYAKDEDAFFKDYAESHKKLSELGFTPRSTAPSKSDLPTAAVLAQSAFGVAVAAAVVIAGYLYEASKKAK

SEQ ID NO: 111738 - DNA, 751 bp, Zea mays subsp. mays
  misc_feature (1)..(751): Ceres Seq. ID no. 12634627
ggtgggttgtggcctcctatccttgcacgcacacgcaaacgcatcccatcctgtcctcgcgttactactagttagttagagagacagagaggatcgatctgctggcggcgtctaagctggagaaaggcggcgccaccgccgagggcgacgagataggcatcgacccagcggcggagactccggagcagcgcaacaagttcctggtcctccgcctgtacgaggcgctcaacgcccgggaccacgccgccgtgcagtcgctgctggcgcccgacctggagtggtggttccatggcccgcccaagcaccagcagcacatgatgcgcctcctgacaaccaccaccaccaccaccaccggcagcttccgcttcgtgccccgctccgtggacgccctcgccgcctcgtccggcaccgtgatcgccgagggccacgagaggggttgctactgggtgcacgcctggaccgtgggacccgatggggtgatcacccagctccgtgagtacttcaacaccgacctcaccgtcacccgcctcgccgccgccgtcgccgccaagtgcgtctggcagagccgccgccccgacagcgccaccaactccctgccgggactcctgctcgccctctgatcactctgagggataaattaaataccatctctatctatatactacgtatcatccttgtcgtcgtcagtcagtcagtgcaaccgtgtgcatgtatctatctatgtatctacgtattgtatttgtatcccatc

SEQ ID NO: 111739 - protein, 101 aa, Zea mays subsp. mays
  misc_feature (1)..(101): Ceres Seq. ID no. 12634628
  misc_feature (4)..(74): Homolog of NCBI NO: 4574320 NR Description: wound-induced protein WI12 [Mesembryanthemum
  misc_feature (5)..(101): Homolog of NCBI NO: 10241935 NR Description: elicitor inducible protein [Nicotiana tabacum]
  misc_feature (2)..(101): Homolog of NCBI NO: 15028339 NR Description: unknown protein [Arabidopsis thaliana]
  misc_feature (2)..(101): Homolog of NCBI NO: 139780 NR Description: WOUND-INDUCED PROTEIN 1
  misc_feature (1)..(101): Homolog of NCBI NO: 33146884 NR Description: unknown protein [Oryza sativa (japonica
  misc_feature (1)..(101): Homolog of NCBI NO: 15241041 NR Description: putative protein
  misc_feature (1)..(101): Homolog of NCBI NO: 15228414 NR Description: unknown protein; protein id: At3g10980.1
  misc_feature (1)..(101): Homolog of NCBI NO: 34898184 NR Description: P0034A04.2 [Oryza sativa (japonica
MMRLLTTTTTTTTGSFRFVPRSVDALAASSGTVIAEGHERGCYWVHAWTVGPDGVITQLREYFNTDLTVTRLAAAVAAKCVWQSRRPDSATNSLPGLLLAL

SEQ ID NO: 111740 - protein, 100 aa, Zea mays subsp. mays
  misc_feature (1)..(100): Ceres Seq. ID no. 12634629
  misc_feature (3)..(73): Homolog of NCBI NO: 4574320 NR Description: wound-induced protein WI12 [Mesembryanthemum
  misc_feature (4)..(100): Homolog of NCBI NO: 10241935 NR Description: elicitor inducible protein [Nicotiana tabacum]
  misc_feature (1)..(100): Homolog of NCBI NO: 15028339 NR Description: unknown protein [Arabidopsis thaliana]
  misc_feature (1)..(100): Homolog of NCBI NO: 139780 NR Description: WOUND-INDUCED PROTEIN 1
  misc_feature (1)..(100): Homolog of NCBI NO: 33146884 NR Description: unknown protein [Oryza sativa (japonica
  misc_feature (1)..(100): Homolog of NCBI NO: 15241041 NR Description: putative protein
  misc_feature (1)..(100): Homolog of NCBI NO: 15228414 NR Description: unknown protein; protein id: At3g10980.1
  misc_feature (1)..(100): Homolog of NCBI NO: 34898184 NR Description: P0034A04.2 [Oryza sativa (japonica
MRLLTTTTTTTTGSFRFVPRSVDALAASSGTVIAEGHERGCYWVHAWTVGPDGVITQLREYFNTDLTVTRLAAAVAAKCVWQSRRPDSATNSLPGLLLAL

SEQ ID NO: 111741 - DNA, 1150 bp, Zea mays subsp. mays
  misc_feature (1)..(1150): Ceres Seq. ID no. 14302154
ggctagtggataagctaagctctccctctcgctgagctggctgttgctcttccccaaccccgcgcgcgggggagcgataaaccctagtcttcgccgtcgtcgcaggaggacccgcgatgtcgcacttcgggaggtcaggcccgccggacatccgcgacaccttctcgctcctcgtcctcaacatcagcttccgcaccacggccgacgacctcttcccgctcttcgagcgctacggcaaggtcgtcgacgtcttcatcccgagggacaggaggaccggggactcgaggggtttcgcgttcgtgcggtacaagtacgccgacgaggcgcagaaggctatagatcggctcgatggccgtgatgtggatgggagaaacatcatggtgcagtttgcaaagtacggccccaatgctgagccaatccgcaaaggaagggttaaagagggggttgagaaatcacaagacagatcaagaagccgcagtccaaggccaaggcacagagatagagatcatagaagccaaagtcgcagcaggagcagagaaaggcatgtccgtgatagagacaggggctatcgtcgtcggagcagaagtagaagccaaagtcttagttcaagccctgacaacagaagtcatcatagagcaagagatgatgataggcgcaagagcatgagtaagagcaggagcaggagcacaagtagaagccgctcatactatagtgcttcacctgcccggcacagtgctagccctcgcaagagcccaccgccacagaggagccccactcctgcaaagcatgccaatggaaaagattcacctctgtcacgctgtgtttctccattaccgaagcgtgcaacctcccgcagcccaggcagtgatggcaaggagtaaagcttgctgatttggtgatgcctagaaaacagccttctcacggagtcacgggattgcagaaccttgagaaggttgattgagcacaatggaagtagcagtctgcaatcaaccgcgatccaaggttgctagttcttttaatggcttatagaattgtgttttccagttgtcaaaaatatgcgctggtttgtatttttggcatatactgtgtttttatacccttgcactgcatcatcatctactttatatatgcatcagtttctcgaaaccat

SEQ ID NO: 111742 - protein, 254 aa, Zea mays subsp. mays
  misc_feature (1)..(254): Ceres Seq. ID no. 14302155
  misc_feature (18)..(89): Pfam Name: RNA recognition motif. (a.k.a. RRM, RBD, or RNP domain) Pfam Description: RNA recognition motif. (a.k.a. RRM, RBD, or RNP
  misc_feature (4)..(219): Homolog of NCBI NO: 39794351 NR Description: Unknown (protein for MGC:75633) [Silurana
  misc_feature (4)..(219): Homolog of NCBI NO: 28175397 NR Description: Unknown (protein for MGC:53177) [Xenopus laevis]
  misc_feature (4)..(219): Homolog of NCBI NO: 4506899 NR Description: splicing factor, arginine/serine-rich 2 [Homo
  misc_feature (4)..(213): Homolog of NCBI NO: 28279759 NR Description: Similar to splicing factor, arginine/serine-rich
  misc_feature (4)..(219): Homolog of NCBI NO: 6755478 NR Description: splicing factor, arginine/serine-rich 2
  misc_feature (4)..(219): Homolog of NCBI NO: 266991 NR Description: Splicing factor, arginine/serine-rich 2 (Splicing
  misc_feature (1)..(251): Homolog of NCBI NO: 15237641 NR Description: arginine/serine-rich splicing factor SC35
  misc_feature (1)..(251): Homolog of NCBI NO: 9843653 NR Description: splicing factor SC35 [Arabidopsis thaliana]
  misc_feature (1)..(253): Homolog of NCBI NO: 33146621 NR Description: putative splicing factor, arginine/serine-rich 2
  misc_feature (1)..(248): Homolog of NCBI NO: 7446336 NR Description: probable arginine/serine-rich splicing factor -
MSHFGRSGPPDIRDTFSLLVLNISFRTTADDLFPLFERYGKVVDVFIPRDRRTGDSRGFAFVRYKYADEAQKAIDRLDGRDVDGRNIMVQFAKYGPNAEPIRKGRVKEGVEKSQDRSRSRSPRPRHRDRDHRSQSRSRSRERHVRDRDRGYRRRSRSRSQSLSSSPDNRSHHRARDDDRRKSMSKSRSRSTSRSRSYYSASPARHSASPRKSPPPQRSPTPAKHANGKDSPLSRCVSPLPKRATSRSPGSDGKE

SEQ ID NO: 111743 - protein, 167 aa, Zea mays subsp. mays
  misc_feature (1)..(167): Ceres Seq. ID no. 14302156
  misc_feature (1)..(132): Homolog of NCBI NO: 266991 NR Description: Splicing factor, arginine/serine-rich 2 (Splicing
  misc_feature (1)..(164): Homolog of NCBI NO: 15237641 NR Description: arginine/serine-rich splicing factor SC35
  misc_feature (1)..(164): Homolog of NCBI NO: 9843653 NR Description: splicing factor SC35 [Arabidopsis thaliana]
  misc_feature (1)..(166): Homolog of NCBI NO: 33146621 NR Description: putative splicing factor, arginine/serine-rich 2
  misc_feature (1)..(161): Homolog of NCBI NO: 7446336 NR Description: probable arginine/serine-rich splicing factor -
  misc_feature (1)..(132): Homolog of NCBI NO: 39794351 NR Description: Unknown (protein for MGC:75633) [Silurana
  misc_feature (1)..(132): Homolog of NCBI NO: 28175397 NR Description: Unknown (protein for MGC:53177) [Xenopus laevis]
  misc_feature (1)..(132): Homolog of NCBI NO: 4506899 NR Description: splicing factor, arginine/serine-rich 2 [Homo
  misc_feature (1)..(126): Homolog of NCBI NO: 28279759 NR Description: Similar to splicing factor, arginine/serine-rich
  misc_feature (1)..(132): Homolog of NCBI NO: 6755478 NR Description: splicing factor, arginine/serine-rich 2
MVQFAKYGPNAEPIRKGRVKEGVEKSQDRSRSRSPRPRHRDRDHRSQSRSRSRERHVRDRDRGYRRRSRSRSQSLSSSPDNRSHHRARDDDRRKSMSKSRSRSTSRSRSYYSASPARHSASPRKSPPPQRSPTPAKHANGKDSPLSRCVSPLPKRATSRSPGSDGKE

SEQ ID NO: 111744 - DNA, 1145 bp, Zea mays subsp. mays
  misc_feature (1)..(1145): Ceres Seq. ID no. 14305417
gccgatctaacgggaacgcgtctcacagcttccacgcgactgcaccgtggcacccgaggctcgcccccgctgagccagcggagcgaatctccatggcctccacatcctcctccaggtacgcgaaacatcgtcggatcggagaggacgatgagtcggaggaggttgaggaggaggccgaagaggagcttgagcggttcgatgatttcaccattgcttcgtcatgggaaaagtttatatctgagatagaggctatttgccgtcaatggcttgcagatggcgcaaagatcttaatgcaaaaaggtgcagagggtgttcctccttttgaaaacttatatatgatcaagcgtgaattgaagcatgggaaaagagtctattctatggagtaccatttcatgaaatctgtaaaaggtcaaaactcatattgggacgatgatacacatagcatgcagctctcatttggagttgatgagtttttgataattgctccgctgagtgccagtggtgtgatcctcgatgatccagaatcaactaagcttttgagttctgtagcaattgctctttctaattgtggcagcaattggccagcgtttgtaccagttcacgacccttcacggaaagcctatatagggattcaaaatttgggaactgtatttactcgaagatttgaagctgaccgaattggtagtcaagtgccaataagactcatgcatctggaggggttacatgagctatttctatcaaaatttgtcctatcctcgtcagattttccagctagggtaaaggttcacttctcaatgaagcttagctacaagaccccagaatatgatcatgataatgaaactttagattctgaagctactgagccattgactgaaaatgaagttgcgaaacaccctagaaaactatgggacgatgattgcccttgggcagagtggtactctgctgaggatcctgttaaaggttttgagttgactgccatctggggagagaggacatttgaagagacccttgagatggctgaagtggaaaatgcctcgtcctttgatgctgatagctggttccttcacccagttgtatctcaatacatgtaaccttttttatttgtaaatcccttgttaaccttctgcaagtaatttctatttcat

SEQ ID NO: 111745 - protein, 362 aa, Zea mays subsp. mays
  misc_feature (1)..(362): Ceres Seq. ID no. 14305418
  misc_feature (55)..(100): Homolog of NCBI NO: 28374414 NR Description: RAB3 GTPase-activating protein [Mus musculus]
  misc_feature (55)..(100): Homolog of NCBI NO: 30520087 NR Description: RAB3 GTPase-activating protein [Mus musculus]
  misc_feature (55)..(100): Homolog of NCBI NO: 26345344 NR Description: unnamed protein product [Mus musculus]
  misc_feature (131)..(331): Homolog of NCBI NO: 30520087 NR Description: RAB3 GTPase-activating protein [Mus musculus]
  misc_feature (131)..(331): Homolog of NCBI NO: 28374414 NR Description: RAB3 GTPase-activating protein [Mus musculus]
  misc_feature (131)..(331): Homolog of NCBI NO: 26345344 NR Description: unnamed protein product [Mus musculus]
  misc_feature (55)..(155): Homolog of NCBI NO: 505100 NR Description: KIAA0066 [Homo sapiens]
  misc_feature (131)..(331): Homolog of NCBI NO: 505100 NR Description: KIAA0066 [Homo sapiens]
  misc_feature (57)..(362): Homolog of NCBI NO: 10177029 NR Description: gene_id:MQJ2.13~unknown protein [Arabidopsis
  misc_feature (45)..(362): Homolog of NCBI NO: 22327950 NR Description: expressed protein [Arabidopsis thaliana]
RSNGNASHSFHATAPWHPRLAPAEPAERISMASTSSSRYAKHRRIGEDDESEEVEEEAEEELERFDDFTIASSWEKFISEIEAICRQWLADGAKILMQKGAEGVPPFENLYMIKRELKHGKRVYSMEYHFMKSVKGQNSYWDDDTHSMQLSFGVDEFLIIAPLSASGVILDDPESTKLLSSVAIALSNCGSNWPAFVPVHDPSRKAYIGIQNLGTVFTRRFEADRIGSQVPIRLMHLEGLHELFLSKFVLSSSDFPARVKVHFSMKLSYKTPEYDHDNETLDSEATEPLTENEVAKHPRKLWDDDCPWAEWYSAEDPVKGFELTAIWGERTFEETLEMAEVENASSFDADSWFLHPVVSQYM

SEQ ID NO: 111746 - protein, 332 aa, Zea mays subsp. mays
  misc_feature (1)..(332): Ceres Seq. ID no. 14305419
  misc_feature (25)..(70): Homolog of NCBI NO: 28374414 NR Description: RAB3 GTPase-activating protein [Mus musculus]
  misc_feature (25)..(70): Homolog of NCBI NO: 30520087 NR Description: RAB3 GTPase-activating protein [Mus musculus]
  misc_feature (25)..(70): Homolog of NCBI NO: 26345344 NR Description: unnamed protein product [Mus musculus]
  misc_feature (101)..(301): Homolog of NCBI NO: 28374414 NR Description: RAB3 GTPase-activating protein [Mus musculus]
  misc_feature (101)..(301): Homolog of NCBI NO: 30520087 NR Description: RAB3 GTPase-activating protein [Mus musculus]
  misc_feature (101)..(301): Homolog of NCBI NO: 26345344 NR Description: unnamed protein product [Mus musculus]
  misc_feature (25)..(125): Homolog of NCBI NO: 505100 NR Description: KIAA0066 [Homo sapiens]
  misc_feature (101)..(301): Homolog of NCBI NO: 505100 NR Description: KIAA0066 [Homo sapiens]
  misc_feature (27)..(332): Homolog of NCBI NO: 10177029 NR Description: gene_id:MQJ2.13~unknown protein [Arabidopsis
  misc_feature (15)..(332): Homolog of NCBI NO: 22327950 NR Description: expressed protein [Arabidopsis thaliana]
MASTSSSRYAKHRRIGEDDESEEVEEEAEEELERFDDFTIASSWEKFISEIEAICRQWLADGAKILMQKGAEGVPPFENLYMIKRELKHGKRVYSMEYHFMKSVKGQNSYWDDDTHSMQLSFGVDEFLIIAPLSASGVILDDPESTKLLSSVAIALSNCGSNWPAFVPVHDPSRKAYIGIQNLGTVFTRRFEADRIGSQVPIRLMHLEGLHELFLSKFVLSSSDFPARVKVHFSMKLSYKTPEYDHDNETLDSEATEPLTENEVAKHPRKLWDDDCPWAEWYSAEDPVKGFELTAIWGERTFEETLEMAEVENASSFDADSWFLHPVVSQYM

SEQ ID NO: 111747 - protein, 266 aa, Zea mays subsp. mays
  misc_feature (1)..(266): Ceres Seq. ID no. 14305420
  misc_feature (35)..(235): Homolog of NCBI NO: 26345242 NR Description: unnamed protein product [Mus musculus]
  misc_feature (35)..(235): Homolog of NCBI NO: 28374414 NR Description: RAB3 GTPase-activating protein [Mus musculus]
  misc_feature (35)..(235): Homolog of NCBI NO: 30520087 NR Description: RAB3 GTPase-activating protein [Mus musculus]
  misc_feature (35)..(235): Homolog of NCBI NO: 26345344 NR Description: unnamed protein product [Mus musculus]
  misc_feature (1)..(59): Homolog of NCBI NO: 505100 NR Description: KIAA0066 [Homo sapiens]
  misc_feature (35)..(235): Homolog of NCBI NO: 505100 NR Description: KIAA0066 [Homo sapiens]
  misc_feature (1)..(266): Homolog of NCBI NO: 10177029 NR Description: gene_id:MQJ2.13~unknown protein [Arabidopsis
  misc_feature (1)..(266): Homolog of NCBI NO: 22327950 NR Description: expressed protein [Arabidopsis thaliana]
MQKGAEGVPPFENLYMIKRELKHGKRVYSMEYHFMKSVKGQNSYWDDDTHSMQLSFGVDEFLIIAPLSASGVILDDPESTKLLSSVAIALSNCGSNWPAFVPVHDPSRKAYIGIQNLGTVFTRRFEADRIGSQVPIRLMHLEGLHELFLSKFVLSSSDFPARVKVHFSMKLSYKTPEYDHDNETLDSEATEPLTENEVAKHPRKLWDDDCPWAEWYSAEDPVKGFELTAIWGERTFEETLEMAEVENASSFDADSWFLHPVVSQYM

SEQ ID NO: 111748 - DNA, 631 bp, Zea mays subsp. mays
  misc_feature (1)..(631): Ceres Seq. ID no. 12589546
  misc_feature: MA Experiment ID: 108522 Result: Up-regulated in Transcription
  misc_feature: MA Experiment 108522 PARAMETER Experiment Name: Zm_42deg_Heat_P Parameter: Age (day) Value: 8
  misc_feature: MA Experiment 108522 PARAMETER Experiment Name: Zm_42deg_Heat_P Parameter: Organism Value: Zea mays
  misc_feature: MA Experiment 108522 PARAMETER Experiment Name: Zm_42deg_Heat_P Parameter: Plant Line Value: 35A19
  misc_feature: MA Experiment 108522 PARAMETER Experiment Name: Zm_42deg_Heat_P Parameter: Temperature (deg C) Value: 42 vs. 22
  misc_feature: MA Experiment 108522 PARAMETER Experiment Name: Zm_42deg_Heat_P Parameter: Timepoint (hr) Value: 1
  misc_feature: MA Experiment 108522 PARAMETER Experiment Name: Zm_42deg_Heat_P Parameter: Tissue Value: Aerial
cagctacgtaggccccccccccttcactcgagcgccgcttcctctccccttccatcgagcacagcgccgccgccaccactccgcaccgccgccagttccccacttcctccccacccccgaatcggattgaagccagaaggcaaggtgaagagtgggcttgggtgacggttacaaagagatatccccaacagttgcagtcactcgcatccagtcggctcagctatggaggaggactcatcagcgatggagcggaataggctgcgcgaggccgaggcggccgctggggagctgaagaggctgcgcgaggccgggcagtctcagtacatgtacctgtctgtcgccgacgccagggttgtcggcggccgggtctgcctcttcgccgtcgtctccgagatcggcgctaccgtccacagccgtggcacggatttcactgttacgttgagagtaatagatgaatcatacaagtctggaatatctgtaactttttttgctgacagcactgcactattgccttgtgtgaagtcgtgtggagatgtgatcagtctccataacgtcgtggtatagcataaaactctatttaatatgcaattcgcccttgattattcctcgaagttataaaaatgtctttttc

SEQ ID NO: 111749 - protein, 113 aa, Zea mays subsp. mays
  misc_feature (1)..(113): Ceres Seq. ID no. 12589547
  misc_feature (1)..(113): Homolog of NCBI NO: 38606523 NR Description: OSJNBa0016O02.10 [Oryza sativa (japonica
MEEDSSAMERNRLREAEAAAGELKRLREAGQSQYMYLSVADARVVGGRVCLFAVVSEIGATVHSRGTDFTVTLRVIDESYKSGISVTFFADSTALLPCVKSCGDVISLHNVVV

SEQ ID NO: 111750 - protein, 106 aa, Zea mays subsp. mays
  misc_feature (1)..(106): Ceres Seq. ID no. 12589548
  misc_feature (1)..(106): Homolog of NCBI NO: 38606523 NR Description: OSJNBa0016O02.10 [Oryza sativa (japonica
MERNRLREAEAAAGELKRLREAGQSQYMYLSVADARVVGGRVCLFAVVSEIGATVHSRGTDFTVTLRVIDESYKSGISVTFFADSTALLPCVKSCGDVISLHNVVV

SEQ ID NO: 111751 - protein, 79 aa, Zea mays subsp. mays
  misc_feature (1)..(79): Ceres Seq. ID no. 12589549
  misc_feature (1)..(79): Homolog of NCBI NO: 38606523 NR Description: OSJNBa0016O02.10 [Oryza sativa (japonica
MYLSVADARVVGGRVCLFAVVSEIGATVHSRGTDFTVTLRVIDESYKSGISVTFFADSTALLPCVKSCGDVISLHNVVV

SEQ ID NO: 111752 - DNA, 615 bp, Zea mays subsp. mays
  misc_feature (1)..(615): Ceres Seq. ID no. 13586784
  misc_feature: MA Experiment ID: 20000534 Result: Up-regulated in Transcription
  misc_feature: MA Experiment 20000534 PARAMETER Experiment Name: Zm_Hybrid_Pollen_P Parameter: Age (day) Value: 8
  misc_feature: MA Experiment 20000534 PARAMETER Experiment Name: Zm_Hybrid_Pollen_P Parameter: Organism Value: Zea mays
  misc_feature: MA Experiment 20000534 PARAMETER Experiment Name: Zm_Hybrid_Pollen_P Parameter: Plant Line Value: 35A19
  misc_feature: MA Experiment 20000534 PARAMETER Experiment Name: Zm_Hybrid_Pollen_P Parameter: Tissue Value: Pollen vs. Aerial
cagctacgtaggccccccccccaataatggatttttcgagattgtatgaagtgtcaaatactgtagatgagcatagagatatgcgtctagatatagacagcatgacgtatgaggagcttttagcattagaagagcagattggagatgtcaatactggtctgacaaaaagtcacattgtagataaattgaggactagcctatatgttccaggaatatcgagcatgtctgatcagccatctaaatcttctctagagaatgatgcttgcataatatgccaggaggagtaccaggctagagactgcgttggcacccttgactgcggtcacaggtaccacgcggagtgcgtgaagcagtggctgatggtgaagaacttgtgccccatctgcaagacgacagcattgtctgccaacagaagacaaggacagtgagcgggaatggagaagcctgttggttatttgctttgacaaacgttcagctcaattttgtatataaagaagtggtagacaatggcgctacctgtatttgttgttcactttgttgtgactgggagtactcagcttcctgaaactgtacagccataacatttgttatttttcttcaaatgtagaatgtttt

SEQ ID NO: 111753 - protein, 133 aa, Zea mays subsp. mays
  misc_feature (1)..(133): Ceres Seq. ID no. 13586785
  misc_feature (80)..(120): Pfam Name: Zinc finger, C3HC4 type (RING finger) Pfam Description: Zinc finger, C3HC4 type (RING finger)
  misc_feature (14)..(129): Homolog of NCBI NO: 7486381 NR Description: hypothetical protein F3L17.20 - Arabidopsis
  misc_feature (14)..(127): Homolog of NCBI NO: 38345496 NR Description: OSJNBa0010D21.9 [Oryza sativa (japonica
  misc_feature (1)..(131): Homolog of NCBI NO: 11358785 NR Description: RING-H2 finger protein RHG1a
  misc_feature (14)..(131): Homolog of NCBI NO: 15220067 NR Description: zinc finger (C3HC4-type RING finger) protein
  misc_feature (7)..(131): Homolog of NCBI NO: 8777490 NR Description: RING-finger protein (C-terminal)-like
  misc_feature (7)..(131): Homolog of NCBI NO: 18400621 NR Description: zinc finger (C3HC4-type RING finger) protein
  misc_feature (10)..(131): Homolog of NCBI NO: 22330219 NR Description: zinc finger (C3HC4-type RING finger) protein
  misc_feature (10)..(131): Homolog of NCBI NO: 20466834 NR Description: unknown protein [Arabidopsis thaliana]
  misc_feature (1)..(101): Homolog of NCBI NO: 4768982 NR Description: hypothetical protein [Oryza sativa]
  misc_feature (1)..(132): Homolog of NCBI NO: 34910942 NR Description: putative U2 snRNP auxiliary factor
MDFSRLYEVSNTVDEHRDMRLDIDSMTYEELLALEEQIGDVNTGLTKSHIVDKLRTSLYVPGISSMSDQPSKSSLENDACIICQEEYQARDCVGTLDCGHRYHAECVKQWLMVKNLCPICKTTALSANRRQGQ

SEQ ID NO: 111754 - protein, 115 aa, Zea mays subsp. mays
  misc_feature (1)..(115): Ceres Seq. ID no. 13586786
  misc_feature (62)..(102): Pfam Name: Zinc finger, C3HC4 type (RING finger) Pfam Description: Zinc finger, C3HC4 type (RING finger)
  misc_feature (1)..(111): Homolog of NCBI NO: 7486381 NR Description: hypothetical protein F3L17.20 - Arabidopsis
  misc_feature (1)..(109): Homolog of NCBI NO: 38345496 NR Description: OSJNBa0010D21.9 [Oryza sativa (japonica
  misc_feature (1)..(113): Homolog of NCBI NO: 11358785 NR Description: RING-H2 finger protein RHG1a
  misc_feature (1)..(113): Homolog of NCBI NO: 15220067 NR Description: zinc finger (C3HC4-type RING finger) protein
  misc_feature (1)..(113): Homolog of NCBI NO: 8777490 NR Description: RING-finger protein (C-terminal)-like
  misc_feature (1)..(113): Homolog of NCBI NO: 18400621 NR Description: zinc finger (C3HC4-type RING finger) protein
  misc_feature (1)..(113): Homolog of NCBI NO: 22330219 NR Description: zinc finger (C3HC4-type RING finger) protein
  misc_feature (1)..(113): Homolog of NCBI NO: 20466834 NR Description: unknown protein [Arabidopsis thaliana]
  misc_feature (1)..(83): Homolog of NCBI NO: 4768982 NR Description: hypothetical protein [Oryza sativa]
  misc_feature (1)..(114): Homolog of NCBI NO: 34910942 NR Description: putative U2 snRNP auxiliary factor
MRLDIDSMTYEELLALEEQIGDVNTGLTKSHIVDKLRTSLYVPGISSMSDQPSKSSLENDACIICQEEYQARDCVGTLDCGHRYHAECVKQWLMVKNLCPICKTTALSANRRQGQ

SEQ ID NO: 111755 - protein, 108 aa, Zea mays subsp. mays
  misc_feature (1)..(108): Ceres Seq. ID no. 13586787
  misc_feature (55)..(95): Pfam Name: Zinc finger, C3HC4 type (RING finger) Pfam Description: Zinc finger, C3HC4 type (RING finger)
  misc_feature (1)..(104): Homolog of NCBI NO: 7486381 NR Description: hypothetical protein F3L17.20 - Arabidopsis
  misc_feature (1)..(102): Homolog of NCBI NO: 38345496 NR Description: OSJNBa0010D21.9 [Oryza sativa (japonica
  misc_feature (1)..(106): Homolog of NCBI NO: 11358785 NR Description: RING-H2 finger protein RHG1a
  misc_feature (1)..(106): Homolog of NCBI NO: 15220067 NR Description: zinc finger (C3HC4-type RING finger) protein
  misc_feature (1)..(106): Homolog of NCBI NO: 8777490 NR Description: RING-finger protein (C-terminal)-like
  misc_feature (1)..(106): Homolog of NCBI NO: 18400621 NR Description: zinc finger (C3HC4-type RING finger) protein
  misc_feature (1)..(106): Homolog of NCBI NO: 22330219 NR Description: zinc finger (C3HC4-type RING finger) protein
  misc_feature (1)..(106): Homolog of NCBI NO: 20466834 NR Description: unknown protein [Arabidopsis thaliana]
  misc_feature (1)..(76): Homolog of NCBI NO: 4768982 NR Description: hypothetical protein [Oryza sativa]
  misc_feature (1)..(107): Homolog of NCBI NO: 34910942 NR Description: putative U2 snRNP auxiliary factor
MTYEELLALEEQIGDVNTGLTKSHIVDKLRTSLYVPGISSMSDQPSKSSLENDACIICQEEYQARDCVGTLDCGHRYHAECVKQWLMVKNLCPICKTTALSANRRQGQ

SEQ ID NO: 111756 - DNA, 581 bp, Zea mays subsp. mays
  misc_feature (1)..(581): Ceres Seq. ID no. 14305380
  misc_feature: MA Experiment ID: 108529 Result: Up-regulated in Transcription
  misc_feature: MA Experiment 108529 PARAMETER Experiment Name: Zm_Imbibed_Seeds_P Parameter: Age (day) Value: 5 vs. 2
  misc_feature: MA Experiment 108529 PARAMETER Experiment Name: Zm_Imbibed_Seeds_P Parameter: Organism Value: Zea mays
  misc_feature: MA Experiment 108529 PARAMETER Experiment Name: Zm_Imbibed_Seeds_P Parameter: Plant Line Value: 35A19
  misc_feature: MA Experiment 108529 PARAMETER Experiment Name: Zm_Imbibed_Seeds_P Parameter: Tissue Value: Roots vs. Embryo
  misc_feature: MA Experiment ID: 108535 Result: Down-regulated in Transcription
  misc_feature: MA Experiment 108535 PARAMETER Experiment Name: Zm_Meristem_P Parameter: Age (day) Value: 8
  misc_feature: MA Experiment 108535 PARAMETER Experiment Name: Zm_Meristem_P Parameter: Organism Value: Zea mays
  misc_feature: MA Experiment 108535 PARAMETER Experiment Name: Zm_Meristem_P Parameter: Plant Line Value: 35A19
  misc_feature: MA Experiment 108535 PARAMETER Experiment Name: Zm_Meristem_P Parameter: Tissue Value: Root Meristem vs. Above Root Meristem
gttgtttccaagcagtttgaatcctgacattcttgaaggcctacttggatctgtgggtggtgtcatggctttcctcactttgcatgaaatgctgcctcttgcatttgactattgtggccagaagcaagctgtcaaagctgtctttgtgggcatggcctgcatgtctgcaagcttgtacttcttggaagtcagcttagcaaaggagataagcttgtagcatcgcgctgcaggtactgggaggccatagcctgtcagtagatcctgaattctaggaggaggaacagcacaataaaaccatgaacagtgactactggtgtgccgccattgatattgtccatcttaccgtgaaaggagggagaaactgcatttccccagaatgtattccccagattcctcgtgggaccatatgaaagaattgaaaaatgtactgtagtactctgtcgtccggcaatggaagcttcgaagtcgtcaactaaactatttctagcactctcgtcggttgacaatggaagattctatgtaaaaacccatcagatagatgttaacctttaatctttaatttcttaaaagtacattgaaac

SEQ ID NO: 111757 - protein, 71 aa, Zea mays subsp. mays
  misc_feature (1)..(71): Ceres Seq. ID no. 14305381
  misc_feature (1)..(58): Pfam Name: ZIP Zinc transporter Pfam Description: ZIP Zinc transporter
  misc_feature (1)..(55): Homolog of NCBI NO: 38637282 NR Description: putative Zinc transporter zupT
  misc_feature (1)..(71): Homolog of NCBI NO: 18402783 NR Description: metal transporter family [Arabidopsis thaliana]
  misc_feature (1)..(71): Homolog of NCBI NO: 9294414 NR Description: gene_id:MOE17.18~unknown protein [Arabidopsis
LFPSSLNPDILEGLLGSVGGVMAFLTLHEMLPLAFDYCGQKQAVKAVFVGMACMSASLYFLEVSLAKEISL

SEQ ID NO: 111758 - protein, 50 aa, Zea mays subsp. mays
  misc_feature (1)..(50): Ceres Seq. ID no. 14305382
  misc_feature (1)..(34): Homolog of NCBI NO: 38637282 NR Description: putative Zinc transporter zupT
  misc_feature (1)..(50): Homolog of NCBI NO: 18402783 NR Description: metal transporter family [Arabidopsis thaliana]
  misc_feature (1)..(50): Homolog of NCBI NO: 9294414 NR Description: gene_id:MOE17.18~unknown protein [Arabidopsis
MAFLTLHEMLPLAFDYCGQKQAVKAVFVGMACMSASLYFLEVSLAKEISL

SEQ ID NO: 111759 - protein, 42 aa, Zea mays subsp. mays
  misc_feature (1)..(42): Ceres Seq. ID no. 14305383
  misc_feature (1)..(26): Homolog of NCBI NO: 38637282 NR Description: putative Zinc transporter zupT
  misc_feature (1)..(42): Homolog of NCBI NO: 18402783 NR Description: metal transporter family [Arabidopsis thaliana]
  misc_feature (1)..(42): Homolog of NCBI NO: 9294414 NR Description: gene_id:MOE17.18~unknown protein [Arabidopsis
MLPLAFDYCGQKQAVKAVFVGMACMSASLYFLEVSLAKEISL

SEQ ID NO: 111760 - DNA, 593 bp, Zea mays subsp. mays
  misc_feature (1)..(593): Ceres Seq. ID no. 13599038
agctacttgcatctcaacttcgtgcgtgcataataaaacctaatcatcggcacttcccgttcctctagctaggctctatagcttccgcctttaattcccccatcagaccagtcatcgtcccctcggccgccggcgagctcttcgtcttcccgtgtgatccttccttcccatccggtccggcctagactagatctgagagacacaaggagggatggggagggggaagatagtgataaggaggatagacaactccacgagcaggcaggttaccttctccaagaggcggagcgggctgctgaagaaggcgaaggagctctctatcctctgcgacgcggaggttggcctcatcatcttctccagcaccggcaggctctacgatttctccaacaccaacatgaaagctgtgatagaccgatatgggaaggcaaaagacgagcagcttggcaagaacgatgcaacttcagaactcatggtacggtgaggaaaatgtacctatttctagctaactagcagttggtagtacacacgtgccatatgatgtatgtggtcggaccaagatcaggagtttagtcctttattactcacaaatactg

SEQ ID NO: 111761 - protein, 89 aa, Zea mays subsp. mays
  misc_feature (1)..(89): Ceres Seq. ID no. 13599039
  misc_feature (1)..(76): Homolog of NCBI NO: 15225607 NR Description: MADS-box protein ANR1 [Arabidopsis thaliana]
  misc_feature (1)..(86): Homolog of NCBI NO: 30694601 NR Description: MADS-box protein [Arabidopsis thaliana]
  misc_feature (1)..(86): Homolog of NCBI NO: 11278951 NR Description: MADS-box transcription factor-like protein -
  misc_feature (1)..(86): Homolog of NCBI NO: 38344968 NR Description: OSJNBa0072F16.13 [Oryza sativa (japonica
  misc_feature (1)..(86): Homolog of NCBI NO: 38567704 NR Description: B1358B12.2 [Oryza sativa (japonica
  misc_feature (1)..(86): Homolog of NCBI NO: 9964296 NR Description: MADS box protein 2 [Zea mays]
  misc_feature (1)..(86): Homolog of NCBI NO: 30313677 NR Description: transcription factor MADS27
  misc_feature (1)..(86): Homolog of NCBI NO: 29611976 NR Description: MADS-box transcription factor MADS2 [Zea mays]
  misc_feature (1)..(88): Homolog of NCBI NO: 29367491 NR Description: MADS box protein-like protein
  misc_feature (1)..(88): Homolog of NCBI NO: 30313689 NR Description: transcription factor MADS57
MGRGKIVIRRIDNSTSRQVTFSKRRSGLLKKAKELSILCDAEVGLIIFSSTGRLYDFSNTNMKAVIDRYGKAKDEQLGKNDATSELMVR

SEQ ID NO: 111762 - DNA, 988 bp, Zea mays subsp. mays
  misc_feature (1)..(988): Ceres Seq. ID no. 12634558
gacaagtgagtttgttgatcgagataactagaaacagtgtgatgaaaatgaaggtccttgttttcttcgttgctacaattttggtagcatggcaatgccatgcgtacgatatgttccctctccgaatgaacactggctatggtgcccgtactccggaggtgaaatgcgcaagttggaggcttgctgtggaagcacacaacatctttggctttgagaccattcctgaagagtgcgttgaagcaacaaaggaatacatccatggcgaacaatatagatcagactccaaaacagttaaccaacaagcttacttttatgccagagacctcgaagtccatcccaaggacacatttgtgttcagtatagatggcaccgtactctctaatattccatactacaaaaaacatggatatggggtggagaaatttaactcgaccttgtatgatgaatgggttaacaagggcaatgcaccggcactgcccgagactcttaagaattacaacaagctggtgtctcttggcttcaagattatattcttgtcaggaagaacactggacaaacaggccgtaacagaagcaaacttaaagaaggctggctaccacacatgggaaaaattaattctcaaggatccacaagatccttccactccaaatgcagtttcatacaaaacagcagcgagagagaaactgataaggcagggatacaacattgttgggatcattggagaccaatggagcgatctcctcggaggccacagaggcgaaagcaggacctttaagcttcctaatcccctgtactacattcagtagttccttcacctctcaacaatctagcttgctcctatctatctatatgtaataagatgcgttcaaataggggcactagcttcactttatgttgtttcagctgggggtcaacaagtcatgtaagagacttcactatgttgttttctctttcggggctttaataaattatgcgcccttgttccctt

SEQ ID NO: 111763 - protein, 267 aa, Zea mays subsp. mays
  misc_feature (1)..(267): Ceres Seq. ID no. 12634559
  misc_feature (41)..(267): Pfam Name: HAD superfamily, subfamily IIIB (Acid phosphatase) Pfam Description: HAD superfamily, subfamily IIIB (Acid
  misc_feature (17)..(267): Homolog of NCBI NO: 1351033 NR Description: STEM 31 KD GLYCOPROTEIN PRECURSOR (VEGETATIVE
QVSLLIEITRNSVMKMKVLVFFVATILVAWQCHAYDMFPLRMNTGYGARTPEVKCASWRLAVEAHNIFGFETIPEECVEATKEYIHGEQYRSDSKTVNQQAYFYARDLEVHPKDTFVFSIDGTVLSNIPYYKKHGYGVEKFNSTLYDEWVNKGNAPALPETLKNYNKLVSLGFKIIFLSGRTLDKQAVTEANLKKAGYHTWEKLILKDPQDPSTPNAVSYKTAAREKLIRQGYNIVGIIGDQWSDLLGGHRGESRTFKLPNPLYYIQ

SEQ ID NO: 111764 - protein, 254 aa, Zea mays subsp. mays
  misc_feature (1)..(254): Ceres Seq. ID no. 12634560
  misc_feature (28)..(254): Pfam Name: HAD superfamily, subfamily IIIB (Acid phosphatase) Pfam Description: HAD superfamily, subfamily IIIB (Acid
  misc_feature (4)..(254): Homolog of NCBI NO: 1351033 NR Description: STEM 31 KD GLYCOPROTEIN PRECURSOR (VEGETATIVE
MKMKVLVFFVATILVAWQCHAYDMFPLRMNTGYGARTPEVKCASWRLAVEAHNIFGFETIPEECVEATKEYIHGEQYRSDSKTVNQQAYFYARDLEVHPKDTFVFSIDGTVLSNIPYYKKHGYGVEKFNSTLYDEWVNKGNAPALPETLKNYNKLVSLGFKIIFLSGRTLDKQAVTEANLKKAGYHTWEKLILKDPQDPSTPNAVSYKTAAREKLIRQGYNIVGIIGDQWSDLLGGHRGESRTFKLPNPLYYIQ

SEQ ID NO: 111765 - protein, 252 aa, Zea mays subsp. mays
  misc_feature (1)..(252): Ceres Seq. ID no. 12634561
  misc_feature (26)..(252): Pfam Name: HAD superfamily, subfamily IIIB (Acid phosphatase) Pfam Description: HAD superfamily, subfamily IIIB (Acid
  misc_feature (2)..(252): Homolog of NCBI NO: 1351033 NR Description: STEM 31 KD GLYCOPROTEIN PRECURSOR (VEGETATIVE
MKVLVFFVATILVAWQCHAYDMFPLRMNTGYGARTPEVKCASWRLAVEAHNIFGFETIPEECVEATKEYIHGEQYRSDSKTVNQQAYFYARDLEVHPKDTFVFSIDGTVLSNIPYYKKHGYGVEKFNSTLYDEWVNKGNAPALPETLKNYNKLVSLGFKIIFLSGRTLDKQAVTEANLKKAGYHTWEKLILKDPQDPSTPNAVSYKTAAREKLIRQGYNIVGIIGDQWSDLLGGHRGESRTFKLPNPLYYIQ

SEQ ID NO: 111766 - DNA, 997 bp, Zea mays subsp. mays
  misc_feature (1)..(997): Ceres Seq. ID no. 13599044
  misc_feature: MA Experiment ID: 108535 Result: Up-regulated in Transcription
  misc_feature: MA Experiment 108535 PARAMETER Experiment Name: Zm_Meristem_P Parameter: Age (day) Value: 8
  misc_feature: MA Experiment 108535 PARAMETER Experiment Name: Zm_Meristem_P Parameter: Organism Value: Zea mays
  misc_feature: MA Experiment 108535 PARAMETER Experiment Name: Zm_Meristem_P Parameter: Plant Line Value: 35A19
  misc_feature: MA Experiment 108535 PARAMETER Experiment Name: Zm_Meristem_P Parameter: Tissue Value: Root Meristem vs. Above Root Meristem
  misc_feature: MA Experiment ID: 108689 Result: Up-regulated in Transcription
  misc_feature: MA Experiment 108689 PARAMETER Experiment Name: Zm_Drought_Roots_P Parameter: Age (day) Value: 9
  misc_feature: MA Experiment 108689 PARAMETER Experiment Name: Zm_Drought_Roots_P Parameter: Organism Value: Zea mays
  misc_feature: MA Experiment 108689 PARAMETER Experiment Name: Zm_Drought_Roots_P Parameter: Plant Line Value: 35A19
  misc_feature: MA Experiment 108689 PARAMETER Experiment Name: Zm_Drought_Roots_P Parameter: Timepoint (hr) Value: 24
  misc_feature: MA Experiment 108689 PARAMETER Experiment Name: Zm_Drought_Roots_P Parameter: Tissue Value: Roots
  misc_feature: MA Experiment 108689 PARAMETER Experiment Name: Zm_Drought_Roots_P Parameter: Treatment Value: Drought vs. No Drought
tacgtaggcccccccccagttagtgctgtttcaattagaaggattccaagggttccttcagacatgcctctgtatgatatactgaatgagtttcagaaaggaagtagtcatatggctgctgttgtgaaggctaaacccaaaactgaaccaccccttgacaaaactgaaccaaacagggaagcagttggaccaacacaattgactgttcccttgttatctaatgctgaagaaagtgcagacaatgtggttgtggatatcgaaagaccacataacaggcagattaatgggaacacagcatcaaacgcagtgcctaggtcatcagaggatattgaggatggtgaggtcgttggaatcatcacacttgaggatgtattcgaagaactcctacaggaggaaatcgtggacgagactgatgaatatgttgatgtccataaaaggatccgagtagctgctgctgctgccgcatcatcggttgcaagggctccatccgttaggagattaacgggccaaaaggctgcaaaccttcagggagcacagaatcgccaaggacagcaacctcctggaattctcaagaaacctactgagggtgattcaaacccatcaaaacaagtgaaccttatggaacctcttctggaaaaggggaggtaactctaatggaacctcttctggaaaagaggaactctaaaatgcattgcgcaacgtagggaaccatgctggaagagcctatggttcttgctatattgtagcaagaggtaaatagagatgaactcattgttgcaaattccaacatgagcgaccgagcgatgtggttttggtgtcattatggacattacattagtgttgaattctttggatccccctccctttttttttgtgttttgggcttcgaaagtagagtcgccatttttgaatgtcaccgctaaccgcagtagcaagttagcaactgctttatatatatgtgcttcaaattcacaataaagttggaactggaggggtg

SEQ ID NO: 111767 - protein, 215 aa, Zea mays subsp. mays
  misc_feature (1)..(215): Ceres Seq. ID no. 15222498
  misc_feature (9)..(47): Pfam Name: CBS domain Pfam Description: CBS domain
  misc_feature (12)..(157): Homolog of NCBI NO: 15237264 NR Description: hypothetical protein [Arabidopsis thaliana]
  misc_feature (6)..(56): Homolog of NCBI NO: 22330087 NR Description: expressed protein [Arabidopsis thaliana]
  misc_feature (114)..(212): Homolog of NCBI NO: 22330087 NR Description: expressed protein [Arabidopsis thaliana]
  misc_feature (6)..(56): Homolog of NCBI NO: 25405200 NR Description: hypothetical protein T3F24.6 [imported] -
  misc_feature (114)..(212): Homolog of NCBI NO: 25405200 NR Description: hypothetical protein T3F24.6 [imported] -
  misc_feature (114)..(173): Homolog of NCBI NO: 4105780 NR Description: PGPS/D5 [Petunia x hybrida]
  misc_feature (14)..(173): Homolog of NCBI NO: 7485191 NR Description: hypothetical protein - Arabidopsis thaliana
  misc_feature (14)..(173): Homolog of NCBI NO: 30682755 NR Description: expressed protein [Arabidopsis thaliana]
  misc_feature (6)..(181): Homolog of NCBI NO: 15218765 NR Description: hypothetical protein [Arabidopsis thaliana]
  misc_feature (7)..(188): Homolog of NCBI NO: 15236442 NR Description: hypothetical protein [Arabidopsis thaliana]
YVGPPPVSAVSIRRIPRVPSDMPLYDILNEFQKGSSHMAAVVKAKPKTEPPLDKTEPNREAVGPTQLTVPLLSNAEESADNVVVDIERPHNRQINGNTASNAVPRSSEDIEDGEVVGIITLEDVFEELLQEEIVDETDEYVDVHKRIRVAAAAAASSVARAPSVRRLTGQKAANLQGAQNRQGQQPPGILKKPTEGDSNPSKQVNLMEPLLEKGR

SEQ ID NO: 111768 - protein, 194 aa, Zea mays subsp. mays
  misc_feature (1)..(194): Ceres Seq. ID no. 15222499
  misc_feature (1)..(136): Homolog of NCBI NO: 15237264 NR Description: hypothetical protein [Arabidopsis thaliana]
  misc_feature (1)..(35): Homolog of NCBI NO: 22330087 NR Description: expressed protein [Arabidopsis thaliana]
  misc_feature (93)..(191): Homolog of NCBI NO: 22330087 NR Description: expressed protein [Arabidopsis thaliana]
  misc_feature (1)..(35): Homolog of NCBI NO: 25405200 NR Description: hypothetical protein T3F24.6 [imported] -
  misc_feature (93)..(191): Homolog of NCBI NO: 25405200 NR Description: hypothetical protein T3F24.6 [imported] -
  misc_feature (93)..(152): Homolog of NCBI NO: 4105780 NR Description: PGPS/D5 [Petunia x hybrida]
  misc_feature (1)..(152): Homolog of NCBI NO: 7485191 NR Description: hypothetical protein - Arabidopsis thaliana
  misc_feature (1)..(152): Homolog of NCBI NO: 30682755 NR Description: expressed protein [Arabidopsis thaliana]
  misc_feature (1)..(160): Homolog of NCBI NO: 15218765 NR Description: hypothetical protein [Arabidopsis thaliana]
  misc_feature (1)..(167): Homolog of NCBI NO: 15236442 NR Description: hypothetical protein [Arabidopsis thaliana]
MPLYDILNEFQKGSSHMAAVVKAKPKTEPPLDKTEPNREAVGPTQLTVPLLSNAEESADNVVVDIERPHNRQINGNTASNAVPRSSEDIEDGEVVGIITLEDVFEELLQEEIVDETDEYVDVHKRIRVAAAAAASSVARAPSVRRLTGQKAANLQGAQNRQGQQPPGILKKPTEGDSNPSKQVNLMEPLLEKGR

SEQ ID NO: 111769 - protein, 178 aa, Zea mays subsp. mays
  misc_feature (1)..(178): Ceres Seq. ID no. 15222500
  misc_feature (1)..(120): Homolog of NCBI NO: 15237264 NR Description: hypothetical protein [Arabidopsis thaliana]
  misc_feature (1)..(19): Homolog of NCBI NO: 22330087 NR Description: expressed protein [Arabidopsis thaliana]
  misc_feature (77)..(175): Homolog of NCBI NO: 22330087 NR Description: expressed protein [Arabidopsis thaliana]
  misc_feature (1)..(19): Homolog of NCBI NO: 25405200 NR Description: hypothetical protein T3F24.6 [imported] -
  misc_feature (77)..(175): Homolog of NCBI NO: 25405200 NR Description: hypothetical protein T3F24.6 [imported] -
  misc_feature (77)..(136): Homolog of NCBI NO: 4105780 NR Description: PGPS/D5 [Petunia x hybrida]
  misc_feature (1)..(136): Homolog of NCBI NO: 7485191 NR Description: hypothetical protein - Arabidopsis thaliana
  misc_feature (1)..(136): Homolog of NCBI NO: 30682755 NR Description: expressed protein [Arabidopsis thaliana]
  misc_feature (1)..(144): Homolog of NCBI NO: 15218765 NR Description: hypothetical protein [Arabidopsis thaliana]
  misc_feature (1)..(151): Homolog of NCBI NO: 15236442 NR Description: hypothetical protein [Arabidopsis thaliana]
MAAVVKAKPKTEPPLDKTEPNREAVGPTQLTVPLLSNAEESADNVVVDIERPHNRQINGNTASNAVPRSSEDIEDGEVVGIITLEDVFEELLQEEIVDETDEYVDVHKRIRVAAAAAASSVARAPSVRRLTGQKAANLQGAQNRQGQQPPGILKKPTEGDSNPSKQVNLMEPLLEKGR

SEQ ID NO: 111770 - DNA, 832 bp, Zea mays subsp. mays
  misc_feature (1)..(832): Ceres Seq. ID no. 14305270
  misc_feature: MA Experiment ID: 20000535 Result: Up-regulated in Transcription
  misc_feature: MA Experiment 20000535 PARAMETER Experiment Name: Zm_Hybrid_Seed_Dev_P Parameter: DAP Value: 30 vs. 12
  misc_feature: MA Experiment 20000535 PARAMETER Experiment Name: Zm_Hybrid_Seed_Dev_P Parameter: Organism Value: Zea mays
  misc_feature: MA Experiment 20000535 PARAMETER Experiment Name: Zm_Hybrid_Seed_Dev_P Parameter: Plant Line Value: 35A19
  misc_feature: MA Experiment 20000535 PARAMETER Experiment Name: Zm_Hybrid_Seed_Dev_P Parameter: Tissue Value: Embryo vs. Unfert Floret
atgttgctccagacacatctaaatcacatcactccattccatctgaggaagtaaatgccatgaggggagacctcatgctgtggcctccagttgttgtgatacataacagctcgactggtcatgaggcaaaggatactgatgcaaagattgtgtccatagaagaaatcgaaggtgtattggcagatattggggtagcgcatgagaaggctagggttagccatggaagatcagccaatcagagcgtgttcctggtgaagttccagccaacaatatctgggttccaagaagccatgagagtgcatacccatttctccaccagaaaccatggcaaggaagagttccagctgatgaaaggcagcaaaggtaagaaggctgcctccactgatagcctggaagagctgctgtatgcgcatattggggtcgtggaagacctggggctgctggatgagggaacaaagaagagatgcaaggtcatgaggaagaaggaaattgaggcaaatgcagaggcaacactgaatttagaagtttattaggtctagtactaggatccgaaccatttgaagtggtcctcttttgcttcatcttgcagctgcttgcttgtccttgcggctgtaacgtcaaaagaagaaaagaagtgtaaattctgcttttgccattaaagagtgacgaaactcagttggcttctgtctgctggggaaggcctgcctcggtttgcatggcatggcaaggacataattttgtggctagatggggacaccttaacggcaaaagcagaattacctggtcgaagaaccgagtttaatctttatattatggaatcccttcttttttt

SEQ ID NO: 111771 - protein, 176 aa, Zea mays subsp. mays
  misc_feature (1)..(176): Ceres Seq. ID no. 14305271
  misc_feature (21)..(110): Pfam Name: XS domain Pfam Description: XS domain
  misc_feature (2)..(163): Homolog of NCBI NO: 30686649 NR Description: expressed protein [Arabidopsis thaliana]
  misc_feature (2)..(163): Homolog of NCBI NO: 9293880 NR Description: gene_id:MCB17.19~unknown protein [Arabidopsis
  misc_feature (3)..(164): Homolog of NCBI NO: 22773240 NR Description: Hypothetical protein [Oryza sativa (japonica
VAPDTSKSHHSIPSEEVNAMRGDLMLWPPVVVIHNSSTGHEAKDTDAKIVSIEEIEGVLADIGVAHEKARVSHGRSANQSVFLVKFQPTISGFQEAMRVHTHFSTRNHGKEEFQLMKGSKGKKAASTDSLEELLYAHIGVVEDLGLLDEGTKKRCKVMRKKEIEANAEATLNLEVY

SEQ ID NO: 111772 - protein, 157 aa, Zea mays subsp. mays
  misc_feature (1)..(157): Ceres Seq. ID no. 14305272
  misc_feature (2)..(91): Pfam Name: XS domain Pfam Description: XS domain
  misc_feature (1)..(144): Homolog of NCBI NO: 30686649 NR Description: expressed protein [Arabidopsis thaliana]
  misc_feature (1)..(144): Homolog of NCBI NO: 9293880 NR Description: gene_id:MCB17.19~unknown protein [Arabidopsis
  misc_feature (1)..(145): Homolog of NCBI NO: 22773240 NR Description: Hypothetical protein [Oryza sativa (japonica
MRGDLMLWPPVVVIHNSSTGHEAKDTDAKIVSIEEIEGVLADIGVAHEKARVSHGRSANQSVFLVKFQPTISGFQEAMRVHTHFSTRNHGKEEFQLMKGSKGKKAASTDSLEELLYAHIGVVEDLGLLDEGTKKRCKVMRKKEIEANAEATLNLEVY

SEQ ID NO: 111773 - protein, 152 aa, Zea mays subsp. mays
  misc_feature (1)..(152): Ceres Seq. ID no. 14305273
  misc_feature (1)..(86): Pfam Name: XS domain Pfam Description: XS domain
  misc_feature (1)..(139): Homolog of NCBI NO: 30686649 NR Description: expressed protein [Arabidopsis thaliana]
  misc_feature (1)..(139): Homolog of NCBI NO: 9293880 NR Description: gene_id:MCB17.19~unknown protein [Arabidopsis
  misc_feature (1)..(140): Homolog of NCBI NO: 22773240 NR Description: Hypothetical protein [Oryza sativa (japonica
MLWPPVVVIHNSSTGHEAKDTDAKIVSIEEIEGVLADIGVAHEKARVSHGRSANQSVFLVKFQPTISGFQEAMRVHTHFSTRNHGKEEFQLMKGSKGKKAASTDSLEELLYAHIGVVEDLGLLDEGTKKRCKVMRKKEIEANAEATLNLEVY

SEQ ID NO: 111774 - DNA, 1453 bp, Zea mays subsp. mays
  misc_feature (1)..(1453): Ceres Seq. ID no. 13599066
agacttttctggaaggaataggggcaagcagcaagtcctatcccaaccctaaccctaacttcgaaccttcgtcctttctctcttcttccttcagattcatccgtaccgttagttactactggattcgcggttgattgctgctaccgggtttctcctctttcacgtataagatgcacttccggtcatcattttaccaacatgcagattttgagttggtttctgaatataaatggacgccaaacggttcatccagctggttgaggagaagaagaagaaaattatggagagaaaggaagctcctttgaaatgggagcagaagctggaagctgctgctgaagctaaagagaggaagctgaaggttgcaaagcatacaaaaagatctggctctgatagtgacagcgattattacagtgatgatgagagtagaaagacaagtaaaagatctcacaggaagcacagaaagcattctcactacgactctggtgaccatgagaaaaggaaagaaaaaagttccaaacggaaaacaaagaaatggtcctctgaatctagtgattatagtagtgatgactctgagagtagctttgaggaggagagaagaagaaagaagaagcaaagcaagaagctgagagatcggggttcaagatcagattctagcaactatgattctactgctgatgaattaagcaagaggaaaagacagcacaaacggcaacgcccatcaaaatttagtggatcagactactctactgatgaaggagatagtctagttcagaaaagaaatcatggaatgcatagcaaacgccatcgacaatcagaatctagtgaatctgacttgtcaagtgatgacgctccccataagaaaggccacagaaagcaccataaacatcacaagcgatcacataatgtggagctgaggttgtctgattctgattatcgcagtcatggtcaaagaagcagatcaaagtcattggaagaaaattctgaagatgaaagcaaaaaaagatcaatggataagaagtctggtcgccatcaccaccatcgtcaccaccaccatcgccaccaccaccatcgccaccacttggatgatgagagaaactacatgcagcaacactctcctaaattcaatggaaagcatggcgaggagttagacaaaactgaaactgagaaaaaggatggtggtcatcatgaaagtagagctatggttgagaataatgatggtcaaattttttgatttttgagaatctgtcctgctatctgtttgtggtgcttttgtactggaattggtaacttactatttgatattcaaattaaagttaaaggaacaatttcattatttatgtcggttgtaatattggcggcagttattgacactattgaaactttgttgggtcattgttggctgatgacattaagttgatccttattcatctataaacagttgtatttgaagttc

SEQ ID NO: 111775 - protein, 333 aa, Zea mays subsp. mays
  misc_feature (1)..(333): Ceres Seq. ID no. 15222504
  misc_feature (28)..(321): Pfam Name: Granin (chromogranin or secretogranin) Pfam Description: Granin (chromogranin or secretogranin)
  misc_feature (11)..(321): Homolog of NCBI NO: 39580460 NR Description: Hypothetical protein CBG20540 [Caenorhabditis
  misc_feature (28)..(323): Homolog of NCBI NO: 25151613 NR Description: Putative nuclear protein, nematode specific (80.3
  misc_feature (36)..(323): Homolog of NCBI NO: 25151613 NR Description: Putative nuclear protein, nematode specific (80.3
  misc_feature (45)..(322): Homolog of NCBI NO: 39580460 NR Description: Hypothetical protein CBG20540 [Caenorhabditis
  misc_feature (10)..(310): Homolog of NCBI NO: 17542856 NR Description: Putative nuclear protein, nematode specific
  misc_feature (26)..(321): Homolog of NCBI NO: 25151613 NR Description: Putative nuclear protein, nematode specific (80.3
  misc_feature (38)..(321): Homolog of NCBI NO: 39580460 NR Description: Hypothetical protein CBG20540 [Caenorhabditis
  misc_feature (18)..(289): Homolog of NCBI NO: 34895374 NR Description: P0698A04.25 [Oryza sativa (japonica
  misc_feature (1)..(246): Homolog of NCBI NO: 18379151 NR Description: expressed protein [Arabidopsis thaliana]
  misc_feature (1)..(288): Homolog of NCBI NO: 34895374 NR Description: P0698A04.25 [Oryza sativa (japonica
MDAKRFIQLVEEKKKKIMERKEAPLKWEQKLEAAAEAKERKLKVAKHTKRSGSDSDSDYYSDDESRKTSKRSHRKHRKHSHYDSGDHEKRKEKSSKRKTKKWSSESSDYSSDDSESSFEEERRRKKKQSKKLRDRGSRSDSSNYDSTADELSKRKRQHKRQRPSKFSGSDYSTDEGDSLVQKRNHGMHSKRHRQSESSESDLSSDDAPHKKGHRKHHKHHKRSHNVELRLSDSDYRSHGQRSRSKSLEENSEDESKKRSMDKKSGRHHHHRHHHHRHHHHRHHLDDERNYMQQHSPKFNGKHGEELDKTETEKKDGGHHESRAMVENNDGQIF

SEQ ID NO: 111776 - protein, 316 aa, Zea mays subsp. mays
  misc_feature (1)..(316): Ceres Seq. ID no. 15222505
  misc_feature (11)..(304): Pfam Name: Granin (chromogranin or secretogranin) Pfam Description: Granin (chromogranin or secretogranin)
  misc_feature (1)..(304): Homolog of NCBI NO: 39580460 NR Description: Hypothetical protein CBG20540 [Caenorhabditis
  misc_feature (11)..(306): Homolog of NCBI NO: 25151613 NR Description: Putative nuclear protein, nematode specific (80.3
  misc_feature (19)..(306): Homolog of NCBI NO: 25151613 NR Description: Putative nuclear protein, nematode specific (80.3
  misc_feature (28)..(305): Homolog of NCBI NO: 39580460 NR Description: Hypothetical protein CBG20540 [Caenorhabditis
  misc_feature (1)..(293): Homolog of NCBI NO: 17542856 NR Description: Putative nuclear protein, nematode specific
  misc_feature (9)..(304): Homolog of NCBI NO: 25151613 NR Description: Putative nuclear protein, nematode specific (80.3
  misc_feature (21)..(304): Homolog of NCBI NO: 39580460 NR Description: Hypothetical protein CBG20540 [Caenorhabditis
  misc_feature (1)..(272): Homolog of NCBI NO: 34895374 NR Description: P0698A04.25 [Oryza sativa (japonica
  misc_feature (1)..(229): Homolog of NCBI NO: 18379151 NR Description: expressed protein [Arabidopsis thaliana]
  misc_feature (1)..(271): Homolog of NCBI NO: 34895374 NR Description: P0698A04.25 [Oryza sativa (japonica
MERKEAPLKWEQKLEAAAEAKERKLKVAKHTKRSGSDSDSDYYSDDESRKTSKRSHRKHRKHSHYDSGDHEKRKEKSSKRKTKKWSSESSDYSSDDSESSFEEERRRKKKQSKKLRDRGSRSDSSNYDSTADELSKRKRQHKRQRPSKFSGSDYSTDEGDSLVQKRNHGMHSKRHRQSESSESDLSSDDAPHKKGHRKHHKHHKRSHNVELRLSDSDYRSHGQRSRSKSLEENSEDESKKRSMDKKSGRHHHHRHHHHRHHHHRHHLDDERNYMQQHSPKFNGKHGEELDKTETEKKDGGHHESRAMVENNDGQIF

SEQ ID NO: 111777 - DNA, 530 bp, Zea mays subsp. mays
  misc_feature (1)..(530): Ceres Seq. ID no. 13589319
agctcgccatagttgattcatacacaatacaagcatcctctctactactgaagagatcaaattccattcagggtagatagaaatggcatcctccagcttttatcttctcagcgttcttctcatcgtgatcgcttctggcgcctgggctacggatcctagtcctctccaggacttctgcgttgcagacaaagaatcgcctgtacttgtcaatgggtttgcctgcaaggatgctaaggatgtcaaggtcgacgacttcttcctagcagccgacctcgacaagccaagggatacgacgatgagcaaggtcaagtcaaatgtcacattgatcaatgtgatgaagctggccggcctaaacaccttgggcatctccatggctagaattgactatgcccctcaaggacagaacccaccacatacgcatccccgtgccactgcgatcttaactgttcttgaaggatcactctatgttggttttgtcacttctaacccagacaacaaattcattagcaagctactcaacaagggagatg

SEQ ID NO: 111778 - protein, 149 aa, Zea mays subsp. mays
  misc_feature (1)..(149): Ceres Seq. ID no. 13589320
  misc_feature (62)..(148): Pfam Name: Cupin Pfam Description: Cupin
  misc_feature (3)..(148): Homolog of NCBI NO: 9837111 NR Description: germin A [Hordeum vulgare]
  misc_feature (1)..(148): Homolog of NCBI NO: 40253804 NR Description: putative germin A [Oryza sativa (japonica
  misc_feature (1)..(148): Homolog of NCBI NO: 5499732 NR Description: germin-like protein 2 precursor [Oryza sativa]
  misc_feature (2)..(148): Homolog of NCBI NO: 5869975 NR Description: germin-like protein [Triticum aestivum]
  misc_feature (1)..(148): Homolog of NCBI NO: 40253802 NR Description: putative germin A [Oryza sativa (japonica
  misc_feature (1)..(148): Homolog of NCBI NO: 5869973 NR Description: germin-like protein [Triticum aestivum]
  misc_feature (1)..(148): Homolog of NCBI NO: 7447340 NR Description: germin-like protein - barley
  misc_feature (1)..(148): Homolog of NCBI NO: 40253800 NR Description: putative germin A [Oryza sativa (japonica
  misc_feature (1)..(148): Homolog of NCBI NO: 7447336 NR Description: germin-like protein 6 - rice
  misc_feature (1)..(148): Homolog of NCBI NO: 5499730 NR Description: germin-like protein 1 precursor [Oryza sativa]
MASSSFYLLSVLLIVIASGAWATDPSPLQDFCVADKESPVLVNGFACKDAKDVKVDDFFLAADLDKPRDTTMSKVKSNVTLINVMKLAGLNTLGISMARIDYAPQGQNPPHTHPRATAILTVLEGSLYVGFVTSNPDNKFISKLLNKGD

SEQ ID NO: 111779 - protein, 78 aa, Zea mays subsp. mays
  misc_feature (1)..(78): Ceres Seq. ID no. 13589321
  misc_feature (1)..(77): Pfam Name: Cupin Pfam Description: Cupin
  misc_feature (1)..(77): Homolog of NCBI NO: 9837111 NR Description: germin A [Hordeum vulgare]
  misc_feature (1)..(77): Homolog of NCBI NO: 40253804 NR Description: putative germin A [Oryza sativa (japonica
  misc_feature (1)..(77): Homolog of NCBI NO: 5499732 NR Description: germin-like protein 2 precursor [Oryza sativa]
  misc_feature (1)..(77): Homolog of NCBI NO: 5869975 NR Description: germin-like protein [Triticum aestivum]
  misc_feature (1)..(77): Homolog of NCBI NO: 40253802 NR Description: putative germin A [Oryza sativa (japonica
  misc_feature (1)..(77): Homolog of NCBI NO: 5869973 NR Description: germin-like protein [Triticum aestivum]
  misc_feature (1)..(77): Homolog of NCBI NO: 7447340 NR Description: germin-like protein - barley
  misc_feature (1)..(77): Homolog of NCBI NO: 40253800 NR Description: putative germin A [Oryza sativa (japonica
  misc_feature (1)..(77): Homolog of NCBI NO: 7447336 NR Description: germin-like protein 6 - rice
  misc_feature (1)..(77): Homolog of NCBI NO: 5499730 NR Description: germin-like protein 1 precursor [Oryza sativa]
MSKVKSNVTLINVMKLAGLNTLGISMARIDYAPQGQNPPHTHPRATAILTVLEGSLYVGFVTSNPDNKFISKLLNKGD

SEQ ID NO: 111780 - DNA, 1240 bp, Zea mays subsp. mays
  misc_feature (1)..(1240): Ceres Seq. ID no. 12634623
  misc_feature: MA Experiment ID: 20000627 Result: Up-regulated in Transcription
  misc_feature: MA Experiment 20000627 PARAMETER Experiment Name: Zm_Herbicide-Treatments_P Parameter: Timepoint (hr) Value: 12
  misc_feature: MA Experiment 20000627 PARAMETER Experiment Name: Zm_Herbicide-Treatments_P Parameter: Tissue Value: Aerial
  misc_feature: MA Experiment 20000627 PARAMETER Experiment Name: Zm_Herbicide-Treatments_P Parameter: Treatment Value: Finale vs. No Treatment
taactaaattgacattgctgggaaggatgtgattgagggagttggaggctctactgcagtaatttgcattgccttgtcatgcactagatattaatcagttctttaagtgacatgcagccccacccccaccaaatgatatgacagtgagacaagtcgctgacaaactggcaagctttgttgccaaaaacgggagacagtttgagaatatcacaaggcagaggaatcctggagatacaccattcaagtttctatttgacaaacactgtccagactacaaatattatgagtttcagcttgctgaagaggaaagggctcttgctcagtcaaaggaggctgaagcatcgaaagctaactctggcactgcaagcttcaaggcaccaggtggtacttatagaagctcatttgaacagaagtctaactatcagacacctgcatcagctttgtacggggcatatgagggtagttcttcccaaggaagctcttctagttacggtgatcatacagctccaccatcagatcctgtagcattgatggaattctatgcaaagaaggctgcactggaagaacggaagaggccaccaaggcagtcgaaagatgaaatgccgccacctccttctcttcaaggtacatacacaacattattctcattgttgaaagaatgtagaagcttcaatgtttattccagcacaactaattcttatgcaggtcctcctaagaagggacaccacatgggtgatttcattcctcaagaagatcttgaaaagtttatggctcggtgtaatgatgttgcatcacaaaaggctgcctatgtagccgttgagaagtctaagattcaggcggtcaatattggccacacacttttatgtcagatgggttggagggaaggcgagggtcttgggagcgagagaagaggccgtgcagatcccgttatggctggagatgtgaagaaggatcatcttggtgttggggctgtccagcctggtgaggtcacatctgaagatgacatctatgagcaatacaagaaacggatgatgcttggataccgctataggccaaaccctctgaacaatccaaggaaatcatactactgatgcgggggagttcgtctgaggggagatgtaaggcgctgctttgctgcaattttgctcacagaactaatggttaggggatatcactaacagcattgaaagtttttgttcatcaacagaaatgtcaagaaagtcgttattcagcatatttc

SEQ ID NO: 111781 - protein, 317 aa, Zea mays subsp. mays
  misc_feature (1)..(317): Ceres Seq. ID no. 12634624
  misc_feature (4)..(58): Pfam Name: Surp module Pfam Description: Surp module
  misc_feature (1)..(162): Homolog of NCBI NO: 33469964 NR Description: splicing factor 4 isoform a; RNA-binding protein
  misc_feature (1)..(162): Homolog of NCBI NO: 25992259 NR Description: splicing factor 4 [Homo sapiens]
  misc_feature (196)..(317): Homolog of NCBI NO: 18482486 NR Description: RNA-binding protein splice variant a [Homo
  misc_feature (1)..(162): Homolog of NCBI NO: 18482486 NR Description: RNA-binding protein splice variant a [Homo
  misc_feature (196)..(317): Homolog of NCBI NO: 7512956 NR Description: hypothetical protein F23858_1 - human (fragment)
  misc_feature (1)..(162): Homolog of NCBI NO: 7512956 NR Description: hypothetical protein F23858_1 - human (fragment)
  misc_feature (196)..(317): Homolog of NCBI NO: 6807742 NR Description: hypothetical protein [Homo sapiens]
  misc_feature (1)..(162): Homolog of NCBI NO: 6807742 NR Description: hypothetical protein [Homo sapiens]
  misc_feature (1)..(317): Homolog of NCBI NO: 11357298 NR Description: gamma response I protein - Arabidopsis thaliana
  misc_feature (1)..(317): Homolog of NCBI NO: 18409491 NR Description: gamma response I protein
MTVRQVADKLASFVAKNGRQFENITRQRNPGDTPFKFLFDKHCPDYKYYEFQLAEEERALAQSKEAEASKANSGTASFKAPGGTYRSSFEQKSNYQTPASALYGAYEGSSSQGSSSSYGDHTAPPSDPVALMEFYAKKAALEERKRPPRQSKDEMPPPPSLQGTYTTLFSLLKECRSFNVYSSTTNSYAGPPKKGHHMGDFIPQEDLEKFMARCNDVASQKAAYVAVEKSKIQAVNIGHTLLCQMGWREGEGLGSERRGRADPVMAGDVKKDHLGVGAVQPGEVTSEDDIYEQYKKRMMLGYRYRPNPLNNPRKSYY

SEQ ID NO: 111782 - protein, 186 aa, Zea mays subsp. mays
  misc_feature (1)..(186): Ceres Seq. ID no. 12634625
  misc_feature (103)..(147): Pfam Name: G-patch domain Pfam Description: G-patch domain
  misc_feature (65)..(186): Homolog of NCBI NO: 18482486 NR Description: RNA-binding protein splice variant a [Homo
  misc_feature (1)..(31): Homolog of NCBI NO: 18482486 NR Description: RNA-binding protein splice variant a [Homo
  misc_feature (65)..(186): Homolog of NCBI NO: 7512956 NR Description: hypothetical protein F23858_1 - human (fragment)
  misc_feature (1)..(31): Homolog of NCBI NO: 7512956 NR Description: hypothetical protein F23858_1 - human (fragment)
  misc_feature (1)..(31): Homolog of NCBI NO: 33469964 NR Description: splicing factor 4 isoform a; RNA-binding protein
  misc_feature (1)..(31): Homolog of NCBI NO: 25992259 NR Description: splicing factor 4 [Homo sapiens]
  misc_feature (65)..(186): Homolog of NCBI NO: 6807742 NR Description: hypothetical protein [Homo sapiens]
  misc_feature (1)..(31): Homolog of NCBI NO: 6807742 NR Description: hypothetical protein [Homo sapiens]
  misc_feature (1)..(186): Homolog of NCBI NO: 11357298 NR Description: gamma response I protein - Arabidopsis thaliana
  misc_feature (1)..(186): Homolog of NCBI NO: 18409491 NR Description: gamma response I protein
MEFYAKKAALEERKRPPRQSKDEMPPPPSLQGTYTTLFSLLKECRSFNVYSSTTNSYAGPPKKGHHMGDFIPQEDLEKFMARCNDVASQKAAYVAVEKSKIQAVNIGHTLLCQMGWREGEGLGSERRGRADPVMAGDVKKDHLGVGAVQPGEVTSEDDIYEQYKKRMMLGYRYRPNPLNNPRKSYY

SEQ ID NO: 111783 - protein, 163 aa, Zea mays subsp. mays
  misc_feature (1)..(163): Ceres Seq. ID no. 12634626
  misc_feature (80)..(124): Pfam Name: G-patch domain Pfam Description: G-patch domain
  misc_feature (1)..(12): Homolog of NCBI NO: 7512956 NR Description: hypothetical protein F23858_1 - human (fragment)
  misc_feature (42)..(163): Homolog of NCBI NO: 34877669 NR Description: similar to splicing factor 4 [Rattus norvegicus]
  misc_feature (42)..(163): Homolog of NCBI NO: 39793920 NR Description: Unknown (protein for IMAGE:6205595) [Homo sapiens]
  misc_feature (42)..(163): Homolog of NCBI NO: 33469964 NR Description: splicing factor 4 isoform a; RNA-binding protein
  misc_feature (42)..(163): Homolog of NCBI NO: 25992259 NR Description: splicing factor 4 [Homo sapiens]
  misc_feature (42)..(163): Homolog of NCBI NO: 18482486 NR Description: RNA-binding protein splice variant a [Homo
  misc_feature (42)..(163): Homolog of NCBI NO: 7512956 NR Description: hypothetical protein F23858_1 - human (fragment)
  misc_feature (42)..(163): Homolog of NCBI NO: 6807742 NR Description: hypothetical protein [Homo sapiens]
  misc_feature (1)..(163): Homolog of NCBI NO: 11357298 NR Description: gamma response I protein - Arabidopsis thaliana
  misc_feature (1)..(163): Homolog of NCBI NO: 18409491 NR Description: gamma response I protein
MPPPPSLQGTYTTLFSLLKECRSFNVYSSTTNSYAGPPKKGHHMGDFIPQEDLEKFMARCNDVASQKAAYVAVEKSKIQAVNIGHTLLCQMGWREGEGLGSERRGRADPVMAGDVKKDHLGVGAVQPGEVTSEDDIYEQYKKRMMLGYRYRPNPLNNPRKSYY

SEQ ID NO: 111784 - DNA, 724 bp, Zea mays subsp. mays
  misc_feature (1)..(724): Ceres Seq. ID no. 14306398
gaatttggtgaagaggaattaatggaacagaacgagaatggttctactatgattgagaagccatccacttctaacactattaaaacctctgtgcctgttcctgtcgacagtctcatgctgagcctgctcagtgagcaaactcggtggatttcaggttaccatgaacatgaagctctcctccaagaaaatgaagaagaaaagcttacaaaggaggagcaggacctggctttgttcgaatgggagtcattgaggaaagctgcatctgatcctgagagaaaatcaagcatgagcgcagttccaacatatcccaatcctgtgcggccacttaagcctgcttcaagaagccggcaactgcagcaacctaaggctaactcaaataaccaaaagaagtgcaccaacttaacccacttgctgactctgagaagccatggcacaaaagcagggtgcacgacaacctgtaacgagtgcggccaggaaattagttgggagactctaaacagagatggtagatcgagatgatgcctgtctctgtggcattgccagatttttttgggggtctttatgtaatgttaacgtccaggtagcagtatatatattgcgtatacgagagtattagagtaggtagaatgtagaatggacaaaaaatggctcttgtggtacacatggtagaacgcatgggatgcaaaaaatgaacgatcacattgttatggaatgtagtcgtaac

SEQ ID NO: 111785 - protein, 172 aa, Zea mays subsp. mays
  misc_feature (1)..(172): Ceres Seq. ID no. 14306399
  misc_feature (6)..(163): Homolog of NCBI NO: 25407048 NR Description: protein F22O13.8 [imported] - Arabidopsis
  misc_feature (6)..(163): Homolog of NCBI NO: 7485004 NR Description: helicase homolog F22O13.8 - Arabidopsis thaliana
  misc_feature (6)..(163): Homolog of NCBI NO: 15223265 NR Description: SNF2domain/helicase domain-containing protein
  misc_feature (1)..(172): Homolog of NCBI NO: 14140291 NR Description: putative helicase [Oryza sativa (japonica
  misc_feature (1)..(172): Homolog of NCBI NO: 37535026 NR Description: putative zinc finger helicase
EFGEEELMEQNENGSTMIEKPSTSNTIKTSVPVPVDSLMLSLLSEQTRWISGYHEHEALLQENEEEKLTKEEQDLALFEWESLRKAASDPERKSSMSAVPTYPNPVRPLKPASRSRQLQQPKANSNNQKKCTNLTHLLTLRSHGTKAGCTTTCNECGQEISWETLNRDGRSR

SEQ ID NO: 111786 - protein, 165 aa, Zea mays subsp. mays
  misc_feature (1)..(165): Ceres Seq. ID no. 14306400
  misc_feature (1)..(156): Homolog of NCBI NO: 25407048 NR Description: protein F22O13.8 [imported] - Arabidopsis
  misc_feature (1)..(156): Homolog of NCBI NO: 7485004 NR Description: helicase homolog F22O13.8 - Arabidopsis thaliana
  misc_feature (1)..(156): Homolog of NCBI NO: 15223265 NR Description: SNF2domain/helicase domain-containing protein
  misc_feature (1)..(165): Homolog of NCBI NO: 14140291 NR Description: putative helicase [Oryza sativa (japonica
  misc_feature (1)..(165): Homolog of NCBI NO: 37535026 NR Description: putative zinc finger helicase
MEQNENGSTMIEKPSTSNTIKTSVPVPVDSLMLSLLSEQTRWISGYHEHEALLQENEEEKLTKEEQDLALFEWESLRKAASDPERKSSMSAVPTYPNPVRPLKPASRSRQLQQPKANSNNQKKCTNLTHLLTLRSHGTKAGCTTTCNECGQEISWETLNRDGRSR

SEQ ID NO: 111787 - protein, 156 aa, Zea mays subsp. mays
  misc_feature (1)..(156): Ceres Seq. ID no. 14306401
  misc_feature (1)..(147): Homolog of NCBI NO: 25407048 NR Description: protein F22O13.8 [imported] - Arabidopsis
  misc_feature (1)..(147): Homolog of NCBI NO: 7485004 NR Description: helicase homolog F22O13.8 - Arabidopsis thaliana
  misc_feature (1)..(147): Homolog of NCBI NO: 15223265 NR Description: SNF2domain/helicase domain-containing protein
  misc_feature (1)..(156): Homolog of NCBI NO: 14140291 NR Description: putative helicase [Oryza sativa (japonica
  misc_feature (1)..(156): Homolog of NCBI NO: 37535026 NR Description: putative zinc finger helicase
MIEKPSTSNTIKTSVPVPVDSLMLSLLSEQTRWISGYHEHEALLQENEEEKLTKEEQDLALFEWESLRKAASDPERKSSMSAVPTYPNPVRPLKPASRSRQLQQPKANSNNQKKCTNLTHLLTLRSHGTKAGCTTTCNECGQEISWETLNRDGRSR

SEQ ID NO: 111788 - DNA, 946 bp, Zea mays subsp. mays
  misc_feature (1)..(946): Ceres Seq. ID no. 12634652
ggctcaaaagaggttgagcaaccgagcccagtgtccatccttgagcctccaattaatgaagatatttgttttccacgatgtttcaactatgacttgcaagggatggctaacaaacagagaggttgccatcaatatcacaatgaatctgaagttaacatgtcaagtgatgatgaagaccattctttttaccaatctttggaagcatttcaggtcgaggaaaactgggacttctcatatcttctcgacatacttatatgctctggtatcatagttgttgactggcagctcatctgcaagtcatggtacttgcctggttaccctgttggccctcatgtctttgataggcttgaaaggaaatacaataaaatcgcaacatgggcaaagcctgagaggaggcttctttttgacctcgtgaattcaattctttccgaggtccttgcaccatgtgttgatgtgcacccatgggtgcagcctagtagacactgtgtggcattttggggccctgaagggcctgttgagaaggtttggcagacaattgttaggctgcaggaagactgtgtcacaaggcatcctgatgagatggttcttgatacaaattggctggaagtaggcaccgacatcaatatggtggggaagcagatagctaggatgttacatggcgacctcttggaagaagtcatagtggacttccttggttgagttggtagtttcatgtggacataactagtaactaacaacttcggcaacatggggttcgctcaaacttcaagcagattatgctgaatatgtaacggcttttcaagtgcacacatgctgcatttttcttctggttataataggagctatgtattatgtaattacattggagagcaaaatatacaggccaaaaaaacactactgcaggtatttttcgattctgtactgctaagctgtacttcctggtcct

SEQ ID NO: 111789 - protein, 232 aa, Zea mays subsp. mays
  misc_feature (1)..(232): Ceres Seq. ID no. 12634653
  misc_feature (2)..(227): Homolog of NCBI NO: 15225467 NR Description: hypothetical protein; protein id: At2g39440.1
  misc_feature (72)..(228): Homolog of NCBI NO: 30693854 NR Description: expressed protein [Arabidopsis thaliana]
  misc_feature (72)..(228): Homolog of NCBI NO: 11357793 NR Description: hypothetical protein F4P12.240 - Arabidopsis
  misc_feature (2)..(228): Homolog of NCBI NO: 21928151 NR Description: AT3g53540/F4P12_240 [Arabidopsis thaliana]
  misc_feature (3)..(229): Homolog of NCBI NO: 29124124 NR Description: hypothetical protein [Oryza sativa (japonica
  misc_feature (3)..(232): Homolog of NCBI NO: 34897354 NR Description: hypothetical protein [Oryza sativa]
GSKEVEQPSPVSILEPPINEDICFPRCFNYDLQGMANKQRGCHQYHNESEVNMSSDDEDHSFYQSLEAFQVEENWDFSYLLDILICSGIIVVDWQLICKSWYLPGYPVGPHVFDRLERKYNKIATWAKPERRLLFDLVNSILSEVLAPCVDVHPWVQPSRHCVAFWGPEGPVEKVWQTIVRLQEDCVTRHPDEMVLDTNWLEVGTDINMVGKQIARMLHGDLLEEVIVDFLG

SEQ ID NO: 111790 - protein, 198 aa, Zea mays subsp. mays
  misc_feature (1)..(198): Ceres Seq. ID no. 12634654
  misc_feature (1)..(193): Homolog of NCBI NO: 15225467 NR Description: hypothetical protein; protein id: At2g39440.1
  misc_feature (38)..(194): Homolog of NCBI NO: 30693854 NR Description: expressed protein [Arabidopsis thaliana]
  misc_feature (38)..(194): Homolog of NCBI NO: 11357793 NR Description: hypothetical protein F4P12.240 - Arabidopsis
  misc_feature (1)..(194): Homolog of NCBI NO: 21928151 NR Description: AT3g53540/F4P12_240 [Arabidopsis thaliana]
  misc_feature (1)..(195): Homolog of NCBI NO: 29124124 NR Description: hypothetical protein [Oryza sativa (japonica
  misc_feature (1)..(198): Homolog of NCBI NO: 34897354 NR Description: hypothetical protein [Oryza sativa]
MANKQRGCHQYHNESEVNMSSDDEDHSFYQSLEAFQVEENWDFSYLLDILICSGIIVVDWQLICKSWYLPGYPVGPHVFDRLERKYNKIATWAKPERRLLFDLVNSILSEVLAPCVDVHPWVQPSRHCVAFWGPEGPVEKVWQTIVRLQEDCVTRHPDEMVLDTNWLEVGTDINMVGKQIARMLHGDLLEEVIVDFLG

SEQ ID NO: 111791 - protein, 180 aa, Zea mays subsp. mays
  misc_feature (1)..(180): Ceres Seq. ID no. 12634655
  misc_feature (1)..(175): Homolog of NCBI NO: 15225467 NR Description: hypothetical protein; protein id: At2g39440.1
  misc_feature (20)..(176): Homolog of NCBI NO: 30693854 NR Description: expressed protein [Arabidopsis thaliana]
  misc_feature (20)..(176): Homolog of NCBI NO: 11357793 NR Description: hypothetical protein F4P12.240 - Arabidopsis
  misc_feature (1)..(176): Homolog of NCBI NO: 21928151 NR Description: AT3g53540/F4P12_240 [Arabidopsis thaliana]
  misc_feature (1)..(177): Homolog of NCBI NO: 29124124 NR Description: hypothetical protein [Oryza sativa (japonica
  misc_feature (1)..(180): Homolog of NCBI NO: 34897354 NR Description: hypothetical protein [Oryza sativa]
MSSDDEDHSFYQSLEAFQVEENWDFSYLLDILICSGIIVVDWQLICKSWYLPGYPVGPHVFDRLERKYNKIATWAKPERRLLFDLVNSILSEVLAPCVDVHPWVQPSRHCVAFWGPEGPVEKVWQTIVRLQEDCVTRHPDEMVLDTNWLEVGTDINMVGKQIARMLHGDLLEEVIVDFLG

SEQ ID NO: 111792 - DNA, 864 bp, Zea mays subsp. mays
  misc_feature (1)..(864): Ceres Seq. ID no. 15224350
taccgggscccccctcgagtcagctacgtaggccccccccccccccagggccaagaaatttcaaaagaagtctttccctctctttgatgctcttggggaactatatgatgggcacattgctcaagggacctggaacataacatctacacagctaccacaagaatggaacacaatttcaaatgaagaagaacaagtgaacaccacaagaatggatgaggaaggcattattcaacaacaaccacaagaagaggattcaagattggaacaagatgaagatcctataattgaaaggactgaacagaggtctactgcaacgagaaggtctactgcatcaacaatcaatcaagataaggaagcaaagaggatgaagaaggattctttggaaggacttgttgggagatatctagatctaaaatcaaaacaagttgaggatgaggttacacaaatggcgaaaggaaaagaatccgctcaaggtaatgacttctccatcatgagatgcatttctgttcttagatccatgaatgtgacagcagatgagaagataaaagcagctgaggtgttcgacataccaaacaacagagagacatttatcagttttagtgttgatgaaccagaaactgccctcctatggttaagacagaagattgataagctctaagacaagaaatattggtcatatggagacagttctgcacagcgttctaagtgccagtatgagctatatatatgttgcatttctccatgtttgggctcagcatgtaatagaactgaaggaaggttgttgcaagacttgtatggcatgcttaaatttctggataaaatctagcttatactaagtctattacatgcttaaatttttcgctc

SEQ ID NO: 111793 - protein, 149 aa, Zea mays subsp. mays
  misc_feature (1)..(149): Ceres Seq. ID no. 15224351
  misc_feature (1)..(59): Homolog of NCBI NO: 34907580 NR Description: B1078G07.31 [Oryza sativa (japonica
  misc_feature (12)..(146): Homolog of NCBI NO: 37535088 NR Description: hypothetical protein [Oryza sativa (japonica
  misc_feature (1)..(146): Homolog of NCBI NO: 37535590 NR Description: hypothetical protein [Oryza sativa (japonica
  misc_feature (39)..(146): Homolog of NCBI NO: 34913838 NR Description: OSJNBa0042P21.26 [Oryza sativa (japonica
  misc_feature (13)..(146): Homolog of NCBI NO: 38344751 NR Description: OSJNBa0089K21.9 [Oryza sativa (japonica
MDEEGIIQQQPQEEDSRLEQDEDPIIERTEQRSTATRRSTASTINQDKEAKRMKKDSLEGLVGRYLDLKSKQVEDEVTQMAKGKESAQGNDFSIMRCISVLRSMNVTADEKIKAAEVFDIPNNRETFISFSVDEPETALLWLRQKIDKL

SEQ ID NO: 111794 - protein, 97 aa, Zea mays subsp. mays
  misc_feature (1)..(97): Ceres Seq. ID no. 15224352
  misc_feature (1)..(94): Homolog of NCBI NO: 37535088 NR Description: hypothetical protein [Oryza sativa (japonica
  misc_feature (1)..(94): Homolog of NCBI NO: 37535590 NR Description: hypothetical protein [Oryza sativa (japonica
  misc_feature (1)..(94): Homolog of NCBI NO: 34913838 NR Description: OSJNBa0042P21.26 [Oryza sativa (japonica
  misc_feature (1)..(94): Homolog of NCBI NO: 38344751 NR Description: OSJNBa0089K21.9 [Oryza sativa (japonica
MKKDSLEGLVGRYLDLKSKQVEDEVTQMAKGKESAQGNDFSIMRCISVLRSMNVTADEKIKAAEVFDIPNNRETFISFSVDEPETALLWLRQKIDKL

SEQ ID NO: 111795 - DNA, 1419 bp, Zea mays subsp. mays
  misc_feature (1)..(1419): Ceres Seq. ID no. 15224720
ccgggccccccctcgagtcagctacgtaggccccccccccccccccgaagacaaaggatccaatcatagtttcaattggttggaggcgatttcaaacaacccctgtgtatgcaatagaggatcggaatggtcgacaccgcatgctgaagtatacacctgagcatatgcattgctttgctatgttttggggaccacttgctccaccgaagagtggtgtattagcagtccagaatctttccaacaatcaggtgccatttaggataactgcaacaggatgggttcaagaattcaacaatactgccagaattgtgaagaagataaagctcacaggcacaccatgcaagatatttaagaagactgcactaatcaagggaatgttcacatccgatttagaggttgctaggtttgaaggtgctgccattcggactgtaagtggaatccgaggacaggttaaaaaggcagcaaagattgagccaggagatatgttgaagagaaaaggggaaaatacagaaggaatcgcaagatgtacatttgaggacagaattcttatgagtgacattgttttcctgcgtgcctgggtcaacgttgaagttcctacgtactctaaccctgtgaccactgctctgcaacctagagagcagacctggcaaggcatgagaacaactgctgagttgcggaaggcacacaatatccctaccccacacaacaaggattcagtttacaagcctatcgagcggaaaccacgcaagttcaatcccgtcgagatccccgcaaagctgcaacagttacttccctttaaatctaagcctaaggacacagcgaagcagaagaaagcaccagttgaaaacagggtgcctgtaatcatgcagcctagtgagaagaagacacacgcagctatachacagctaaggctgataaaacacgagaaggcaaagaagaagaaaattaaggaacaacagaagaaaaaagcatacgaggcagagaaagccaagaccgagctactgacgaagaagcgccagagggaagagaggcgtgtgagataccgggaagaagataagcagaagaaacgtgcacgcagatgaggcgaggaacggggtatgtgcaccaggaactcagcagcaaccgggcatgctctcttgtgcagaacatatgccaaaatcttagttcatatacggagagctataaaaggtgcagtaccacccatctgggcgaagaagcatgtcaagtcataaccagggcgcggagatgagcaagttaggttgcttgtttaagttatgtatcggttgccctaacgcggaatattgtctgagtgtttggcaaacgcatgtggactcccaagtaaatytggagtcataattttggagtgtatactacctcaggtaccgaatgttaggcaaacgcatgtggtctttagctccc

SEQ ID NO: 111796 - protein, 313 aa, Zea mays subsp. mays
  misc_feature (1)..(313): Ceres Seq. ID no. 15224721
  misc_feature (1)..(149): Pfam Name: Protein of unknown function (DUF663) Pfam Description: Protein of unknown function (DUF663)
  misc_feature (1)..(311): Homolog of NCBI NO: 39582203 NR Description: Hypothetical protein CBG08772 [Caenorhabditis
  misc_feature (1)..(313): Homolog of NCBI NO: 40788900 NR Description: KIAA0187 [Homo sapiens]
  misc_feature (1)..(313): Homolog of NCBI NO: 7661980 NR Description: BMS1-like, ribosome assembly protein
  misc_feature (1)..(313): Homolog of NCBI NO: 39930555 NR Description: BMS1-like, ribosome assembly protein
  misc_feature (1)..(313): Homolog of NCBI NO: 27696627 NR Description: Ribosome biogenesis protein BMS1 homolog [Homo
  misc_feature (1)..(313): Homolog of NCBI NO: 37359828 NR Description: mKIAA0187 protein [Mus musculus]
  misc_feature (1)..(313): Homolog of NCBI NO: 21410151 NR Description: BC030906 protein [Mus musculus]
  misc_feature (1)..(313): Homolog of NCBI NO: 25372790 NR Description: hypothetical protein [imported] - Arabidopsis
  misc_feature (1)..(313): Homolog of NCBI NO: 15222176 NR Description: expressed protein [Arabidopsis thaliana]
  misc_feature (1)..(313): Homolog of NCBI NO: 14596139 NR Description: Unknown protein [Arabidopsis thaliana]
MLKYTPEHMHCFAMFWGPLAPPKSGVLAVQNLSNNQVPFRITATGWVQEFNNTARIVKKIKLTGTPCKIFKKTALIKGMFTSDLEVARFEGAAIRTVSGIRGQVKKAAKIEPGDMLKRKGENTEGIARCTFEDRILMSDIVFLRAWVNVEVPTYSNPVTTALQPREQTWQGMRTTAELRKAHNIPTPHNKDSVYKPIERKPRKFNPVEIPAKLQQLLPFKSKPKDTAKQKKAPVENRVPVIMQPSEKKTHAAIXQLRLIKHEKAKKKKIKEQQKKKAYEAEKAKTELLTKKRQREERRVRYREEDKQKKRARR

SEQ ID NO: 111797 - protein, 305 aa, Zea mays subsp. mays
  misc_feature (1)..(305): Ceres Seq. ID no. 15224722
  misc_feature (1)..(141): Pfam Name: Protein of unknown function (DUF663) Pfam Description: Protein of unknown function (DUF663)
  misc_feature (1)..(303): Homolog of NCBI NO: 39582203 NR Description: Hypothetical protein CBG08772 [Caenorhabditis
  misc_feature (1)..(305): Homolog of NCBI NO: 40788900 NR Description: KIAA0187 [Homo sapiens]
  misc_feature (1)..(305): Homolog of NCBI NO: 7661980 NR Description: BMS1-like, ribosome assembly protein
  misc_feature (1)..(305): Homolog of NCBI NO: 39930555 NR Description: BMS1-like, ribosome assembly protein
  misc_feature (1)..(305): Homolog of NCBI NO: 27696627 NR Description: Ribosome biogenesis protein BMS1 homolog [Homo
  misc_feature (1)..(305): Homolog of NCBI NO: 37359828 NR Description: mKIAA0187 protein [Mus musculus]
  misc_feature (1)..(305): Homolog of NCBI NO: 21410151 NR Description: BC030906 protein [Mus musculus]
  misc_feature (1)..(305): Homolog of NCBI NO: 15222176 NR Description: expressed protein [Arabidopsis thaliana]
  misc_feature (1)..(305): Homolog of NCBI NO: 25372790 NR Description: hypothetical protein [imported] - Arabidopsis
  misc_feature (1)..(305): Homolog of NCBI NO: 14596139 NR Description: Unknown protein [Arabidopsis thaliana]
MHCFAMFWGPLAPPKSGVLAVQNLSNNQVPFRITATGWVQEFNNTARIVKKIKLTGTPCKIFKKTALIKGMFTSDLEVARFEGAAIRTVSGIRGQVKKAAKIEPGDMLKRKGENTEGIARCTFEDRILMSDIVFLRAWVNVEVPTYSNPVTTALQPREQTWQGMRTTAELRKAHNIPTPHNKDSVYKPIERKPRKFNPVEIPAKLQQLLPFKSKPKDTAKQKKAPVENRVPVIMQPSEKKTHAAIXQLRLIKHEKAKKKKIKEQQKKKAYEAEKAKTELLTKKRQREERRVRYREEDKQKKRARR

SEQ ID NO: 111798 - protein, 300 aa, Zea mays subsp. mays
  misc_feature (1)..(300): Ceres Seq. ID no. 15224723
  misc_feature (1)..(136): Pfam Name: Protein of unknown function (DUF663) Pfam Description: Protein of unknown function (DUF663)
  misc_feature (1)..(298): Homolog of NCBI NO: 39582203 NR Description: Hypothetical protein CBG08772 [Caenorhabditis
  misc_feature (1)..(300): Homolog of NCBI NO: 40788900 NR Description: KIAA0187 [Homo sapiens]
  misc_feature (1)..(300): Homolog of NCBI NO: 7661980 NR Description: BMS1-like, ribosome assembly protein
  misc_feature (1)..(300): Homolog of NCBI NO: 39930555 NR Description: BMS1-like, ribosome assembly protein
  misc_feature (1)..(300): Homolog of NCBI NO: 27696627 NR Description: Ribosome biogenesis protein BMS1 homolog [Homo
  misc_feature (1)..(300): Homolog of NCBI NO: 37359828 NR Description: mKIAA0187 protein [Mus musculus]
  misc_feature (1)..(300): Homolog of NCBI NO: 21410151 NR Description: BC030906 protein [Mus musculus]
  misc_feature (1)..(300): Homolog of NCBI NO: 15222176 NR Description: expressed protein [Arabidopsis thaliana]
  misc_feature (1)..(300): Homolog of NCBI NO: 25372790 NR Description: hypothetical protein [imported] - Arabidopsis
  misc_feature (1)..(300): Homolog of NCBI NO: 14596139 NR Description: Unknown protein [Arabidopsis thaliana]
MFWGPLAPPKSGVLAVQNLSNNQVPFRITATGWVQEFNNTARIVKKIKLTGTPCKIFKKTALIKGMFTSDLEVARFEGAAIRTVSGIRGQVKKAAKIEPGDMLKRKGENTEGIARCTFEDRILMSDIVFLRAWVNVEVPTYSNPVTTALQPREQTWQGMRTTAELRKAHNIPTPHNKDSVYKPIERKPRKFNPVEIPAKLQQLLPFKSKPKDTAKQKKAPVENRVPVIMQPSEKKTHAAIXQLRLIKHEKAKKKKIKEQQKKKAYEAEKAKTELLTKKRQREERRVRYREEDKQKKRARR

SEQ ID NO: 111799 - DNA, 1083 bp, Zea mays subsp. mays
  misc_feature (1)..(1083): Ceres Seq. ID no. 14305132
  misc_feature: MA Experiment ID: 108528 Result: Up-regulated in Transcription
  misc_feature: MA Experiment 108528 PARAMETER Experiment Name: Zm_Imbibed_Seeds_P Parameter: Age (day) Value: 5 vs. 2
  misc_feature: MA Experiment 108528 PARAMETER Experiment Name: Zm_Imbibed_Seeds_P Parameter: Organism Value: Zea mays
  misc_feature: MA Experiment 108528 PARAMETER Experiment Name: Zm_Imbibed_Seeds_P Parameter: Plant Line Value: 35A19
  misc_feature: MA Experiment 108528 PARAMETER Experiment Name: Zm_Imbibed_Seeds_P Parameter: Tissue Value: Aerial vs. Embryo
  misc_feature: MA Experiment ID: 108529 Result: Up-regulated in Transcription
  misc_feature: MA Experiment 108529 PARAMETER Experiment Name: Zm_Imbibed_Seeds_P Parameter: Age (day) Value: 5 vs. 2
  misc_feature: MA Experiment 108529 PARAMETER Experiment Name: Zm_Imbibed_Seeds_P Parameter: Organism Value: Zea mays
  misc_feature: MA Experiment 108529 PARAMETER Experiment Name: Zm_Imbibed_Seeds_P Parameter: Plant Line Value: 35A19
  misc_feature: MA Experiment 108529 PARAMETER Experiment Name: Zm_Imbibed_Seeds_P Parameter: Tissue Value: Roots vs. Embryo
  misc_feature: MA Experiment ID: 108530 Result: Up-regulated in Transcription
  misc_feature: MA Experiment 108530 PARAMETER Experiment Name: Zm_Imbibed_Seeds_P Parameter: Age (day) Value: 6 vs. 2
  misc_feature: MA Experiment 108530 PARAMETER Experiment Name: Zm_Imbibed_Seeds_P Parameter: Organism Value: Zea mays
  misc_feature: MA Experiment 108530 PARAMETER Experiment Name: Zm_Imbibed_Seeds_P Parameter: Plant Line Value: 35A19
  misc_feature: MA Experiment 108530 PARAMETER Experiment Name: Zm_Imbibed_Seeds_P Parameter: Tissue Value: Aerial vs. Embryo
  misc_feature: MA Experiment ID: 108535 Result: Down-regulated in Transcription
  misc_feature: MA Experiment 108535 PARAMETER Experiment Name: Zm_Meristem_P Parameter: Age (day) Value: 8
  misc_feature: MA Experiment 108535 PARAMETER Experiment Name: Zm_Meristem_P Parameter: Organism Value: Zea mays
  misc_feature: MA Experiment 108535 PARAMETER Experiment Name: Zm_Meristem_P Parameter: Plant Line Value: 35A19
  misc_feature: MA Experiment 108535 PARAMETER Experiment Name: Zm_Meristem_P Parameter: Tissue Value: Root Meristem vs. Above Root Meristem
  misc_feature: MA Experiment ID: 108543 Result: Down-regulated in Transcription
  misc_feature: MA Experiment ID: 108547 Result: Up-regulated in Transcription
  misc_feature: MA Experiment 108547 PARAMETER Experiment Name: Zm_Imbibed_Seeds_P Parameter: Age (day) Value: 4 vs. 2
  misc_feature: MA Experiment 108547 PARAMETER Experiment Name: Zm_Imbibed_Seeds_P Parameter: Organism Value: Zea mays
  misc_feature: MA Experiment 108547 PARAMETER Experiment Name: Zm_Imbibed_Seeds_P Parameter: Plant Line Value: 35A19
  misc_feature: MA Experiment 108547 PARAMETER Experiment Name: Zm_Imbibed_Seeds_P Parameter: Tissue Value: Aerial vs. Embryo
  misc_feature: MA Experiment ID: 108687 Result: Down-regulated in Transcription
  misc_feature: MA Experiment 108687 PARAMETER Experiment Name: Zm_Embryos-Flowers__P Parameter: Tissue Value: Embryo vs. Aerial+
  misc_feature: MA Experiment ID: 20000492 Result: Down-regulated in Transcription
  misc_feature: MA Experiment 20000492 PARAMETER Experiment Name: Zm_Hybrid_Seed_Dev_P Parameter: DAP Value: 12
  misc_feature: MA Experiment 20000492 PARAMETER Experiment Name: Zm_Hybrid_Seed_Dev_P Parameter: Organism Value: Zea mays
  misc_feature: MA Experiment 20000492 PARAMETER Experiment Name: Zm_Hybrid_Seed_Dev_P Parameter: Plant Line Value: 35A19
  misc_feature: MA Experiment 20000492 PARAMETER Experiment Name: Zm_Hybrid_Seed_Dev_P Parameter: Tissue Value: Fert Kernel vs. Unfert Floret
  misc_feature: MA Experiment ID: 20000535 Result: Down-regulated in Transcription
  misc_feature: MA Experiment 20000535 PARAMETER Experiment Name: Zm_Hybrid_Seed_Dev_P Parameter: DAP Value: 30 vs. 12
  misc_feature: MA Experiment 20000535 PARAMETER Experiment Name: Zm_Hybrid_Seed_Dev_P Parameter: Organism Value: Zea mays
  misc_feature: MA Experiment 20000535 PARAMETER Experiment Name: Zm_Hybrid_Seed_Dev_P Parameter: Plant Line Value: 35A19
  misc_feature: MA Experiment 20000535 PARAMETER Experiment Name: Zm_Hybrid_Seed_Dev_P Parameter: Tissue Value: Embryo vs. Unfert Floret
gtagctccttctcctacacagaaaagccgtcgcctactcgcctccggccaaaaaactgactccacacacgacccaaatcttttcctctccacaggcgactcccaacgcaacagcagctcgtcgagcgagtcgtcgccggccggccggtatatacgcaagaaagccaagaaaaacacttctgcctcttcctccatatccaagaaccaaaggtagctagctagccgcgactcgttggctagacgattcaagcagcagcgcaggatggtggcgccggtggtgattgcgtcggccgggctgggcatgctggccggcgtggcgatggccaaccggtccctcgggaacgggctcccggcggcctccaggtgggacgcgcgcccgcgctgcgccacgtgcggcggctccggccgcgtggagtgcatctgcaaccgctggtccgacggcgactccggctgccggacctgcgctgggtcggggaggatgccctgccgcagctgcggcggctccggcacgggccgaccgctccctgcacggctcaccgtccagcaccagaagccgccgccgccgccgccgcccggctacaactgatcgatggtggatgattaggtatccgtatccgtggattatatacttctcgcgggcgatttgcgatgcgacccatacaagaaagaaatcagttaaactgcgatatgatgcgctctagctagttaatcatatatacatatatacacgtccgatccattcgtgtggatgacatccatgttgcatatgtacaagtacatgtctcttcttcaagagtcaagactagctgtaattgagctgagcatacttggtgttgctgttgttcagttaatttgcaaaaacgcacaacacaagaaagaaggaaaaaaaaaacagagtggaaatgtttttttttaagatctggagaacaacatgattgagaagggagggaaggtgattctgagcacagttttgttggaaaggctgtagttaattctggtggatgtaatatattatatgtatgtatatgcttagattcgttaatatatatgcatatatatgcacccacatgaatatgatttacag

SEQ ID NO: 111800 - protein, 107 aa, Zea mays subsp. mays
  misc_feature (1)..(107): Ceres Seq. ID no. 14305133
  misc_feature (2)..(102): Homolog of NCBI NO: 18422312 NR Description: expressed protein [Arabidopsis thaliana]
  misc_feature (1)..(99): Homolog of NCBI NO: 38347221 NR Description: OSJNBa0044M19.3 [Oryza sativa (japonica
MVAPVVIASAGLGMLAGVAMANRSLGNGLPAASRWDARPRCATCGGSGRVECICNRWSDGDSGCRTCAGSGRMPCRSCGGSGTGRPLPARLTVQHQKPPPPPPPGYN

SEQ ID NO: 111801 - protein, 94 aa, Zea mays subsp. mays
  misc_feature (1)..(94): Ceres Seq. ID no. 14305134
  misc_feature (1)..(89): Homolog of NCBI NO: 18422312 NR Description: expressed protein [Arabidopsis thaliana]
  misc_feature (1)..(86): Homolog of NCBI NO: 38347221 NR Description: OSJNBa0044M19.3 [Oryza sativa (japonica
MLAGVAMANRSLGNGLPAASRWDARPRCATCGGSGRVECICNRWSDGDSGCRTCAGSGRMPCRSCGGSGTGRPLPARLTVQHQKPPPPPPPGYN

SEQ ID NO: 111802 - protein, 88 aa, Zea mays subsp. mays
  misc_feature (1)..(88): Ceres Seq. ID no. 14305135
  misc_feature (1)..(83): Homolog of NCBI NO: 18422312 NR Description: expressed protein [Arabidopsis thaliana]
  misc_feature (1)..(80): Homolog of NCBI NO: 38347221 NR Description: OSJNBa0044M19.3 [Oryza sativa (japonica
MANRSLGNGLPAASRWDARPRCATCGGSGRVECICNRWSDGDSGCRTCAGSGRMPCRSCGGSGTGRPLPARLTVQHQKPPPPPPPGYN

SEQ ID NO: 111803 - DNA, 977 bp, Zea mays subsp. mays
  misc_feature (1)..(977): Ceres Seq. ID no. 14305097
aatcaacaacaatatccagaccttctctgagaatcaaatcaaacaggaagctcacagaagtccaaaattacagttataattcatctgtcacccttgaccccagtctgatccagccatgtttagaaacaattacgataacgattcggtgactttctcaccgcaaggccgtatcttccaggtggaatatgctcaagaagctgtcaaacagggttccgttgtggtcggattagttagcaagacacatgctgttctcgtggggttgaagcgaaacgcagaagaactctcgtcgtaccagaaaaaagtcatcgaaatcgactcacacatgggcatcgccattgccggcctctcctccgacgcccgggtcctttccaacttcatgaaacagcaatctctcggctcacgaatgacatacggccgcgccatccccctagaccggatcgtcacccaaatcggtgatcgcgcacaaaccaacacacaacattacggcaaacgaccatacggtgttggcctcttagttgcgggtgtcgatgaggcaggcccgcatttattcgagtttcaaccttccggtatgacgcaggagatgcttgcatgcgcgattggggctcggtcacagatggcgaggacttatctggaaagaaatctggccgagtttgcggattgttcgcgcgaggagttgattaaccatggcctgaaggccttgagggagactctttcgcaggataaggagcttaggattgataataccacggttggagttgtgggacttgtccccaaggattcggcgacaccttcctccaagggtactaagctagagaactttaagctatatgatggacaggacgttggtgcgctattggaggcgttggatggcgcagctaccgagggtggtgaaatggaggttgatacacagtgatggattagcgttctatctcttcaatagatcaatttctcattatgaatggataatcatactcgtt

SEQ ID NO: 111804 - protein, 265 aa, Zea mays subsp. mays
  misc_feature (1)..(265): Ceres Seq. ID no. 14305098
  misc_feature (29)..(215): Pfam Name: Proteasome A-type and B-type Pfam Description: Proteasome A-type and B-type
  misc_feature (1)..(251): Homolog of NCBI NO: 33563282 NR Description: proteasome (prosome, macropain) subunit, alpha
  misc_feature (1)..(251): Homolog of NCBI NO: 4506179 NR Description: proteasome alpha 1 subunit isoform 2
  misc_feature (1)..(250): Homolog of NCBI NO: 19115013 NR Description: proteasome subunit C2 [Schizosaccharomyces pombe]
  misc_feature (1)..(251): Homolog of NCBI NO: 30584967 NR Description: Homo sapiens proteasome (prosome, macropain)
  misc_feature (1)..(251): Homolog of NCBI NO: 8394060 NR Description: proteasome (prosome, macropain) subunit, alpha
  misc_feature (1)..(251): Homolog of NCBI NO: 23110935 NR Description: proteasome alpha 1 subunit isoform 1
  misc_feature (1)..(251): Homolog of NCBI NO: 13543551 NR Description: proteasome (prosome, macropain) subunit, alpha
  misc_feature (1)..(251): Homolog of NCBI NO: 190447 NR Description: prosomal protein P30-33K
  misc_feature (1)..(264): Homolog of NCBI NO: 32413036 NR Description: hypothetical protein [Neurospora crassa]
  misc_feature (1)..(264): Homolog of NCBI NO: 40738697 NR Description: hypothetical protein AN6547.2 [Aspergillus
MFRNNYDNDSVTFSPQGRIFQVEYAQEAVKQGSVVVGLVSKTHAVLVGLKRNAEELSSYQKKVIEIDSHMGIAIAGLSSDARVLSNFMKQQSLGSRMTYGRAIPLDRIVTQIGDRAQTNTQHYGKRPYGVGLLVAGVDEAGPHLFEFQPSGMTQEMLACAIGARSQMARTYLERNLAEFADCSREELINHGLKALRETLSQDKELRIDNTTVGVVGLVPKDSATPSSKGTKLENFKLYDGQDVGALLEALDGAATEGGEMEVDTQ

SEQ ID NO: 111805 - protein, 196 aa, Zea mays subsp. mays
  misc_feature (1)..(196): Ceres Seq. ID no. 14305099
  misc_feature (1)..(146): Pfam Name: Proteasome A-type and B-type Pfam Description: Proteasome A-type and B-type
  misc_feature (1)..(182): Homolog of NCBI NO: 190447 NR Description: prosomal protein P30-33K
  misc_feature (1)..(182): Homolog of NCBI NO: 30584967 NR Description: Homo sapiens proteasome (prosome, macropain)
  misc_feature (1)..(182): Homolog of NCBI NO: 13543551 NR Description: proteasome (prosome, macropain) subunit, alpha
  misc_feature (1)..(182): Homolog of NCBI NO: 8394060 NR Description: proteasome (prosome, macropain) subunit, alpha
  misc_feature (1)..(182): Homolog of NCBI NO: 23110935 NR Description: proteasome alpha 1 subunit isoform 1
  misc_feature (1)..(182): Homolog of NCBI NO: 33563282 NR Description: proteasome (prosome, macropain) subunit, alpha
  misc_feature (1)..(182): Homolog of NCBI NO: 4506179 NR Description: proteasome alpha 1 subunit isoform 2
  misc_feature (1)..(181): Homolog of NCBI NO: 19115013 NR Description: proteasome subunit C2 [Schizosaccharomyces pombe]
  misc_feature (1)..(195): Homolog of NCBI NO: 32413036 NR Description: hypothetical protein [Neurospora crassa]
  misc_feature (1)..(195): Homolog of NCBI NO: 40738697 NR Description: hypothetical protein AN6547.2 [Aspergillus
MGIAIAGLSSDARVLSNFMKQQSLGSRMTYGRAIPLDRIVTQIGDRAQTNTQHYGKRPYGVGLLVAGVDEAGPHLFEFQPSGMTQEMLACAIGARSQMARTYLERNLAEFADCSREELINHGLKALRETLSQDKELRIDNTTVGVVGLVPKDSATPSSKGTKLENFKLYDGQDVGALLEALDGAATEGGEMEVDTQ

SEQ ID NO: 111806 - protein, 178 aa, Zea mays subsp. mays
  misc_feature (1)..(178): Ceres Seq. ID no. 14305100
  misc_feature (1)..(128): Pfam Name: Proteasome A-type and B-type Pfam Description: Proteasome A-type and B-type
  misc_feature (1)..(164): Homolog of NCBI NO: 190447 NR Description: prosomal protein P30-33K
  misc_feature (1)..(164): Homolog of NCBI NO: 30584967 NR Description: Homo sapiens proteasome (prosome, macropain)
  misc_feature (1)..(164): Homolog of NCBI NO: 13543551 NR Description: proteasome (prosome, macropain) subunit, alpha
  misc_feature (1)..(164): Homolog of NCBI NO: 8394060 NR Description: proteasome (prosome, macropain) subunit, alpha
  misc_feature (1)..(164): Homolog of NCBI NO: 23110935 NR Description: proteasome alpha 1 subunit isoform 1
  misc_feature (1)..(164): Homolog of NCBI NO: 33563282 NR Description: proteasome (prosome, macropain) subunit, alpha
  misc_feature (1)..(164): Homolog of NCBI NO: 4506179 NR Description: proteasome alpha 1 subunit isoform 2
  misc_feature (1)..(163): Homolog of NCBI NO: 19115013 NR Description: proteasome subunit C2 [Schizosaccharomyces pombe]
  misc_feature (1)..(177): Homolog of NCBI NO: 32413036 NR Description: hypothetical protein [Neurospora crassa]
  misc_feature (1)..(177): Homolog of NCBI NO: 40738697 NR Description: hypothetical protein AN6547.2 [Aspergillus
MKQQSLGSRMTYGRAIPLDRIVTQIGDRAQTNTQHYGKRPYGVGLLVAGVDEAGPHLFEFQPSGMTQEMLACAIGARSQMARTYLERNLAEFADCSREELINHGLKALRETLSQDKELRIDNTTVGVVGLVPKDSATPSSKGTKLENFKLYDGQDVGALLEALDGAATEGGEMEVDTQ

SEQ ID NO: 111807 - DNA, 898 bp, Zea mays subsp. mays
  misc_feature (1)..(898): Ceres Seq. ID no. 15225415
gcacccacaaggttgagagctgagactgatctgtgccatccgtccgttcccgcgagcgagagaggccggccgcagcatggcgtccgccgcccaccggtccatggggtctgccctcctgtccctcaacctcatcatgtacgtcgtcgtcgcggtcatcgctggctgggccatcaactacagcatcgacgagagcaggaactcgctgaagggcgcgacgccgccggtgcgcctgttcccgatctacttccccatcggcaacctggcgacggggttcttcgtcatcttcgcgctcgtcacgggcgtcgtcggcatctccacctcgctcgccggcctgcacgaggtcagccaggggtacccggccagcatgatgtccgccgccgcgtccgcccttgtcacctggaccctcaccgtcctcgccatggggctagcgtgcaaggagatcagcctcagcgtgaggcccgggagcctgcgcaccttggaggcgttcaccatcatcctgaccgccacgcagctgctctgcgccgtgtcgctccacgccggcgcgcacgcggtcatcctggagacgcctatcggcggcagagtctagctgaggtgcgcgatgacagctagcatgcgccatcttggcagagtgatcggtgttgtgtcgctttacaggtgccgtgtgtgtgctttctgggtacctaaaattcgtgtgagcctcattcatttgtaaaaaaatatgtcgtggactcataagtggtggtaaactatcggcgattcttcccatactactgcaagtcaaaattattgcgctttgcacagttccattatatgtactaagtgtctgtttgttttagcttatagattatataatcttgattatttactctagctagaataaaaaaaaaaaaaaaaaaaa

SEQ ID NO: 111808 - protein, 202 aa, Zea mays subsp. mays
  misc_feature (1)..(202): Ceres Seq. ID no. 15225416
APTRLRAETDLCHPSVPASERGRPQHGVRRPPVHGVCPPVPQPHHVRRRRGHRWLGHQLQHRREQELAEGRDAAGAPVPDLLPHRQPGDGVLRHLRARHGRRRHLHLARRPARGQPGVPGQHDVRRRVRPCHLDPHRPRHGASVQGDQPQREAREPAHLGGVHHHPDRHAAALRRVAPRRRARGHPGDAYRRQSLAEVRDDS

SEQ ID NO: 111809 - protein, 169 aa, Zea mays subsp. mays
  misc_feature (1)..(169): Ceres Seq. ID no. 15225417
  misc_feature (16)..(155): Pfam Name: AWPM-19-like family Pfam Description: AWPM-19-like family
  misc_feature (32)..(153): Homolog of NCBI NO: 15237455 NR Description: hypothetical protein [Arabidopsis thaliana]
  misc_feature (1)..(156): Homolog of NCBI NO: 18390408 NR Description: expressed protein [Arabidopsis thaliana]
  misc_feature (7)..(155): Homolog of NCBI NO: 4097340 NR Description: hydrophobic LEA-like protein [Oryza sativa]
  misc_feature (7)..(155): Homolog of NCBI NO: 6851373 NR Description: plasma membrane associated protein [Hordeum
  misc_feature (7)..(155): Homolog of NCBI NO: 7489659 NR Description: ABA-induced plasma membrane protein PM 19 - wheat
  misc_feature (1)..(153): Homolog of NCBI NO: 15218953 NR Description: plasma membrane associated protein -related
  misc_feature (133)..(160): Homolog of NCBI NO: 34904644 NR Description: putative ABA-induced plasma membrane protein
  misc_feature (13)..(140): Homolog of NCBI NO: 34904644 NR Description: putative ABA-induced plasma membrane protein
  misc_feature (1)..(155): Homolog of NCBI NO: 34911480 NR Description: putative plasma membrane associated protein
  misc_feature (1)..(169): Homolog of NCBI NO: 15239619 NR Description: plasma membrane associated protein -related
MASAAHRSMGSALLSLNLIMYVVVAVIAGWAINYSIDESRNSLKGATPPVRLFPIYFPIGNLATGFFVIFALVTGVVGISTSLAGLHEVSQGYPASMMSAAASALVTWTLTVLAMGLACKEISLSVRPGSLRTLEAFTIILTATQLLCAVSLHAGAHAVILETPIGGRV

SEQ ID NO: 111810 - protein, 161 aa, Zea mays subsp. mays
  misc_feature (1)..(161): Ceres Seq. ID no. 15225418
  misc_feature (8)..(147): Pfam Name: AWPM-19-like family Pfam Description: AWPM-19-like family
  misc_feature (24)..(145): Homolog of NCBI NO: 15237455 NR Description: hypothetical protein [Arabidopsis thaliana]
  misc_feature (1)..(148): Homolog of NCBI NO: 18390408 NR Description: expressed protein [Arabidopsis thaliana]
  misc_feature (1)..(147): Homolog of NCBI NO: 4097340 NR Description: hydrophobic LEA-like protein [Oryza sativa]
  misc_feature (1)..(147): Homolog of NCBI NO: 6851373 NR Description: plasma membrane associated protein [Hordeum
  misc_feature (1)..(147): Homolog of NCBI NO: 7489659 NR Description: ABA-induced plasma membrane protein PM 19 - wheat
  misc_feature (1)..(145): Homolog of NCBI NO: 15218953 NR Description: plasma membrane associated protein -related
  misc_feature (125)..(152): Homolog of NCBI NO: 34904644 NR Description: putative ABA-induced plasma membrane protein
  misc_feature (5)..(132): Homolog of NCBI NO: 34904644 NR Description: putative ABA-induced plasma membrane protein
  misc_feature (1)..(147): Homolog of NCBI NO: 34911480 NR Description: putative plasma membrane associated protein
  misc_feature (1)..(161): Homolog of NCBI NO: 15239619 NR Description: plasma membrane associated protein -related
MGSALLSLNLIMYVVVAVIAGWAINYSIDESRNSLKGATPPVRLFPIYFPIGNLATGFFVIFALVTGVVGISTSLAGLHEVSQGYPASMMSAAASALVTWTLTVLAMGLACKEISLSVRPGSLRTLEAFTIILTATQLLCAVSLHAGAHAVILETPIGGRV

SEQ ID NO: 111811 - DNA, 901 bp, Zea mays subsp. mays
  misc_feature (1)..(901): Ceres Seq. ID no. 14305614
cattccaaaactccgagcaatcagtccaaacccgtgtccaccgaaagtttgatgggatcaggcctctcaagcagcagcagccaccggagcagcggcgcgtcgtcgtcgcttcaccagccaccggcggcggccccggccctggtcgtcgcggtcgacggctcgctacgggagttcgtcacgccggcggcggtgccgctcctcccccccgtctccgtctccgacgtgctgggcgcgaatgcggacgacggccggtccttcgtgtgcagctccagcgcgctctacttcgagaccgacgtcccggcgctcggcgccagcgagctgctccggccggggcagctctacttcgtcctccccgcggcgatgctcggcaggccgctctcgggcgccgacatggccgcgctggccgtgcgcgccagccaggcgctggcggcgggagcgaggccgccgcgtggcgggcgacgccctcgcgggtccaccagggcgcgcgtcgtgccggcggcggcggcgcaccacgcgcacgcgcacggcgacgaggaggctgtcaacgagaagctcaaccagaggactcttggcggcttcgagacggctcctccacgtggtccggccaggaagcccgctgtcgcggcgcgaccggccccgcctgtgactgtgactgtgactgagaggagggcgctcagcaccatcgaagagggtgccgagtgatcgataaaatggctacaaggcgcgcgtgttcgattgattgatgattaggtttagttttttattgggttaattaaagacttaatgacacgcaaatagtttgaaaggatagggaaacttgttacttggttgatcgacgtctgtgtactactcacactaattacaaaattaaatgggaattttggttttcgacctggttctt

SEQ ID NO: 111812 - protein, 233 aa, Zea mays subsp. mays
  misc_feature (1)..(233): Ceres Seq. ID no. 14305615
  misc_feature (86)..(145): Homolog of NCBI NO: 25371565 NR Description: hypothetical protein AT4g37240 [imported] -
  misc_feature (32)..(145): Homolog of NCBI NO: 18420002 NR Description: expressed protein [Arabidopsis thaliana]
  misc_feature (10)..(146): Homolog of NCBI NO: 34904464 NR Description: OSJNBa0086P08.11 [Oryza sativa (japonica
  misc_feature (42)..(185): Homolog of NCBI NO: 14596201 NR Description: Unknown protein [Arabidopsis thaliana]
  misc_feature (42)..(185): Homolog of NCBI NO: 18411155 NR Description: expressed protein [Arabidopsis thaliana]
  misc_feature (18)..(142): Homolog of NCBI NO: 13699079 NR Description: TMV response-related gene product [Nicotiana
  misc_feature (30)..(158): Homolog of NCBI NO: 34394505 NR Description: hypothetical protein [Oryza sativa (japonica
  misc_feature (41)..(210): Homolog of NCBI NO: 5441884 NR Description: Similar to Arabidopsis thaliana DNA contig
  misc_feature (41)..(232): Homolog of NCBI NO: 5441882 NR Description: Similar to Arabidopsis thaliana DNA contig
  misc_feature (35)..(233): Homolog of NCBI NO: 5441883 NR Description: Similar to Arabidopsis thaliana BAC genomic
HSKTPSNQSKPVSTESLMGSGLSSSSSHRSSGASSSLHQPPAAAPALVVAVDGSLREFVTPAAVPLLPPVSVSDVLGANADDGRSFVCSSSALYFETDVPALGASELLRPGQLYFVLPAAMLGRPLSGADMAALAVRASQALAAGARPPRGGRRPRGSTRARVVPAAAAHHAHAHGDEEAVNEKLNQRTLGGFETAPPRGPARKPAVAARPAPPVTVTVTERRALSTIEEGAE

SEQ ID NO: 111813 - protein, 219 aa, Zea mays subsp. mays
  misc_feature (1)..(219): Ceres Seq. ID no. 14305616
FQNSEQSVQTRVHRKFDGIRPLKQQQPPEQRRVVVASPATGGGPGPGRRGRRLATGVRHAGGGAAPPPRLRLRRAGRECGRRPVLRVQLQRALLRDRRPGARRQRAAPAGAALLRPPRGDARQAALGRRHGRAGRARQPGAGGGSEAAAWRATPSRVHQGARRAGGGGAPRARARRRGGCQREAQPEDSWRLRDGSSTWSGQEARCRGATGPACDCDCD

SEQ ID NO: 111814 - protein, 216 aa, Zea mays subsp. mays
  misc_feature (1)..(216): Ceres Seq. ID no. 14305617
  misc_feature (69)..(128): Homolog of NCBI NO: 25371565 NR Description: hypothetical protein AT4g37240 [imported] -
  misc_feature (15)..(128): Homolog of NCBI NO: 18420002 NR Description: expressed protein [Arabidopsis thaliana]
  misc_feature (1)..(129): Homolog of NCBI NO: 34904464 NR Description: OSJNBa0086P08.11 [Oryza sativa (japonica
  misc_feature (25)..(168): Homolog of NCBI NO: 14596201 NR Description: Unknown protein [Arabidopsis thaliana]
  misc_feature (25)..(168): Homolog of NCBI NO: 18411155 NR Description: expressed protein [Arabidopsis thaliana]
  misc_feature (1)..(125): Homolog of NCBI NO: 13699079 NR Description: TMV response-related gene product [Nicotiana
  misc_feature (13)..(141): Homolog of NCBI NO: 34394505 NR Description: hypothetical protein [Oryza sativa (japonica
  misc_feature (24)..(193): Homolog of NCBI NO: 5441884 NR Description: Similar to Arabidopsis thaliana DNA contig
  misc_feature (24)..(215): Homolog of NCBI NO: 5441882 NR Description: Similar to Arabidopsis thaliana DNA contig
  misc_feature (18)..(216): Homolog of NCBI NO: 5441883 NR Description: Similar to Arabidopsis thaliana BAC genomic
MGSGLSSSSSHRSSGASSSLHQPPAAAPALVVAVDGSLREFVTPAAVPLLPPVSVSDVLGANADDGRSFVCSSSALYFETDVPALGASELLRPGQLYFVLPAAMLGRPLSGADMAALAVRASQALAAGARPPRGGRRPRGSTRARVVPAAAAHHAHAHGDEEAVNEKLNQRTLGGFETAPPRGPARKPAVAARPAPPVTVTVTERRALSTIEEGAE

SEQ ID NO: 111815 - DNA, 943 bp, Zea mays subsp. mays
  misc_feature (1)..(943): Ceres Seq. ID no. 12589584
agaaaaggggaaaaggggaaaatgatttcttaaaaaagaggagtgacccggtctaccggagcgtacggtgccgatcccgtcgccgccgctacccctcaatcgcgagcaacttcttccggattcgcaccaagctctccacaattctatcgctatgctgcggaaggccgtcgtcgccttcatcgcctgcaccgccttcttcctcgccttctctgcctactcccgtcgccagggcgttgcagaggttcaattaccagcagttactcacagggtctacctagatgtagaaattgatggccaacacataggtagaattgttattggtctctatggggaggtcgttccaaaaacagttgaaaactttagggctctttgtacaggtgaaaaaggtgtcgggtccaatggcaaacctcttcactataagggaacaccattccatcgtattatccctggcttcatgattcagggcggtgacatagttagaggcgacggtaaagggagtgagtctatatatggaggcatcttcccagatgagaatttcactgtaaaacatacacatccaggggttgttgctatggcgaattctggacttgattctaatggatctcagttttacataactactatcaagacaagctggttggatggggagcatgttgtcttcggcagggtgatccaaggaatggataccgtgtacgccatagaagggggcgctgggacttacaatggcaagccaaggaagaaggcggtgatcaccgacgctggtgagatacccaaggagaaatggggtgatcaggaagcgtagggtgttttctacttcttgtcaccttcaaatcaggtagccatgtacttcttttttccttgacctccatggtgtgccacggttcagcaagacttccggaatgttgtatatcgtagctagcttatggccagtcgaattgactcc

SEQ ID NO: 111816 - protein, 216 aa, Zea mays subsp. mays
  misc_feature (1)..(216): Ceres Seq. ID no. 12589585
  misc_feature (34)..(206): Homolog of NCBI NO: 5731960 NR Description: cyclophilin B [Dictyostelium discoideum]
  misc_feature (33)..(206): Homolog of NCBI NO: 18410386 NR Description: cyclophilin-like protein
  misc_feature (33)..(207): Homolog of NCBI NO: 15237739 NR Description: cyclophilin ROC7
  misc_feature (1)..(207): Homolog of NCBI NO: 32351008 NR Description: cyclophilin [Triticum aestivum]
  misc_feature (5)..(207): Homolog of NCBI NO: 21554007 NR Description: cyclophilin [Arabidopsis thaliana]
  misc_feature (5)..(207): Homolog of NCBI NO: 11270326 NR Description: peptidylprolyl isomerase (EC 5.2.1.8) CYP5
  misc_feature (5)..(207): Homolog of NCBI NO: 15227674 NR Description: cyclophilin
  misc_feature (1)..(215): Homolog of NCBI NO: 15236227 NR Description: cyclophilin - like protein; protein id:
  misc_feature (39)..(206): Homolog of NCBI NO: 39582839 NR Description: Hypothetical protein CBG18577 [Caenorhabditis
  misc_feature (39)..(206): Homolog of NCBI NO: 17566266 NR Description: CYcloPhilin family CYP-7 (18.4 kD) (cyp-7)
MLRKAVVAFIACTAFFLAFSAYSRRQGVAEVQLPAVTHRVYLDVEIDGQHIGRIVIGLYGEVVPKTVENFRALCTGEKGVGSNGKPLHYKGTPFHRIIPGFMIQGGDIVRGDGKGSESIYGGIFPDENFTVKHTHPGVVAMANSGLDSNGSQFYITTIKTSWLDGEHVVFGRVIQGMDTVYAIEGGAGTYNGKPRKKAVITDAGEIPKEKWGDQEA

SEQ ID NO: 111817 - protein, 115 aa, Zea mays subsp. mays
  misc_feature (1)..(115): Ceres Seq. ID no. 12589586
  misc_feature (1)..(105): Homolog of NCBI NO: 39582839 NR Description: Hypothetical protein CBG18577 [Caenorhabditis
  misc_feature (1)..(105): Homolog of NCBI NO: 17566266 NR Description: CYcloPhilin family CYP-7 (18.4 kD) (cyp-7)
  misc_feature (1)..(105): Homolog of NCBI NO: 5731960 NR Description: cyclophilin B [Dictyostelium discoideum]
  misc_feature (1)..(105): Homolog of NCBI NO: 18410386 NR Description: cyclophilin-like protein
  misc_feature (1)..(106): Homolog of NCBI NO: 15237739 NR Description: cyclophilin ROC7
  misc_feature (1)..(106): Homolog of NCBI NO: 32351008 NR Description: cyclophilin [Triticum aestivum]
  misc_feature (1)..(106): Homolog of NCBI NO: 21554007 NR Description: cyclophilin [Arabidopsis thaliana]
  misc_feature (1)..(106): Homolog of NCBI NO: 11270326 NR Description: peptidylprolyl isomerase (EC 5.2.1.8) CYP5
  misc_feature (1)..(106): Homolog of NCBI NO: 15227674 NR Description: cyclophilin
  misc_feature (1)..(114): Homolog of NCBI NO: 15236227 NR Description: cyclophilin - like protein; protein id:
MIQGGDIVRGDGKGSESIYGGIFPDENFTVKHTHPGVVAMANSGLDSNGSQFYITTIKTSWLDGEHVVFGRVIQGMDTVYAIEGGAGTYNGKPRKKAVITDAGEIPKEKWGDQEA

SEQ ID NO: 111818 - DNA, 1119 bp, Zea mays subsp. mays
  misc_feature (1)..(1119): Ceres Seq. ID no. 14305675
  misc_feature: MA Experiment ID: 108504 Result: Up-regulated in Transcription
  misc_feature: MA Experiment 108504 PARAMETER Experiment Name: Zm_Drought_P Parameter: Age (day) Value: 8
  misc_feature: MA Experiment 108504 PARAMETER Experiment Name: Zm_Drought_P Parameter: Organism Value: Zea mays
  misc_feature: MA Experiment 108504 PARAMETER Experiment Name: Zm_Drought_P Parameter: Plant Line Value: 35A19
  misc_feature: MA Experiment 108504 PARAMETER Experiment Name: Zm_Drought_P Parameter: Timepoint (hr) Value: 12
  misc_feature: MA Experiment 108504 PARAMETER Experiment Name: Zm_Drought_P Parameter: Tissue Value: Aerial
  misc_feature: MA Experiment 108504 PARAMETER Experiment Name: Zm_Drought_P Parameter: Treatment Value: Drought vs. No Drought
  misc_feature: MA Experiment ID: 108540 Result: Up-regulated in Transcription
  misc_feature: MA Experiment 108540 PARAMETER Experiment Name: Zm_20percent_PEG_P Parameter: Age (day) Value: 8
  misc_feature: MA Experiment 108540 PARAMETER Experiment Name: Zm_20percent_PEG_P Parameter: Organism Value: Zea mays
  misc_feature: MA Experiment 108540 PARAMETER Experiment Name: Zm_20percent_PEG_P Parameter: Plant Line Value: 35A19
  misc_feature: MA Experiment 108540 PARAMETER Experiment Name: Zm_20percent_PEG_P Parameter: Timepoint (hr) Value: 6
  misc_feature: MA Experiment 108540 PARAMETER Experiment Name: Zm_20percent_PEG_P Parameter: Tissue Value: Aerial
  misc_feature: MA Experiment 108540 PARAMETER Experiment Name: Zm_20percent_PEG_P Parameter: Treatment Value: 20percent PEG vs. No Treatment
  misc_feature: MA Experiment ID: 108543 Result: Down-regulated in Transcription
  misc_feature: MA Experiment ID: 108544 Result: Down-regulated in Transcription
  misc_feature: MA Experiment ID: 108556 Result: Up-regulated in Transcription
  misc_feature: MA Experiment 108556 PARAMETER Experiment Name: Zm_Drought_P Parameter: Age (day) Value: 9
  misc_feature: MA Experiment 108556 PARAMETER Experiment Name: Zm_Drought_P Parameter: Organism Value: Zea mays
  misc_feature: MA Experiment 108556 PARAMETER Experiment Name: Zm_Drought_P Parameter: Plant Line Value: 35A19
  misc_feature: MA Experiment 108556 PARAMETER Experiment Name: Zm_Drought_P Parameter: Timepoint (hr) Value: 24
  misc_feature: MA Experiment 108556 PARAMETER Experiment Name: Zm_Drought_P Parameter: Tissue Value: Aerial
  misc_feature: MA Experiment 108556 PARAMETER Experiment Name: Zm_Drought_P Parameter: Treatment Value: Drought vs. No Drought
  misc_feature: MA Experiment ID: 108597 Result: Up-regulated in Transcription
  misc_feature: MA Experiment 108597 PARAMETER Experiment Name: Zm_100uM_ABA_P Parameter: Age (day) Value: 9
  misc_feature: MA Experiment 108597 PARAMETER Experiment Name: Zm_100uM_ABA_P Parameter: Organism Value: Zea mays
  misc_feature: MA Experiment 108597 PARAMETER Experiment Name: Zm_100uM_ABA_P Parameter: Plant Line Value: 35A19
  misc_feature: MA Experiment 108597 PARAMETER Experiment Name: Zm_100uM_ABA_P Parameter: Timepoint (hr) Value: 24
  misc_feature: MA Experiment 108597 PARAMETER Experiment Name: Zm_100uM_ABA_P Parameter: Tissue Value: Aerial
  misc_feature: MA Experiment 108597 PARAMETER Experiment Name: Zm_100uM_ABA_P Parameter: Treatment Value: 100uM ABA vs. No Treatment
  misc_feature: MA Experiment ID: 108687 Result: Up-regulated in Transcription
  misc_feature: MA Experiment 108687 PARAMETER Experiment Name: Zm_Embryos-Flowers__P Parameter: Tissue Value: Embryo vs. Aerial+
  misc_feature: MA Experiment ID: 20000478 Result: Up-regulated in Transcription
  misc_feature: MA Experiment 20000478 PARAMETER Experiment Name: Zm_5mM_SA_P Parameter: Age (day) Value: 11
  misc_feature: MA Experiment 20000478 PARAMETER Experiment Name: Zm_5mM_SA_P Parameter: Organism Value: Zea mays
  misc_feature: MA Experiment 20000478 PARAMETER Experiment Name: Zm_5mM_SA_P Parameter: Plant Line Value: 35A19
  misc_feature: MA Experiment 20000478 PARAMETER Experiment Name: Zm_5mM_SA_P Parameter: Timepoint (hr) Value: 72
  misc_feature: MA Experiment 20000478 PARAMETER Experiment Name: Zm_5mM_SA_P Parameter: Tissue Value: Aerial
  misc_feature: MA Experiment 20000478 PARAMETER Experiment Name: Zm_5mM_SA_P Parameter: Treatment Value: 5mM SA vs. No Treatment
  misc_feature: MA Experiment ID: 20000479 Result: Up-regulated in Transcription
  misc_feature: MA Experiment 20000479 PARAMETER Experiment Name: Zm_Drought_P Parameter: Age (day) Value: 10
  misc_feature: MA Experiment 20000479 PARAMETER Experiment Name: Zm_Drought_P Parameter: Organism Value: Zea mays
  misc_feature: MA Experiment 20000479 PARAMETER Experiment Name: Zm_Drought_P Parameter: Plant Line Value: 35A19
  misc_feature: MA Experiment 20000479 PARAMETER Experiment Name: Zm_Drought_P Parameter: Timepoint (hr) Value: 48
  misc_feature: MA Experiment 20000479 PARAMETER Experiment Name: Zm_Drought_P Parameter: Tissue Value: Aerial
  misc_feature: MA Experiment 20000479 PARAMETER Experiment Name: Zm_Drought_P Parameter: Treatment Value: Drought vs. No Drought
  misc_feature: MA Experiment ID: 20000480 Result: Up-regulated in Transcription
  misc_feature: MA Experiment 20000480 PARAMETER Experiment Name: Zm_Drought_P Parameter: Age (day) Value: 11
  misc_feature: MA Experiment 20000480 PARAMETER Experiment Name: Zm_Drought_P Parameter: Organism Value: Zea mays
  misc_feature: MA Experiment 20000480 PARAMETER Experiment Name: Zm_Drought_P Parameter: Plant Line Value: 35A19
  misc_feature: MA Experiment 20000480 PARAMETER Experiment Name: Zm_Drought_P Parameter: Timepoint (hr) Value: 72
  misc_feature: MA Experiment 20000480 PARAMETER Experiment Name: Zm_Drought_P Parameter: Tissue Value: Aerial
  misc_feature: MA Experiment 20000480 PARAMETER Experiment Name: Zm_Drought_P Parameter: Treatment Value: Drought vs. No Drought
  misc_feature: MA Experiment ID: 20000535 Result: Up-regulated in Transcription
  misc_feature: MA Experiment 20000535 PARAMETER Experiment Name: Zm_Hybrid_Seed_Dev_P Parameter: DAP Value: 30 vs. 12
  misc_feature: MA Experiment 20000535 PARAMETER Experiment Name: Zm_Hybrid_Seed_Dev_P Parameter: Organism Value: Zea mays
  misc_feature: MA Experiment 20000535 PARAMETER Experiment Name: Zm_Hybrid_Seed_Dev_P Parameter: Plant Line Value: 35A19
  misc_feature: MA Experiment 20000535 PARAMETER Experiment Name: Zm_Hybrid_Seed_Dev_P Parameter: Tissue Value: Embryo vs. Unfert Floret
acagctaccagacaacagtcaccggcacgcagacgctcagcaagagccaacaggacatcgtcgctcagcaagaaacaaggggggcaataatggcggagtaccagggcgagtatggacacccgtacccgcgcgtcgaccagtacgggaaccccgtgccgccggtggaccagtacggcaacccgctcccgagggagccggcgtccggtttcggcgccatcgctcccccctacagcgctggcgacagcgccgcggggcacgtggcggcgcctgtcgagtacggtgccgacgccaagtatccgcacgatggcacggggagcggtggcggcggcggcgtcaccgctccgaccggtgtggtggcgtactccagcggtggcgtcgcaccagccgagacggcgcttgcgtcgtacgaggagggcatggtccacctccagccgaccggggaggagcacacgtttggtatggcctcgcagctccagccgacccacggggaggagcacacgtttggcatggcctcgcagctccagccgaccggggaggagcacacgaccctcggagagaagctgaggcgctccggcagctccagctcgtcctcagaggatgacgagcaaggtgggcgccggaagaagagcatcaaggagaagataaaggagaagctcccgggcacccacaagcacgaggagcagaaggctgggcacgtgacgacgacgacgacggggacgcatgcagcggggacgcacgagaagaagggtttcatggagaagatcaaggagaagctaccgggacaccaccatgctcactgagcgtgtgtacctcagttgaggactcggatttgaggggtccagaatcgtgtgtcgtgcacaggtctctgcagtctctatatatgttgtgtacgacttcggtagcctcgacctcgatcgcttgtacctagtcatgctcatgcgtgcatattgctgtgctccttatatatgtagcattagaagctgcgcgcaagtagaatttgggttctagtctatatatacactgttatcgtcgtgtaggtttggctctggctcggagttgagtaattatgttgggctcgtttggtttgtgtttgtagtaatccatatgcatgttggctct

SEQ ID NO: 111819 - protein, 265 aa, Zea mays subsp. mays
  misc_feature (1)..(265): Ceres Seq. ID no. 14305676
  misc_feature (41)..(262): Pfam Name: Dehydrin Pfam Description: Dehydrin
  misc_feature (36)..(262): Homolog of NCBI NO: 2624085 NR Description: dehydrin-like protein [Helianthus annuus]
  misc_feature (36)..(262): Homolog of NCBI NO: 40643329 NR Description: putative dehydrin [Helianthus annuus]
  misc_feature (36)..(262): Homolog of NCBI NO: 12053701 NR Description: putative dehydrin [Helianthus annuus]
  misc_feature (36)..(262): Homolog of NCBI NO: 12053705 NR Description: putative dehydrin [Helianthus annuus]
  misc_feature (36)..(262): Homolog of NCBI NO: 12053703 NR Description: putative dehydrin [Helianthus annuus]
  misc_feature (35)..(262): Homolog of NCBI NO: 27526438 NR Description: putative dehydrin [Helianthus annuus]
  misc_feature (36)..(262): Homolog of NCBI NO: 12053699 NR Description: putative dehydrin [Helianthus annuus]
  misc_feature (30)..(263): Homolog of NCBI NO: 231984 NR Description: DEHYDRIN RAB25
  misc_feature (30)..(263): Homolog of NCBI NO: 34911522 NR Description: putative Oryza dehydrin rab25
  misc_feature (30)..(262): Homolog of NCBI NO: 4105101 NR Description: dehydrin 11 [Hordeum vulgare]
SYQTTVTGTQTLSKSQQDIVAQQETRGAIMAEYQGEYGHPYPRVDQYGNPVPPVDQYGNPLPREPASGFGAIAPPYSAGDSAAGHVAAPVEYGADAKYPHDGTGSGGGGGVTAPTGVVAYSSGGVAPAETALASYEEGMVHLQPTGEEHTFGMASQLQPTHGEEHTFGMASQLQPTGEEHTTLGEKLRRSGSSSSSSEDDEQGGRRKKSIKEKIKEKLPGTHKHEEQKAGHVTTTTTGTHAAGTHEKKGFMEKIKEKLPGHHHAH

SEQ ID NO: 111820 - protein, 236 aa, Zea mays subsp. mays
  misc_feature (1)..(236): Ceres Seq. ID no. 14305677
  misc_feature (12)..(233): Pfam Name: Dehydrin Pfam Description: Dehydrin
  misc_feature (7)..(233): Homolog of NCBI NO: 2624085 NR Description: dehydrin-like protein [Helianthus annuus]
  misc_feature (7)..(233): Homolog of NCBI NO: 40643329 NR Description: putative dehydrin [Helianthus annuus]
  misc_feature (7)..(233): Homolog of NCBI NO: 12053701 NR Description: putative dehydrin [Helianthus annuus]
  misc_feature (7)..(233): Homolog of NCBI NO: 12053705 NR Description: putative dehydrin [Helianthus annuus]
  misc_feature (7)..(233): Homolog of NCBI NO: 12053703 NR Description: putative dehydrin [Helianthus annuus]
  misc_feature (6)..(233): Homolog of NCBI NO: 27526438 NR Description: putative dehydrin [Helianthus annuus]
  misc_feature (7)..(233): Homolog of NCBI NO: 12053699 NR Description: putative dehydrin [Helianthus annuus]
  misc_feature (1)..(234): Homolog of NCBI NO: 231984 NR Description: DEHYDRIN RAB25
  misc_feature (1)..(234): Homolog of NCBI NO: 34911522 NR Description: putative Oryza dehydrin rab25
  misc_feature (1)..(233): Homolog of NCBI NO: 4105101 NR Description: dehydrin 11 [Hordeum vulgare]
MAEYQGEYGHPYPRVDQYGNPVPPVDQYGNPLPREPASGFGAIAPPYSAGDSAAGHVAAPVEYGADAKYPHDGTGSGGGGGVTAPTGVVAYSSGGVAPAETALASYEEGMVHLQPTGEEHTFGMASQLQPTHGEEHTFGMASQLQPTGEEHTTLGEKLRRSGSSSSSSEDDEQGGRRKKSIKEKIKEKLPGTHKHEEQKAGHVTTTTTGTHAAGTHEKKGFMEKIKEKLPGHHHAH

SEQ ID NO: 111821 - protein, 199 aa, Zea mays subsp. mays
  misc_feature (1)..(199): Ceres Seq. ID no. 14305678
QLPDNSHRHADAQQEPTGHRRSARNKGGNNGGVPGRVWTPVPARRPVREPRAAGGPVRQPAPEGAGVRFRRHRSPLQRWRQRRGARGGACRVRCRRQVSARWHGERWRRRRHRSDRCGGVLQRWRRTSRDGACVVRGGHGPPPADRGGAHVWYGLAAPADPRGGAHVWHGLAAPADRGGAHDPRREAEALRQLQLVLRG

SEQ ID NO: 111822 - DNA, 879 bp, Zea mays subsp. mays
  misc_feature (1)..(879): Ceres Seq. ID no. 15225880
atcaagtctcaactctcaagaggcagctaaaccaaccagcggtgatctgtagtagcaacttggttcttggtaggtgagataacgatacagcaggtagctcgagcgagaatgagccaggagcagccgaggaggccgtccggccatgacgagacgagcggcggagagcagggcgccgtccgctacggcgacgtgttcccggcggtgagcgggggcctcgcggagaagcccgtggcgccgcaggacgcggccacgatgcagtcggcggagaacctggtgttcggccagacgctcaagggcggcccggcggcggccatgcagtccgcggccaccgccaacgagcgcatgggcgccgtcgggcacgaccaggccacggacgccaccgccgtgcagggcgtcaccgtctccgagacccgcgtcccgggcggcggccgcatcgtcaccgagttcgtcgccgggcaggctgtcggccagtacctcgcgcgggacgacgatggcggcggcggcatcgccggccccggcgccggagcgggagttgcgggtaaggatatcacgaaggtgacgatcggcgaggcgctcgaggcgacggcgctcgcggcgggtgacgcgccggtggagcgcagcgacgcggccgccatccaggcggcggaggcgcgcgccacggggctggacgcgaacgtgcccggcgggctggccgcgcaggcgcagtcggccgcggcggccaactcgtgggcgtggggagacgaggacaaggccacgctcggcgacgtcctggcggtacgagtcacgaacacgacgtgccatcgttttcgtttcgtgccgctgctgctatatatctgacagtgcgtgttggtggtgcaacagagcagagatcttttgacc

SEQ ID NO: 111823 - protein, 242 aa, Zea mays subsp. mays
  misc_feature (1)..(242): Ceres Seq. ID no. 15225881
  misc_feature (148)..(210): Pfam Name: Seed maturation protein Pfam Description: Seed maturation protein
  misc_feature (1)..(224): Homolog of NCBI NO: 82045 NR Description: embryonic protein ecp31 - carrot
  misc_feature (1)..(221): Homolog of NCBI NO: 126078 NR Description: LATE EMBRYOGENESIS ABUNDANT PROTEIN D-34 (LEA
  misc_feature (1)..(222): Homolog of NCBI NO: 22773242 NR Description: Putative abscisic acid-induced protein
  misc_feature (1)..(222): Homolog of NCBI NO: 100920 NR Description: rab28 protein - maize
MSQEQPRRPSGHDETSGGEQGAVRYGDVFPAVSGGLAEKPVAPQDAATMQSAENLVFGQTLKGGPAAAMQSAATANERMGAVGHDQATDATAVQGVTVSETRVPGGGRIVTEFVAGQAVGQYLARDDDGGGGIAGPGAGAGVAGKDITKVTIGEALEATALAAGDAPVERSDAAAIQAAEARATGLDANVPGGLAAQAQSAAAANSWAWGDEDKATLGDVLAVRVTNTTCHRFRFVPLLLYI

SEQ ID NO: 111824 - protein, 194 aa, Zea mays subsp. mays
  misc_feature (1)..(194): Ceres Seq. ID no. 15225882
  misc_feature (100)..(162): Pfam Name: Seed maturation protein Pfam Description: Seed maturation protein
  misc_feature (1)..(176): Homolog of NCBI NO: 82045 NR Description: embryonic protein ecp31 - carrot
  misc_feature (1)..(173): Homolog of NCBI NO: 126078 NR Description: LATE EMBRYOGENESIS ABUNDANT PROTEIN D-34 (LEA
  misc_feature (1)..(174): Homolog of NCBI NO: 22773242 NR Description: Putative abscisic acid-induced protein
  misc_feature (1)..(174): Homolog of NCBI NO: 100920 NR Description: rab28 protein - maize
MQSAENLVFGQTLKGGPAAAMQSAATANERMGAVGHDQATDATAVQGVTVSETRVPGGGRIVTEFVAGQAVGQYLARDDDGGGGIAGPGAGAGVAGKDITKVTIGEALEATALAAGDAPVERSDAAAIQAAEARATGLDANVPGGLAAQAQSAAAANSWAWGDEDKATLGDVLAVRVTNTTCHRFRFVPLLLYI

SEQ ID NO: 111825 - protein, 174 aa, Zea mays subsp. mays
  misc_feature (1)..(174): Ceres Seq. ID no. 15225883
  misc_feature (80)..(142): Pfam Name: Seed maturation protein Pfam Description: Seed maturation protein
  misc_feature (1)..(156): Homolog of NCBI NO: 82045 NR Description: embryonic protein ecp31 - carrot
  misc_feature (1)..(153): Homolog of NCBI NO: 126078 NR Description: LATE EMBRYOGENESIS ABUNDANT PROTEIN D-34 (LEA
  misc_feature (1)..(154): Homolog of NCBI NO: 22773242 NR Description: Putative abscisic acid-induced protein
  misc_feature (1)..(154): Homolog of NCBI NO: 100920 NR Description: rab28 protein - maize
MQSAATANERMGAVGHDQATDATAVQGVTVSETRVPGGGRIVTEFVAGQAVGQYLARDDDGGGGIAGPGAGAGVAGKDITKVTIGEALEATALAAGDAPVERSDAAAIQAAEARATGLDANVPGGLAAQAQSAAAANSWAWGDEDKATLGDVLAVRVTNTTCHRFRFVPLLLYI

SEQ ID NO: 111826 - DNA, 851 bp, Zea mays subsp. mays
  misc_feature (1)..(851): Ceres Seq. ID no. 14305917
gcacaacgcttaggacttccttttgcttcttacatttgattttctaatgcccaggcagcaccgccagcgacagccgccgagtgtccggcccaacggctgctccctcgtctgctatggcatcgtcgtggccaccgcgtcgctgctcctgctcgccatactcgctgccacagtcagcatcgtcaaggcgtgcgccctcgccggcgctgtcgcggtggtgttcagcgctgcgggctatgtctctcggtggtgcgcagcagaggacggcgctgctcatgcgctggcgctgcccacgacgatggcgacgccagccgcgcgcggccgcgcggtgtgtggcctcgttgacgcggcgatcgacgcgctgccggcgttcgcgtacgcgcgccctgccacgtgtggcgcagaaagtagcagcaagtccggaagactcgcactctgcccggtatgcctggaggaggtcgaggccggcgagatggtccggcagctgcctgcgtgcggccacctgttccacgtggagtgcatcgacatgtggctgcactcgcatgcgtcgtgccctctgtgccgatgcgacgtctcgccgcaggcagttgctatgacggtcacggaagctgcagatccaccgcatggtgcgctgccggtgatggtgagctgctgagatcatactcacggccgggagtgcgactaaggtcgtcgatttttgctcatgtcctactatgagcccttggcttcacccaaaaatggagagattggatagctactaagctattatccttcgttcatcttctaaaattattattaatagtcagcaaaccaaaaccatcaagcacatgagagtggtgcgtcagagagatccg

SEQ ID NO: 111827 - protein, 201 aa, Zea mays subsp. mays
  misc_feature (1)..(201): Ceres Seq. ID no. 14305918
  misc_feature (130)..(171): Pfam Name: Zinc finger, C3HC4 type (RING finger) Pfam Description: Zinc finger, C3HC4 type (RING finger)
  misc_feature (96)..(179): Homolog of NCBI NO: 7487705 NR Description: hypothetical protein T5J17.240 - Arabidopsis
  misc_feature (25)..(186): Homolog of NCBI NO: 27261477 NR Description: Hypothetical protein [Oryza sativa (japonica
  misc_feature (38)..(178): Homolog of NCBI NO: 28558782 NR Description: RING/C3HC4/PHD zinc finger-like protein [Cucumis
  misc_feature (96)..(191): Homolog of NCBI NO: 30017522 NR Description: putative ring-H2 zinc finger protein
  misc_feature (10)..(172): Homolog of NCBI NO: 37536508 NR Description: putative ring finger protein
  misc_feature (54)..(188): Homolog of NCBI NO: 34907968 NR Description: P0446G04.15 [Oryza sativa (japonica
  misc_feature (96)..(188): Homolog of NCBI NO: 34903920 NR Description: OSJNBa0038J17.5 [Oryza sativa (japonica
  misc_feature (19)..(181): Homolog of NCBI NO: 40539017 NR Description: putative RING-H2 zinc finger protein
  misc_feature (28)..(194): Homolog of NCBI NO: 8698835 NR Description: RING finger 1 [Oryza sativa (japonica
  misc_feature (96)..(177): Homolog of NCBI NO: 34903930 NR Description: OSJNBa0038J17.10 [Oryza sativa (japonica
MPRQHRQRQPPSVRPNGCSLVCYGIVVATASLLLLAILAATVSIVKACALAGAVAVVFSAAGYVSRWCAAEDGAAHALALPTTMATPAARGRAVCGLVDAAIDALPAFAYARPATCGAESSSKSGRLALCPVCLEEVEAGEMVRQLPACGHLFHVECIDMWLHSHASCPLCRCDVSPQAVAMTVTEAADPPHGALPVMVSC

SEQ ID NO: 111828 - protein, 159 aa, Zea mays subsp. mays
  misc_feature (1)..(159): Ceres Seq. ID no. 14305919
MASSWPPRRCSCSPYSLPQSASSRRAPSPALSRWCSALRAMSLGGAQQRTALLMRWRCPRRWRRQPRAAARCVASLTRRSTRCRRSRTRALPRVAQKVAASPEDSHSARYAWRRSRPARWSGSCLRAATCSTWSASTCGCTRMRRALCADATSRRRQLL

SEQ ID NO: 111829 - protein, 119 aa, Zea mays subsp. mays
  misc_feature (1)..(119): Ceres Seq. ID no. 14305920
MSLGGAQQRTALLMRWRCPRRWRRQPRAAARCVASLTRRSTRCRRSRTRALPRVAQKVAASPEDSHSARYAWRRSRPARWSGSCLRAATCSTWSASTCGCTRMRRALCADATSRRRQLL

SEQ ID NO: 111830 - DNA, 905 bp, Zea mays subsp. mays
  misc_feature (1)..(905): Ceres Seq. ID no. 14312614
atatagggcaccaaccatttcatcctctccgactccgacatcgtccggtccgatacgccacaggatcgaccaccaatgcagactgccgtggcggtgctgttatcaggcgtggtggcgctgttcggagtgacgagcgccgtgctggcgttcatagccgaggcaaagaggctcacagcggatgaaatccgcgtgtcaggtcgcgagtgcgtgtacccggccaacgccgctcacacgctggggatatgcgccatcttcctgcttgccgcggcccagatcatcgcctcggtggccggtggctgctgcggctgctgcaggccaccgggcggcggcggtccttctcccagtcccagctccactaggcgacgcgtcgtgggagtcatcgcctctgtcctctcatgggtagcggcggcgattgctgtggtctacgactgggtgggcgcggcgctgaacgcgcccgtgacgcgcgaagccaggctcgcgggctccgacgaggagtgctacctactcaggggcggcatcttcgtcagggcggccgtgctcagcctcgtcgccacctcgcttgggatcatgtcctgcatcttgctccgcctgccgccgccggctacgcacgcgccggaacaaggccaccgcgcggtcgggctgccgcagtggcccgcgcaagagacgtacccgtaccccgcgcacgggtacgcccacgcatcggaccccaagttcgctcctcctgctcctcacggtcaggcgaacgagcaagtgtacgtgtagtgcgtagatgacgtgatgagtagtgatggtgtgatctccgtattattttttccttttgttttgtacgtaggtaatatgtgcgtcgtgattactagtgatggtgtgctctctgtattaattttttcttttattgttagtttgcc

SEQ ID NO: 111831 - protein, 228 aa, Zea mays subsp. mays
  misc_feature (1)..(228): Ceres Seq. ID no. 14312615
  misc_feature (1)..(148): Homolog of NCBI NO: 34393261 NR Description: unknown protein [Oryza sativa (japonica
  misc_feature (43)..(203): Homolog of NCBI NO: 10177066 NR Description: dbj|BAA92731.1~gene_id:MKP11.6~similar to unknown
  misc_feature (7)..(203): Homolog of NCBI NO: 34897938 NR Description: ESTs AU082454(S3638),D41267(S3638) correspond to region of the predicted gene.~Similar to Arabidopsis thaliana DNA
  misc_feature (7)..(203): Homolog of NCBI NO: 18418215 NR Description: expressed protein [Arabidopsis thaliana]
MQTAVAVLLSGVVALFGVTSAVLAFIAEAKRLTADEIRVSGRECVYPANAAHTLGICAIFLLAAAQIIASVAGGCCGCCRPPGGGGPSPSPSSTRRRVVGVIASVLSWVAAAIAVVYDWVGAALNAPVTREARLAGSDEECYLLRGGIFVRAAVLSLVATSLGIMSCILLRLPPPATHAPEQGHRAVGLPQWPAQETYPYPAHGYAHASDPKFAPPAPHGQANEQVYV

SEQ ID NO: 111832 - protein, 125 aa, Zea mays subsp. mays
  misc_feature (1)..(125): Ceres Seq. ID no. 14312616
  misc_feature (1)..(51): Pfam Name: Aminotransferase class-III Pfam Description: Aminotransferase class-III
MGSGGDCCGLRLGGRGAERARDARSQARGLRRGVLPTQGRHLRQGGRAQPRRHLAWDHVLHLAPPAAAGYARAGTRPPRGRAAAVARARDVPVPRARVRPRIGPQVRSSCSSRSGERASVRVVRR

SEQ ID NO: 111833 - DNA, 980 bp, Zea mays subsp. mays
  misc_feature (1)..(980): Ceres Seq. ID no. 12638136
atcagtagtagtcatcactgagtagactgcagagcaggaggagatgttcacttacgtgctcgcggccgccgccgtgcttatcgtgttcctctacgccgtcgaagcagcaacagcaagctccctccgtcgcccccgtcgctgccgctgatcggccacctccaacgcggtggtcactcgcgcggccaccaggggccgccggggcaacagcaggatgtgctgccggacgcggcgctgatggtgggcttccaaccgcaggatgtgctgccggacgcgccagcgaggtttgtgagatgggcgacgggccttgataagaagctcgccgacatggccgaggcgtgggacaggttgctgtccgagatggtggccgcgcacaaggaggggaccgggcggccggccacgcaggggaggaggatgaggacttcttggacgtgctgctgcggcttagggaagatggcgcggatgggctcgagctcacagacgaccgcatcaaaggcatcctcgaggacatgataggcggtgggactgaaacaaccatccaaacgctggaatgggccatggctgcatggcagagctcatagccaacccgtgggtgatggccaagctcaaggacgagatcgcgcgagtggtcgccgccgatcagcctaccatctcggagtcggatctcggcagaatggaatacctaaaagcagagcaagatgttcaaaaaaattatgaacttctgttacctctttagatgcggctacaagagctagctataattgatgagcaaagcagtgaacacaatatgcataagggcactcttctgcaaactttgcctgaagtccatttcactctccacgcatattactagcaccatcatatccttgtctacgaatattttgaacatctaatttatgatgtgacaaaacaaagtccaactcctttttaagagtggtagatgatgtatcatgaacatgaataagatcaagaaagcgctctcg

SEQ ID NO: 111834 - protein, 91 aa, Zea mays subsp. mays
  misc_feature (1)..(91): Ceres Seq. ID no. 12638137
  misc_feature (1)..(13): Homolog of NCBI NO: 25282608 NR Description: cytochrome P-450LXXIA1 [similarity] - avocado
  misc_feature (1)..(13): Homolog of NCBI NO: 117188 NR Description: CYTOCHROME P450 71A1 (CYPLXXIA1) (ARP-2)
MVGFQPQDVLPDAPARFVRWATGLDKKLADMAEAWDRLLSEMVAAHKEGTGRPATQGRRMRTSWTCCCGLGKMARMGSSSQTTASKASSRT

SEQ ID NO: 111835 - protein, 61 aa, Zea mays subsp. mays
  misc_feature (1)..(61): Ceres Seq. ID no. 12638138
MAEAWDRLLSEMVAAHKEGTGRPATQGRRMRTSWTCCCGLGKMARMGSSSQTTASKASSRT

SEQ ID NO: 111836 - protein, 61 aa, Zea mays subsp. mays
  misc_feature (1)..(61): Ceres Seq. ID no. 12638139
  misc_feature (6)..(47): Homolog of NCBI NO: 19909894 NR Description: P450 [Triticum aestivum]
  misc_feature (6)..(61): Homolog of NCBI NO: 30684709 NR Description: cytochrome p450 71A12 [Arabidopsis thaliana]
  misc_feature (6)..(61): Homolog of NCBI NO: 13878362 NR Description: Cytochrome P450 71A12
  misc_feature (6)..(61): Homolog of NCBI NO: 26452759 NR Description: putative cytochrome P450 [Arabidopsis thaliana]
  misc_feature (6)..(47): Homolog of NCBI NO: 19909892 NR Description: P450 [Triticum aestivum]
MGHGCMAELIANPWVMAKLKDEIARVVAADQPTISESDLGRMEYLKAEQDVQKNYELLLPL

SEQ ID NO: 111837 - DNA, 898 bp, Zea mays subsp. mays
  misc_feature (1)..(898): Ceres Seq. ID no. 13599083
aaaagtagggctagaaaagctatatatacctggcgtgaaatctcactccagtcctctctcgatctaccttgatctttgatttcatttgtttctcaattctttgttaatttatatggctaatcgtacagtgttttgcaggtgagtgtcccggggaacagcatgctcagcatggtgacagttcggtgtgggcactgcacaaatctactgtcagtgaatctgagagcactcatgcactcagtcccagaacaagatcagctccagcaggagaacatcagggtccatggcacgttgcgtgagcatcatcagtgcggcggcggccaccatctggagctgggctcttcgtcgtcctcaaggttccggctgccgatgatgatgtcgtacgcgccgcagaacgagcacttgctgcaggaacagacactgaacaacgctcgtccggctcctgagaagaggcagcgggttccgtcggcgtataacagattcatcaaggaagagattcgcaggatcaaggcgaacaaccccgacattagccacagggaagccttcagcacagcagccaagaactgggcacattatccgaacatccatttcgacttaaactccggccgagagggtggcaagaataagctcgtggacgaggctgtcgcggcggtggcggtggctccgaagaagatccaaggtttctactgatcgatgccggtcgatcgagggatcagcgctcgtcgtcatcaactggccggccgggtgtggaagaattaataataccacacaaattataaatgtactgtgatgagtaaattaaagagttatagtggggaatgaagggagagagagatatatagcaatacgtatattaccttaccttattaatgagtgcaaaaaaacacttgtgaaggtttct

SEQ ID NO: 111838 - protein, 175 aa, Zea mays subsp. mays
  misc_feature (1)..(175): Ceres Seq. ID no. 13599084
  misc_feature (1)..(145): Pfam Name: YABBY protein Pfam Description: YABBY protein
  misc_feature (1)..(145): Homolog of NCBI NO: 27804377 NR Description: MADS-box transcription factor CDM51
  misc_feature (1)..(175): Homolog of NCBI NO: 18406725 NR Description: abnormal floral organs protein (AFO) (FIL) YABBY1
  misc_feature (1)..(24): Homolog of NCBI NO: 37535908 NR Description: hypothetical protein [Oryza sativa (japonica
  misc_feature (11)..(153): Homolog of NCBI NO: 37535908 NR Description: hypothetical protein [Oryza sativa (japonica
  misc_feature (1)..(175): Homolog of NCBI NO: 4928751 NR Description: YABBY2 [Arabidopsis thaliana]
  misc_feature (91)..(151): Homolog of NCBI NO: 37551421 NR Description: FIL-like protein [Triticum aestivum]
  misc_feature (1)..(93): Homolog of NCBI NO: 37551421 NR Description: FIL-like protein [Triticum aestivum]
  misc_feature (1)..(48): Homolog of NCBI NO: 30683176 NR Description: expressed protein [Arabidopsis thaliana]
  misc_feature (57)..(145): Homolog of NCBI NO: 30683176 NR Description: expressed protein [Arabidopsis thaliana]
  misc_feature (1)..(175): Homolog of NCBI NO: 11280864 NR Description: hypothetical protein 2 [imported] - rice
MLSMVTVRCGHCTNLLSVNLRALMHSVPEQDQLQQENIRVHGTLREHHQCGGGHHLELGSSSSSRFRLPMMMSYAPQNEHLLQEQTLNNARPAPEKRQRVPSAYNRFIKEEIRRIKANNPDISHREAFSTAAKNWAHYPNIHFDLNSGREGGKNKLVDEAVAAVAVAPKKIQGFY

SEQ ID NO: 111839 - protein, 172 aa, Zea mays subsp. mays
  misc_feature (1)..(172): Ceres Seq. ID no. 13599085
  misc_feature (1)..(142): Pfam Name: YABBY protein Pfam Description: YABBY protein
  misc_feature (1)..(142): Homolog of NCBI NO: 27804377 NR Description: MADS-box transcription factor CDM51
  misc_feature (1)..(172): Homolog of NCBI NO: 18406725 NR Description: abnormal floral organs protein (AFO) (FIL) YABBY1
  misc_feature (1)..(21): Homolog of NCBI NO: 37535908 NR Description: hypothetical protein [Oryza sativa (japonica
  misc_feature (8)..(150): Homolog of NCBI NO: 37535908 NR Description: hypothetical protein [Oryza sativa (japonica
  misc_feature (1)..(172): Homolog of NCBI NO: 4928751 NR Description: YABBY2 [Arabidopsis thaliana]
  misc_feature (88)..(148): Homolog of NCBI NO: 37551421 NR Description: FIL-like protein [Triticum aestivum]
  misc_feature (1)..(90): Homolog of NCBI NO: 37551421 NR Description: FIL-like protein [Triticum aestivum]
  misc_feature (1)..(45): Homolog of NCBI NO: 30683176 NR Description: expressed protein [Arabidopsis thaliana]
  misc_feature (54)..(142): Homolog of NCBI NO: 30683176 NR Description: expressed protein [Arabidopsis thaliana]
  misc_feature (1)..(172): Homolog of NCBI NO: 11280864 NR Description: hypothetical protein 2 [imported] - rice
MVTVRCGHCTNLLSVNLRALMHSVPEQDQLQQENIRVHGTLREHHQCGGGHHLELGSSSSSRFRLPMMMSYAPQNEHLLQEQTLNNARPAPEKRQRVPSAYNRFIKEEIRRIKANNPDISHREAFSTAAKNWAHYPNIHFDLNSGREGGKNKLVDEAVAAVAVAPKKIQGFY

SEQ ID NO: 111840 - protein, 152 aa, Zea mays subsp. mays
  misc_feature (1)..(152): Ceres Seq. ID no. 13599086
  misc_feature (1)..(122): Pfam Name: YABBY protein Pfam Description: YABBY protein
  misc_feature (1)..(152): Homolog of NCBI NO: 4928751 NR Description: YABBY2 [Arabidopsis thaliana]
  misc_feature (68)..(128): Homolog of NCBI NO: 37551421 NR Description: FIL-like protein [Triticum aestivum]
  misc_feature (1)..(70): Homolog of NCBI NO: 37551421 NR Description: FIL-like protein [Triticum aestivum]
  misc_feature (60)..(122): Homolog of NCBI NO: 38605890 NR Description: OSJNBb0020O11.2 [Oryza sativa (japonica
  misc_feature (1)..(152): Homolog of NCBI NO: 18406725 NR Description: abnormal floral organs protein (AFO) (FIL) YABBY1
  misc_feature (1)..(130): Homolog of NCBI NO: 37535908 NR Description: hypothetical protein [Oryza sativa (japonica
  misc_feature (1)..(122): Homolog of NCBI NO: 27804377 NR Description: MADS-box transcription factor CDM51
  misc_feature (1)..(25): Homolog of NCBI NO: 30683176 NR Description: expressed protein [Arabidopsis thaliana]
  misc_feature (34)..(122): Homolog of NCBI NO: 30683176 NR Description: expressed protein [Arabidopsis thaliana]
  misc_feature (1)..(152): Homolog of NCBI NO: 11280864 NR Description: hypothetical protein 2 [imported] - rice
MHSVPEQDQLQQENIRVHGTLREHHQCGGGHHLELGSSSSSRFRLPMMMSYAPQNEHLLQEQTLNNARPAPEKRQRVPSAYNRFIKEEIRRIKANNPDISHREAFSTAAKNWAHYPNIHFDLNSGREGGKNKLVDEAVAAVAVAPKKIQGFY

SEQ ID NO: 111841 - DNA, 2352 bp, Zea mays subsp. mays
  misc_feature (1)..(2352): Ceres Seq. ID no. 13599132
  misc_feature: MA Experiment ID: 20000535 Result: Up-regulated in Transcription
  misc_feature: MA Experiment 20000535 PARAMETER Experiment Name: Zm_Hybrid_Seed_Dev_P Parameter: DAP Value: 30 vs. 12
  misc_feature: MA Experiment 20000535 PARAMETER Experiment Name: Zm_Hybrid_Seed_Dev_P Parameter: Organism Value: Zea mays
  misc_feature: MA Experiment 20000535 PARAMETER Experiment Name: Zm_Hybrid_Seed_Dev_P Parameter: Plant Line Value: 35A19
  misc_feature: MA Experiment 20000535 PARAMETER Experiment Name: Zm_Hybrid_Seed_Dev_P Parameter: Tissue Value: Embryo vs. Unfert Floret
gacacgcctcgcctccatcttctctgccgtgcgcagccccacctcagccccgccccacactctccgccgcgctctcccaagcttcagctaccggcgagcgcatccatctcagccccgcatgtcctcctcttcagccgcctcctccgcgccgccggccgccgagaagcctacagtggcgccgttcgggtcctggaggtcgcccatcactgcggacgtcgtatctggcgcggataggcgcctcggcggtatcgctctcgctggagatggacgccttctctggatcgagggccgccccgaggagaaagggcgtatggttattgtaaaggaggaggataatcctgtggatgtcatacctcaggaatttgcagcacgcacactggctcaagaatatggaggtggtgcatttgcagtcgacaagagtgttgttgtgttctcaaattacaaggatcaacgtctatacaagcaaacaataggaactggtggtccacctgtgcctcttacacccgattatggtgcgccaaatgtcagttatgctgatggtgtatttgatcctcacttcgaccgttatgttactgtgatggaagatcgtcgaaaggatagcttgaatcccaccacaacaattgctgctataaacttgagtggcagtgatgttcatgaaccaaaggtgctgatcagcggcaacgatttctatgcatttcctcgcattgatcaaaataaaaagcggatagcatggattgaatggagccatccaaacatgccctgggataaatcagaactctgggttggttacttcgccgaaagcggagacttgaccaaacgggtctgtattgccggtggcaatcggctgctgattgaatctcctagtgaacctaaatggtcaccgaaaggagaactgttttttgttactgacagagggagtggattttggaatatttataaatgggttgaacaaaccaatgaaattgttccagtgtattcactagatgctgaatttacgagaccattgtgggtttttggcatcagctcgtatgattttcttggaaacagcgaccacattgttttcagttatagacagcaaggaaagtcacatcttggtgtgcttgattgtgattcaggttctatttcattgcttgacatccctttctctgatttatctgatgtggttgctgcagatgattacttctatattgaaggtgcttccgcgagtattccacggtcgattgctaaggtgacattaaatgaaagcaaaaccaaagtagtcaatttctcaatagcctggtcgtcctcaccagacctcgtacaatatagacctttcttcagcacaccagaacttgttgagttccctacatccaagtctggccagaaagcttatgcctatttctacccaccatcaaatcccaattttcaaggtttgcctgatgaaaagcctcctttgcttgtcaaaacacatggaggaccaactgctgaaacacgtgcaattctggacctcagtgtccagtattggacaagtagagggtgggcatatgtcgatgtcaactatggaggaagcactggttatggaagagagtatcgggagagactattgaacaaatggggtattgttgatgttgatgattgctgcggctgtgcgagattcctggtggagagtgggaaagtagatgggcagcgcctttgtattactggtagatcagcaggtggatacactactttagcttcacttgcattcagagacacgttcaaggctggagcttctctctatggtgttggggacttgactctgttgagagcggagacgcacaaatttgagtctcattatatggacaatcttgtaggaaatgaaagagcttactacgagagatcaccaatcaactttgtcaaccagtttacttgtccagtcattttgtttcaagggttggaggataaggttgtgccaccagatcaggcacgcaaaatatacagtgccttgaaagagaaaggtttgcctgttgctttggttgaatatgaaggagagcagcatgggttccgtaaggcggagaacatcaagttcaccttggagcagcagatgttgttctttgcaagattagttgggaagtttgaggtggcagacgatataactccaatcaagattgagaacttcgattgatctcttggagagtggtgtccggttcgaagttttgttcacgtaacccgattatatgttcagtacattagccgttgcagtaccttttaggaatacgacttcatcttatttttgagggttgatggaaatctcttttttgcgctgtaacgatgaagtcaccttgttttctgttcggttctagaatgaaatagaacggaatgacactatcctct

SEQ ID NO: 111842 - protein, 713 aa, Zea mays subsp. mays
  misc_feature (1)..(713): Ceres Seq. ID no. 15222521
  misc_feature (504)..(568): Pfam Name: Prolyl oligopeptidase family Pfam Description: Prolyl oligopeptidase family
  misc_feature (388)..(696): Homolog of NCBI NO: 23062020 NR Description: hypothetical protein [Pseudomonas fluorescens
  misc_feature (221)..(706): Homolog of NCBI NO: 29654820 NR Description: prolyl oligopeptidase family protein [Coxiella
  misc_feature (223)..(696): Homolog of NCBI NO: 22972830 NR Description: hypothetical protein [Chloroflexus aurantiacus]
  misc_feature (58)..(710): Homolog of NCBI NO: 23019244 NR Description: hypothetical protein [Thermobifida fusca]
  misc_feature (53)..(691): Homolog of NCBI NO: 23029170 NR Description: hypothetical protein [Microbulbifer degradans
  misc_feature (173)..(696): Homolog of NCBI NO: 16331709 NR Description: hypothetical protein [Synechocystis sp. PCC 6803]
  misc_feature (160)..(711): Homolog of NCBI NO: 23043087 NR Description: hypothetical protein [Trichodesmium erythraeum
  misc_feature (59)..(287): Homolog of NCBI NO: 37521039 NR Description: probable peptidase [Gloeobacter violaceus]
  misc_feature (222)..(711): Homolog of NCBI NO: 37521039 NR Description: probable peptidase [Gloeobacter violaceus]
  misc_feature (46)..(713): Homolog of NCBI NO: 15239342 NR Description: acyl-peptide hydrolase-related [Arabidopsis
TRLASIFSAVRSPTSAPPHTLRRALPSFSYRRAHPSQPRMSSSSAASSAPPAAEKPTVAPFGSWRSPITADVVSGADRRLGGIALAGDGRLLWIEGRPEEKGRMVIVKEEDNPVDVIPQEFAARTLAQEYGGGAFAVDKSVVVFSNYKDQRLYKQTIGTGGPPVPLTPDYGAPNVSYADGVFDPHFDRYVTVMEDRRKDSLNPTTTIAAINLSGSDVHEPKVLISGNDFYAFPRIDQNKKRIAWIEWSHPNMPWDKSELWVGYFAESGDLTKRVCIAGGNRLLIESPSEPKWSPKGELFFVTDRGSGFWNIYKWVEQTNEIVPVYSLDAEFTRPLWVFGISSYDFLGNSDHIVFSYRQQGKSHLGVLDCDSGSISLLDIPFSDLSDVVAADDYFYIEGASASIPRSIAKVTLNESKTKVVNFSIAWSSSPDLVQYRPFFSTPELVEFPTSKSGQKAYAYFYPPSNPNFQGLPDEKPPLLVKTHGGPTAETRAILDLSVQYWTSRGWAYVDVNYGGSTGYGREYRERLLNKWGIVDVDDCCGCARFLVESGKVDGQRLCITGRSAGGYTTLASLAFRDTFKAGASLYGVGDLTLLRAETHKFESHYMDNLVGNERAYYERSPINFVNQFTCPVILFQGLEDKVVPPDQARKIYSALKEKGLPVALVEYEGEQHGFRKAENIKFTLEQQMLFFARLVGKFEVADDITPIKIENFD

SEQ ID NO: 111843 - protein, 674 aa, Zea mays subsp. mays
  misc_feature (1)..(674): Ceres Seq. ID no. 15222522
  misc_feature (465)..(529): Pfam Name: Prolyl oligopeptidase family Pfam Description: Prolyl oligopeptidase family
  misc_feature (349)..(657): Homolog of NCBI NO: 23062020 NR Description: hypothetical protein [Pseudomonas fluorescens
  misc_feature (182)..(667): Homolog of NCBI NO: 29654820 NR Description: prolyl oligopeptidase family protein [Coxiella
  misc_feature (184)..(657): Homolog of NCBI NO: 22972830 NR Description: hypothetical protein [Chloroflexus aurantiacus]
  misc_feature (19)..(671): Homolog of NCBI NO: 23019244 NR Description: hypothetical protein [Thermobifida fusca]
  misc_feature (14)..(652): Homolog of NCBI NO: 23029170 NR Description: hypothetical protein [Microbulbifer degradans
  misc_feature (134)..(657): Homolog of NCBI NO: 16331709 NR Description: hypothetical protein [Synechocystis sp. PCC 6803]
  misc_feature (121)..(672): Homolog of NCBI NO: 23043087 NR Description: hypothetical protein [Trichodesmium erythraeum
  misc_feature (20)..(248): Homolog of NCBI NO: 37521039 NR Description: probable peptidase [Gloeobacter violaceus]
  misc_feature (183)..(672): Homolog of NCBI NO: 37521039 NR Description: probable peptidase [Gloeobacter violaceus]
  misc_feature (7)..(674): Homolog of NCBI NO: 15239342 NR Description: acyl-peptide hydrolase-related [Arabidopsis
MSSSSAASSAPPAAEKPTVAPFGSWRSPITADVVSGADRRLGGIALAGDGRLLWIEGRPEEKGRMVIVKEEDNPVDVIPQEFAARTLAQEYGGGAFAVDKSVVVFSNYKDQRLYKQTIGTGGPPVPLTPDYGAPNVSYADGVFDPHFDRYVTVMEDRRKDSLNPTTTIAAINLSGSDVHEPKVLISGNDFYAFPRIDQNKKRIAWIEWSHPNMPWDKSELWVGYFAESGDLTKRVCIAGGNRLLIESPSEPKWSPKGELFFVTDRGSGFWNIYKWVEQTNEIVPVYSLDAEFTRPLWVFGISSYDFLGNSDHIVFSYRQQGKSHLGVLDCDSGSISLLDIPFSDLSDVVAADDYFYIEGASASIPRSIAKVTLNESKTKVVNFSIAWSSSPDLVQYRPFFSTPELVEFPTSKSGQKAYAYFYPPSNPNFQGLPDEKPPLLVKTHGGPTAETRAILDLSVQYWTSRGWAYVDVNYGGSTGYGREYRERLLNKWGIVDVDDCCGCARFLVESGKVDGQRLCITGRSAGGYTTLASLAFRDTFKAGASLYGVGDLTLLRAETHKFESHYMDNLVGNERAYYERSPINFVNQFTCPVILFQGLEDKVVPPDQARKIYSALKEKGLPVALVEYEGEQHGFRKAENIKFTLEQQMLFFARLVGKFEVADDITPIKIENFD

SEQ ID NO: 111844 - protein, 610 aa, Zea mays subsp. mays
  misc_feature (1)..(610): Ceres Seq. ID no. 15222523
  misc_feature (401)..(465): Pfam Name: Prolyl oligopeptidase family Pfam Description: Prolyl oligopeptidase family
  misc_feature (285)..(593): Homolog of NCBI NO: 23062020 NR Description: hypothetical protein [Pseudomonas fluorescens
  misc_feature (118)..(603): Homolog of NCBI NO: 29654820 NR Description: prolyl oligopeptidase family protein [Coxiella
  misc_feature (120)..(593): Homolog of NCBI NO: 22972830 NR Description: hypothetical protein [Chloroflexus aurantiacus]
  misc_feature (1)..(607): Homolog of NCBI NO: 23019244 NR Description: hypothetical protein [Thermobifida fusca]
  misc_feature (1)..(588): Homolog of NCBI NO: 23029170 NR Description: hypothetical protein [Microbulbifer degradans
  misc_feature (70)..(593): Homolog of NCBI NO: 16331709 NR Description: hypothetical protein [Synechocystis sp. PCC 6803]
  misc_feature (57)..(608): Homolog of NCBI NO: 23043087 NR Description: hypothetical protein [Trichodesmium erythraeum
  misc_feature (1)..(184): Homolog of NCBI NO: 37521039 NR Description: probable peptidase [Gloeobacter violaceus]
  misc_feature (119)..(608): Homolog of NCBI NO: 37521039 NR Description: probable peptidase [Gloeobacter violaceus]
  misc_feature (1)..(610): Homolog of NCBI NO: 15239342 NR Description: acyl-peptide hydrolase-related [Arabidopsis
MVIVKEEDNPVDVIPQEFAARTLAQEYGGGAFAVDKSVVVFSNYKDQRLYKQTIGTGGPPVPLTPDYGAPNVSYADGVFDPHFDRYVTVMEDRRKDSLNPTTTIAAINLSGSDVHEPKVLISGNDFYAFPRIDQNKKRIAWIEWSHPNMPWDKSELWVGYFAESGDLTKRVCIAGGNRLLIESPSEPKWSPKGELFFVTDRGSGFWNIYKWVEQTNEIVPVYSLDAEFTRPLWVFGISSYDFLGNSDHIVFSYRQQGKSHLGVLDCDSGSISLLDIPFSDLSDVVAADDYFYIEGASASIPRSIAKVTLNESKTKVVNFSIAWSSSPDLVQYRPFFSTPELVEFPTSKSGQKAYAYFYPPSNPNFQGLPDEKPPLLVKTHGGPTAETRAILDLSVQYWTSRGWAYVDVNYGGSTGYGREYRERLLNKWGIVDVDDCCGCARFLVESGKVDGQRLCITGRSAGGYTTLASLAFRDTFKAGASLYGVGDLTLLRAETHKFESHYMDNLVGNERAYYERSPINFVNQFTCPVILFQGLEDKVVPPDQARKIYSALKEKGLPVALVEYEGEQHGFRKAENIKFTLEQQMLFFARLVGKFEVADDITPIKIENFD

SEQ ID NO: 111845 - DNA, 1024 bp, Zea mays subsp. mays
  misc_feature (1)..(1024): Ceres Seq. ID no. 13599133
ttttttccccgattctctaatcgcccgcccccacctagtattctggaattgcggacacaaggagatgctgtccgtgcaggaagcccttgagcttgcgtcgtccagctgcggcacgacgatggacgttaccacgtgcgggttcacgccgtgggggcccgagtcgtgccctggcctggagcaggtgatggcgtcgacgccggccgcggcagcgaggcacccggaccccgaggaggaggagaggcgccggcggcagcgccgcaagctgtcgaaccggctgtcggcgcgccggtcgcgagcgcggaagcagcagcggctggaggagctccgcgcggaggcggcgcggctccgcggccagaagcgggagctggaggccaggctgcaggccctggcgcggcacggcctcgccgtgcgctgccagaacgcgcggctccgcgccgaggccgccgcgctcgcgcgcaggctcctcgcgatcgcgtcgtacgcccagcagccgcagcataaggccggagtcgcgcccgcgccggcggcggcgctgctggggctggcgtcgctgacgacgtaggcggctggcgagagggacgttcttctgcccggtggaacgaagtctcgcgcccactcgcagttgcagtctcgcgctctcgcatgctatggtgaactggaaacatgcatgggctgagggcagttgggcacacacaccgaggcttgctagtacggtgcatgcagcggtcagccggtagcactatactattagtccctgtttgggaacaaagtttttgaaaactacagtttttgaaatattatactatactttagttatgacaataccgtagtttataataccgcagttttgaaaactgaggtccagagctaagtttagaatgccttaaaacaactatagtatttgcaatacttcagttttgaaaacagagattttacccagcttgccaaacaccattatgtatataatactgcagtatttgagaatactgcagtattcttccaaaactgcagaaaaactttgttc

SEQ ID NO: 111846 - protein, 186 aa, Zea mays subsp. mays
  misc_feature (1)..(186): Ceres Seq. ID no. 13599134
  misc_feature (78)..(142): Pfam Name: bZIP transcription factor Pfam Description: bZIP transcription factor
  misc_feature (62)..(162): Homolog of NCBI NO: 7489118 NR Description: DNA-binding protein tbz17 - common tobacco
  misc_feature (82)..(171): Homolog of NCBI NO: 40019253 NR Description: ocs-element binding factor 1 [Secale cereale]
  misc_feature (79)..(171): Homolog of NCBI NO: 1352613 NR Description: OCS-element binding factor 1 (OCSBF-1)
  misc_feature (82)..(174): Homolog of NCBI NO: 14289165 NR Description: glip19 [Oryza sativa]
  misc_feature (82)..(174): Homolog of NCBI NO: 479696 NR Description: oxidase lip19 - rice
  misc_feature (73)..(171): Homolog of NCBI NO: 2130123 NR Description: DNA-binding factor LIP 15 - maize
  misc_feature (52)..(177): Homolog of NCBI NO: 34913702 NR Description: OSJNBa0062A24.22 [Oryza sativa (japonica
  misc_feature (68)..(177): Homolog of NCBI NO: 12039274 NR Description: hypothetical protein [Oryza sativa]
  misc_feature (77)..(154): Homolog of NCBI NO: 33146418 NR Description: hypothetical protein [Oryza sativa (japonica
  misc_feature (46)..(174): Homolog of NCBI NO: 40539061 NR Description: putative transcription factor
FFPDSLIARPHLVFWNCGHKEMLSVQEALELASSSCGTTMDVTTCGFTPWGPESCPGLEQVMASTPAAAARHPDPEEEERRRRQRRKLSNRLSARRSRARKQQRLEELRAEAARLRGQKRELEARLQALARHGLAVRCQNARLRAEAAALARRLLAIASYAQQPQHKAGVAPAPAAALLGLASLTT

SEQ ID NO: 111847 - protein, 165 aa, Zea mays subsp. mays
  misc_feature (1)..(165): Ceres Seq. ID no. 13599135
  misc_feature (57)..(121): Pfam Name: bZIP transcription factor Pfam Description: bZIP transcription factor
  misc_feature (41)..(141): Homolog of NCBI NO: 7489118 NR Description: DNA-binding protein tbz17 - common tobacco
  misc_feature (61)..(150): Homolog of NCBI NO: 40019253 NR Description: ocs-element binding factor 1 [Secale cereale]
  misc_feature (58)..(150): Homolog of NCBI NO: 1352613 NR Description: OCS-element binding factor 1 (OCSBF-1)
  misc_feature (61)..(153): Homolog of NCBI NO: 14289165 NR Description: glip19 [Oryza sativa]
  misc_feature (61)..(153): Homolog of NCBI NO: 479696 NR Description: oxidase lip19 - rice
  misc_feature (52)..(150): Homolog of NCBI NO: 2130123 NR Description: DNA-binding factor LIP 15 - maize
  misc_feature (31)..(156): Homolog of NCBI NO: 34913702 NR Description: OSJNBa0062A24.22 [Oryza sativa (japonica
  misc_feature (47)..(156): Homolog of NCBI NO: 12039274 NR Description: hypothetical protein [Oryza sativa]
  misc_feature (56)..(133): Homolog of NCBI NO: 33146418 NR Description: hypothetical protein [Oryza sativa (japonica
  misc_feature (25)..(153): Homolog of NCBI NO: 40539061 NR Description: putative transcription factor
MLSVQEALELASSSCGTTMDVTTCGFTPWGPESCPGLEQVMASTPAAAARHPDPEEEERRRRQRRKLSNRLSARRSRARKQQRLEELRAEAARLRGQKRELEARLQALARHGLAVRCQNARLRAEAAALARRLLAIASYAQQPQHKAGVAPAPAAALLGLASLTT

SEQ ID NO: 111848 - protein, 147 aa, Zea mays subsp. mays
  misc_feature (1)..(147): Ceres Seq. ID no. 13599136
  misc_feature (39)..(103): Pfam Name: bZIP transcription factor Pfam Description: bZIP transcription factor
  misc_feature (23)..(123): Homolog of NCBI NO: 7489118 NR Description: DNA-binding protein tbz17 - common tobacco
  misc_feature (43)..(132): Homolog of NCBI NO: 40019253 NR Description: ocs-element binding factor 1 [Secale cereale]
  misc_feature (40)..(132): Homolog of NCBI NO: 1352613 NR Description: OCS-element binding factor 1 (OCSBF-1)
  misc_feature (43)..(135): Homolog of NCBI NO: 14289165 NR Description: glip19 [Oryza sativa]
  misc_feature (43)..(135): Homolog of NCBI NO: 479696 NR Description: oxidase lip19 - rice
  misc_feature (34)..(132): Homolog of NCBI NO: 2130123 NR Description: DNA-binding factor LIP 15 - maize
  misc_feature (13)..(138): Homolog of NCBI NO: 34913702 NR Description: OSJNBa0062A24.22 [Oryza sativa (japonica
  misc_feature (29)..(138): Homolog of NCBI NO: 12039274 NR Description: hypothetical protein [Oryza sativa]
  misc_feature (38)..(115): Homolog of NCBI NO: 33146418 NR Description: hypothetical protein [Oryza sativa (japonica
  misc_feature (7)..(135): Homolog of NCBI NO: 40539061 NR Description: putative transcription factor
MDVTTCGFTPWGPESCPGLEQVMASTPAAAARHPDPEEEERRRRQRRKLSNRLSARRSRARKQQRLEELRAEAARLRGQKRELEARLQALARHGLAVRCQNARLRAEAAALARRLLAIASYAQQPQHKAGVAPAPAAALLGLASLTT

SEQ ID NO: 111849 - DNA, 838 bp, Zea mays subsp. mays
  misc_feature (1)..(838): Ceres Seq. ID no. 14312640
actacgcggtcttcgctcgctcctcgagttcagtcctcacctccccaccgagctccattaatggcgcctcccctaattttgccataagtgccgagaccacgtggggtctgggaaggaaaggctactgccacttcagaggtcggcctgggaggctgcatcgcatccacatggggtaccagcccatgcacggcaacggcgggacagccggtgccgggacatcaggctccggcggcggcggcggcggagaccacttgcgccaccaccagcagcagcgcctgcacagcccccgcatggccggcggaggctccatgacgcgccgggccagctcgttcaagcgcggcgggggcggcgagatcgagctccagatcggctctccgcgctcgccgaggtgcgacgggttggggagccctccctcggactccgtggagtcgtccggtagcggcctcctcctccaccagagccagcagaaccagcacctccggttccggctcttcaagccgccggtctccggcggcagcgcggtcggacttggtctggggatccgcgagaggaggaagctcgggaacatgctgttcctcgccttgtgcggcgtgtgcttgctcctcggcgtcgtcaagatcttggcgggcggctggttcgccctccctggcaatgacaaagacgccgatttgaaggtaaataattaggatttttatgtgcaatggtagctgttattatttgatacgcctatgttgttcaccctcctgagtcatgatcaacagctcctggagagtcacctaaatgtcttatcccaacttgtcatgatgaataaacatgctctcagcctacttgttcagtt

SEQ ID NO: 111850 - protein, 227 aa, Zea mays subsp. mays
  misc_feature (1)..(227): Ceres Seq. ID no. 14312641
  misc_feature (77)..(225): Homolog of NCBI NO: 10176802 NR Description: axi 1 (auxin-independent growth promoter)-like
  misc_feature (77)..(225): Homolog of NCBI NO: 22327354 NR Description: axi 1 (auxin-independent growth promoter)-related
YAVFARSSSSVLTSPPSSINGASPNFAISAETTWGLGRKGYCHFRGRPGRLHRIHMGYQPMHGNGGTAGAGTSGSGGGGGGDHLRHHQQQRLHSPRMAGGGSMTRRASSFKRGGGGEIELQIGSPRSPRCDGLGSPPSDSVESSGSGLLLHQSQQNQHLRFRLFKPPVSGGSAVGLGLGIRERRKLGNMLFLALCGVCLLLGVVKILAGGWFALPGNDKDADLKVNN

SEQ ID NO: 111851 - protein, 172 aa, Zea mays subsp. mays
  misc_feature (1)..(172): Ceres Seq. ID no. 14312642
  misc_feature (22)..(170): Homolog of NCBI NO: 10176802 NR Description: axi 1 (auxin-independent growth promoter)-like
  misc_feature (22)..(170): Homolog of NCBI NO: 22327354 NR Description: axi 1 (auxin-independent growth promoter)-related
MGYQPMHGNGGTAGAGTSGSGGGGGGDHLRHHQQQRLHSPRMAGGGSMTRRASSFKRGGGGEIELQIGSPRSPRCDGLGSPPSDSVESSGSGLLLHQSQQNQHLRFRLFKPPVSGGSAVGLGLGIRERRKLGNMLFLALCGVCLLLGVVKILAGGWFALPGNDKDADLKVNN

SEQ ID NO: 111852 - protein, 167 aa, Zea mays subsp. mays
  misc_feature (1)..(167): Ceres Seq. ID no. 14312643
  misc_feature (17)..(165): Homolog of NCBI NO: 10176802 NR Description: axi 1 (auxin-independent growth promoter)-like
  misc_feature (17)..(165): Homolog of NCBI NO: 22327354 NR Description: axi 1 (auxin-independent growth promoter)-related
MHGNGGTAGAGTSGSGGGGGGDHLRHHQQQRLHSPRMAGGGSMTRRASSFKRGGGGEIELQIGSPRSPRCDGLGSPPSDSVESSGSGLLLHQSQQNQHLRFRLFKPPVSGGSAVGLGLGIRERRKLGNMLFLALCGVCLLLGVVKILAGGWFALPGNDKDADLKVNN

SEQ ID NO: 111853 - DNA, 966 bp, Zea mays subsp. mays
  misc_feature (1)..(966): Ceres Seq. ID no. 13599097
aaaatcaacgcttccccatcgctcgcgtccccgcatctgccgccatccgcgcgtccccgcatccgccgccatccacgcccacggccccaaacacctcgatccgaacctccctccccacacactcacacgttgctgccggctaccctcctcccaccccactcgtcccctccgaacccaactccgatccatccatccccaagtttctcctctcagcgcgtggggcagtggcggcggcagcatgggcgtgcaggctgctacgggcacaggagcagcgggggctgcacaaccgtgcaggcagctgtcggcatgcggcacagtgactgcgggagcccaggcggcgccggtgcggctgcagccggcggcgggcgaccgtgaggcggctgcgggagtggtgcaagcccggtggcgcatgctttgttttttcttcctgtttttgatttgcgaaagcacttgtgaaggtgtccgacgtgccattagactagcttgtcccaaacgtcaagatttgggctaatgaagtcaggggctgtcctatgatattgaggacagactcgactccttcatggtgcgcatggagggtcttgattcaaccaagcgcaaaaccatcatgggattcattcaacaaactcatggcttggtcaccaagttcaggattcgccatggaatatctgataacattatagacatcgagagcaaagtaaagaaggtgaaggagcggtatggcaggtccaatgtgcatcgtattgtagctagtcttgtcgcaaccacagttgaccctcgtctcttagctatgcataatttgtttgaagatggtgatgagccagcgaaaaagatcaagacagtcttgttgttagatttggaggactcggcaagactactcttgttaaagcagtctatgacaaggttaaggagtttgattgcagtgcttttgtatcaataggtcagaaatgtgatatcaataaagttttc

SEQ ID NO: 111854 - protein, 169 aa, Zea mays subsp. mays
  misc_feature (1)..(169): Ceres Seq. ID no. 13599098
KSTLPHRSRPRICRHPRVPASAAIHAHGPKHLDPNLPPHTLTRCCRLPSSHPTRPLRTQLRSIHPQVSPLSAWGSGGGSMGVQAATGTGAAGAAQPCRQLSACGTVTAGAQAAPVRLQPAAGDREAAAGVVQARWRMLCFFFLFLICESTCEGVRRAIRLACPKRQDLG

SEQ ID NO: 111855 - protein, 125 aa, Zea mays subsp. mays
  misc_feature (1)..(125): Ceres Seq. ID no. 13599099
  misc_feature (1)..(83): Homolog of NCBI NO: 11990500 NR Description: stripe rust resistance protein Yr10 [Triticum
  misc_feature (1)..(83): Homolog of NCBI NO: 11990497 NR Description: stripe rust resistance protein Yr10 [Triticum
  misc_feature (1)..(95): Homolog of NCBI NO: 37573036 NR Description: putative MLA1 [Oryza sativa (japonica
  misc_feature (1)..(77): Homolog of NCBI NO: 21321592 NR Description: NBS-LRR-like [Aegilops tauschii]
  misc_feature (1)..(78): Homolog of NCBI NO: 11612210 NR Description: MLA1 [Hordeum vulgare subsp. vulgare]
  misc_feature (1)..(108): Homolog of NCBI NO: 40253772 NR Description: putative RGH1A [Oryza sativa (japonica
  misc_feature (1)..(76): Homolog of NCBI NO: 22208465 NR Description: putative stripe rust resistance protein Yr10
  misc_feature (1)..(83): Homolog of NCBI NO: 22208466 NR Description: putative Mla1 [Sorghum bicolor]
MVRMEGLDSTKRKTIMGFIQQTHGLVTKFRIRHGISDNIIDIESKVKKVKERYGRSNVHRIVASLVATTVDPRLLAMHNLFEDGDEPAKKIKTVLLLDLEDSARLLLLKQSMTRLRSLIAVLLYQ

SEQ ID NO: 111856 - protein, 124 aa, Zea mays subsp. mays
  misc_feature (1)..(124): Ceres Seq. ID no. 13599100
KINASPSLASPHLPPSARPRIRRHPRPRPQTPRSEPPSPHTHTLLPATLLPPHSSPPNPTPIHPSPSFSSQRVGQWRRQHGRAGCYGHRSSGGCTTVQAAVGMRHSDCGSPGGAGAAAAGGGRP

SEQ ID NO: 111857 - DNA, 1299 bp, Zea mays subsp. mays
  misc_feature (1)..(1299): Ceres Seq. ID no. 13600673
  misc_feature: MA Experiment ID: 108556 Result: Up-regulated in Transcription
  misc_feature: MA Experiment 108556 PARAMETER Experiment Name: Zm_Drought_P Parameter: Age (day) Value: 9
  misc_feature: MA Experiment 108556 PARAMETER Experiment Name: Zm_Drought_P Parameter: Organism Value: Zea mays
  misc_feature: MA Experiment 108556 PARAMETER Experiment Name: Zm_Drought_P Parameter: Plant Line Value: 35A19
  misc_feature: MA Experiment 108556 PARAMETER Experiment Name: Zm_Drought_P Parameter: Timepoint (hr) Value: 24
  misc_feature: MA Experiment 108556 PARAMETER Experiment Name: Zm_Drought_P Parameter: Tissue Value: Aerial
  misc_feature: MA Experiment 108556 PARAMETER Experiment Name: Zm_Drought_P Parameter: Treatment Value: Drought vs. No Drought
  misc_feature: MA Experiment ID: 108597 Result: Up-regulated in Transcription
  misc_feature: MA Experiment 108597 PARAMETER Experiment Name: Zm_100uM_ABA_P Parameter: Age (day) Value: 9
  misc_feature: MA Experiment 108597 PARAMETER Experiment Name: Zm_100uM_ABA_P Parameter: Organism Value: Zea mays
  misc_feature: MA Experiment 108597 PARAMETER Experiment Name: Zm_100uM_ABA_P Parameter: Plant Line Value: 35A19
  misc_feature: MA Experiment 108597 PARAMETER Experiment Name: Zm_100uM_ABA_P Parameter: Timepoint (hr) Value: 24
  misc_feature: MA Experiment 108597 PARAMETER Experiment Name: Zm_100uM_ABA_P Parameter: Tissue Value: Aerial
  misc_feature: MA Experiment 108597 PARAMETER Experiment Name: Zm_100uM_ABA_P Parameter: Treatment Value: 100uM ABA vs. No Treatment
  misc_feature: MA Experiment ID: 108689 Result: Up-regulated in Transcription
  misc_feature: MA Experiment 108689 PARAMETER Experiment Name: Zm_Drought_Roots_P Parameter: Age (day) Value: 9
  misc_feature: MA Experiment 108689 PARAMETER Experiment Name: Zm_Drought_Roots_P Parameter: Organism Value: Zea mays
  misc_feature: MA Experiment 108689 PARAMETER Experiment Name: Zm_Drought_Roots_P Parameter: Plant Line Value: 35A19
  misc_feature: MA Experiment 108689 PARAMETER Experiment Name: Zm_Drought_Roots_P Parameter: Timepoint (hr) Value: 24
  misc_feature: MA Experiment 108689 PARAMETER Experiment Name: Zm_Drought_Roots_P Parameter: Tissue Value: Roots
  misc_feature: MA Experiment 108689 PARAMETER Experiment Name: Zm_Drought_Roots_P Parameter: Treatment Value: Drought vs. No Drought
atctcggggatccggcactcgcctcccttttccctttccgcgccccatcaccattgccacaaatagcaaccaaggcagtaagcctagccaagccaaccgacggcggcgagagtatatatacacacacacctgacgcctctgctgctgctgggatcaacgcggcagcttagtgacgacgacgactcttctgtctctgcgttgattaatggacagtaacagatccatggcgacgagcggcgtggctccgttcgtggccaagacgtaccgcatggtggatgacccggcgaccgacggcgtggtcgcgtggggcagggacaacaacagcttcgtcgtggccgaccccttcgccctctcgcagacgctcctgcccgcgcacttcaagcactccaacttctccagcttcgtgcgccagctcaacacctacggcttccggaaggtcgatccggaccggtgggagttcgcgcacgtgtccttccttcgcggccagacgcatctcctgggccagatcgtccgccggagcagcggcggcaagcgcaaggacgacggcaacggcgccggcgccggctccgccgacgacgaggacgcggtggccatggaggtggtccggctgaggcgggagcagcgggccatcgaggagcaggtggccgcgatgtggcgccgcgtgcaggagacggagcgccggcccaagcagatgctcgcgttcctcgtcaaggtcgcgggcgacccgcaggtgctgcgccgcctcgtctccggcgccgggggcgacgccgtgttcgccgccgcggagccggaggacggcgcgagcatcaagagggcgcggctgcttctcgatgccggaagcggcggcgacggcgccgtckgacttcmrcgggctctatagcacaaccgccggaagcgaagacgacggcgtcgggttcggcagcgattacctgcagccgccaccgccgtacgtgttccccgtcaacagcggcggctactgactgatggcggtctggtagtccagcatctatccgagcgatgtggcgtgcttcgtcgtcgttagttgcccctcccgagtgacgtgttggactgaagtggcaacggcgccgacggacggtgagcaaccaacccaagataattagctaggaggtggtacaaagtgtaaagcctttggtttaggcaggtctgcggtgatctttaatttgcttgttgcaatgttttccttccctaccttgtcaagtgaatgctacggatcagcggcggcaaaagccgttagctgcagctagtttgccgctgctcttcatacagctgcacgccgtt

SEQ ID NO: 111858 - protein, 224 aa, Zea mays subsp. mays
  misc_feature (1)..(224): Ceres Seq. ID no. 15218992
  misc_feature (13)..(181): Pfam Name: HSF-type DNA-binding Pfam Description: HSF-type DNA-binding
  misc_feature (11)..(179): Homolog of NCBI NO: 729774 NR Description: HEAT SHOCK FACTOR PROTEIN HSF30 (HEAT SHOCK
  misc_feature (10)..(182): Homolog of NCBI NO: 28971956 NR Description: putative heat shock transcription factor
  misc_feature (10)..(182): Homolog of NCBI NO: 33087081 NR Description: heat stress protein [Oryza sativa (japonica
  misc_feature (124)..(181): Homolog of NCBI NO: 729775 NR Description: HEAT SHOCK FACTOR PROTEIN HSF8 (HEAT SHOCK
  misc_feature (14)..(104): Homolog of NCBI NO: 729775 NR Description: HEAT SHOCK FACTOR PROTEIN HSF8 (HEAT SHOCK
  misc_feature (124)..(181): Homolog of NCBI NO: 11386827 NR Description: Heat shock factor protein HSF8 (Heat shock
  misc_feature (14)..(104): Homolog of NCBI NO: 11386827 NR Description: Heat shock factor protein HSF8 (Heat shock
  misc_feature (10)..(179): Homolog of NCBI NO: 15225255 NR Description: heat shock transcription factor family
  misc_feature (12)..(214): Homolog of NCBI NO: 34910182 NR Description: putative heat shock transcription factor
  misc_feature (2)..(181): Homolog of NCBI NO: 15230127 NR Description: heat shock transcription factor family
MDSNRSMATSGVAPFVAKTYRMVDDPATDGVVAWGRDNNSFVVADPFALSQTLLPAHFKHSNFSSFVRQLNTYGFRKVDPDRWEFAHVSFLRGQTHLLGQIVRRSSGGKRKDDGNGAGAGSADDEDAVAMEVVRLRREQRAIEEQVAAMWRRVQETERRPKQMLAFLVKVAGDPQVLRRLVSGAGGDAVFAAAEPEDGASIKRARLLLDAGSGGDGAVXLXRAL

SEQ ID NO: 111859 - protein, 218 aa, Zea mays subsp. mays
  misc_feature (1)..(218): Ceres Seq. ID no. 15218993
  misc_feature (7)..(175): Pfam Name: HSF-type DNA-binding Pfam Description: HSF-type DNA-binding
  misc_feature (6)..(208): Homolog of NCBI NO: 34910182 NR Description: putative heat shock transcription factor
  misc_feature (5)..(173): Homolog of NCBI NO: 729774 NR Description: HEAT SHOCK FACTOR PROTEIN HSF30 (HEAT SHOCK
  misc_feature (4)..(176): Homolog of NCBI NO: 33087081 NR Description: heat stress protein [Oryza sativa (japonica
  misc_feature (8)..(98): Homolog of NCBI NO: 729775 NR Description: HEAT SHOCK FACTOR PROTEIN HSF8 (HEAT SHOCK
  misc_feature (8)..(98): Homolog of NCBI NO: 11386827 NR Description: Heat shock factor protein HSF8 (Heat shock
  misc_feature (4)..(173): Homolog of NCBI NO: 15225255 NR Description: heat shock transcription factor family
  misc_feature (118)..(175): Homolog of NCBI NO: 11386827 NR Description: Heat shock factor protein HSF8 (Heat shock
  misc_feature (118)..(175): Homolog of NCBI NO: 729775 NR Description: HEAT SHOCK FACTOR PROTEIN HSF8 (HEAT SHOCK
  misc_feature (4)..(176): Homolog of NCBI NO: 28971956 NR Description: putative heat shock transcription factor
  misc_feature (1)..(175): Homolog of NCBI NO: 15230127 NR Description: heat shock transcription factor family
MATSGVAPFVAKTYRMVDDPATDGVVAWGRDNNSFVVADPFALSQTLLPAHFKHSNFSSFVRQLNTYGFRKVDPDRWEFAHVSFLRGQTHLLGQIVRRSSGGKRKDDGNGAGAGSADDEDAVAMEVVRLRREQRAIEEQVAAMWRRVQETERRPKQMLAFLVKVAGDPQVLRRLVSGAGGDAVFAAAEPEDGASIKRARLLLDAGSGGDGAVXLXRAL

SEQ ID NO: 111860 - protein, 203 aa, Zea mays subsp. mays
  misc_feature (1)..(203): Ceres Seq. ID no. 15218994
  misc_feature (1)..(160): Pfam Name: HSF-type DNA-binding Pfam Description: HSF-type DNA-binding
  misc_feature (1)..(158): Homolog of NCBI NO: 729774 NR Description: HEAT SHOCK FACTOR PROTEIN HSF30 (HEAT SHOCK
  misc_feature (1)..(161): Homolog of NCBI NO: 28971956 NR Description: putative heat shock transcription factor
  misc_feature (1)..(161): Homolog of NCBI NO: 33087081 NR Description: heat stress protein [Oryza sativa (japonica
  misc_feature (103)..(160): Homolog of NCBI NO: 729775 NR Description: HEAT SHOCK FACTOR PROTEIN HSF8 (HEAT SHOCK
  misc_feature (1)..(83): Homolog of NCBI NO: 729775 NR Description: HEAT SHOCK FACTOR PROTEIN HSF8 (HEAT SHOCK
  misc_feature (103)..(160): Homolog of NCBI NO: 11386827 NR Description: Heat shock factor protein HSF8 (Heat shock
  misc_feature (1)..(83): Homolog of NCBI NO: 11386827 NR Description: Heat shock factor protein HSF8 (Heat shock
  misc_feature (1)..(158): Homolog of NCBI NO: 15225255 NR Description: heat shock transcription factor family
  misc_feature (1)..(193): Homolog of NCBI NO: 34910182 NR Description: putative heat shock transcription factor
  misc_feature (1)..(160): Homolog of NCBI NO: 15230127 NR Description: heat shock transcription factor family
MVDDPATDGVVAWGRDNNSFVVADPFALSQTLLPAHFKHSNFSSFVRQLNTYGFRKVDPDRWEFAHVSFLRGQTHLLGQIVRRSSGGKRKDDGNGAGAGSADDEDAVAMEVVRLRREQRAIEEQVAAMWRRVQETERRPKQMLAFLVKVAGDPQVLRRLVSGAGGDAVFAAAEPEDGASIKRARLLLDAGSGGDGAVXLXRAL

SEQ ID NO: 111861 - DNA, 1154 bp, Zea mays subsp. mays
  misc_feature (1)..(1154): Ceres Seq. ID no. 12634732
gaaacaagtccatctagaccgttcctcctctaatccccatcctcgctccccccaaccctcaccgccatggcgaccaccgaggactccgccgccgcgggcgaggcccgacgcctgttcgccctcctcgagtcccagcagcaggtactctctgactgccacggcgcctggtcgcgcgccctcgcacactttgcctcgcgcgaggaggacctcgcctcccgctccgctgcactcgacgaagccctagccgccgccgacgtttccacttccgagactctcgcagcgctcgaggcccgcgagtcctccattcccgcgcgcctcgctgaggcctccgccgcgctctccgccgccgtcgctgaggccgagactgaatccaccgggccaccacccaccgacatcaagggcgcgctccggtggatatgccgccgcatggacgctgctgcgctctggcgcttcatggccgcacgccgccgggagctcgcggtagtccggagggaggccggccccgccgtcgccatggccgtcgacccgccccgccttgtcctcgacgtggaagaggcaaacagcttggagggcaatgcatacaggtccgtcataaggtgcgtcgagtcctgccagctacaatcggtgtttcctttagaggtcctgaggaagaagttagggaagttggagaaagagaagtctgataggaagaaggcagctggtccaagcagattcccgaacaagcgatcccgcggcgcagctggaccctatcccttccctgctgccaaggctgctaggggctcaagctttggtccgcgtttccagaacccagtctcacgttccttaaactacgcacctcatgctggatatataaacccagcagctgcatcaccattctctgtccctgggagcgtgtcggggagacgaggtggtgtaccatatggcggacctggagccacgtatggtggctcccctagctttgcaaccggtggtgggcagcaaccattccgtcgttaggtctagggctgtttgttgtaactgaatgctccttgttttctggctaatagggataatgtatgcctccagctattcaagcatacttgttcagttcttgatggatgctggatattgaacgtcgtgtagtacacattctatggtactgtgtttgctttgtt

SEQ ID NO: 111862 - protein, 309 aa, Zea mays subsp. mays
  misc_feature (1)..(309): Ceres Seq. ID no. 12634733
  misc_feature (143)..(222): Pfam Name: Atrophin-1 family Pfam Description: Atrophin-1 family
  misc_feature (27)..(160): Homolog of NCBI NO: 16974572 NR Description: AT4g14900/dl3490c [Arabidopsis thaliana]
  misc_feature (168)..(303): Homolog of NCBI NO: 18414336 NR Description: hydroxyproline-rich glycoprotein homolog
  misc_feature (17)..(160): Homolog of NCBI NO: 18414336 NR Description: hydroxyproline-rich glycoprotein homolog
  misc_feature (168)..(296): Homolog of NCBI NO: 18403383 NR Description: hydroxyproline-rich glycoprotein family
  misc_feature (13)..(160): Homolog of NCBI NO: 18403383 NR Description: hydroxyproline-rich glycoprotein family
  misc_feature (164)..(210): Homolog of NCBI NO: 34394454 NR Description: putative hydroxyproline-rich glycoprotein
  misc_feature (8)..(160): Homolog of NCBI NO: 34394454 NR Description: putative hydroxyproline-rich glycoprotein
  misc_feature (164)..(270): Homolog of NCBI NO: 34394453 NR Description: putative hydroxyproline-rich glycoprotein
  misc_feature (8)..(160): Homolog of NCBI NO: 34394453 NR Description: putative hydroxyproline-rich glycoprotein
  misc_feature (1)..(160): Homolog of NCBI NO: 34906200 NR Description: OJ1174_D05.18 [Oryza sativa (japonica
MATTEDSAAAGEARRLFALLESQQQVLSDCHGAWSRALAHFASREEDLASRSAALDEALAAADVSTSETLAALEARESSIPARLAEASAALSAAVAEAETESTGPPPTDIKGALRWICRRMDAAALWRFMAARRRELAVVRREAGPAVAMAVDPPRLVLDVEEANSLEGNAYRSVIRCVESCQLQSVFPLEVLRKKLGKLEKEKSDRKKAAGPSRFPNKRSRGAAGPYPFPAAKAARGSSFGPRFQNPVSRSLNYAPHAGYINPAAASPFSVPGSVSGRRGGVPYGGPGATYGGSPSFATGGGQQPFRR

SEQ ID NO: 111863 - protein, 189 aa, Zea mays subsp. mays
  misc_feature (1)..(189): Ceres Seq. ID no. 12634734
  misc_feature (23)..(102): Pfam Name: Atrophin-1 family Pfam Description: Atrophin-1 family
  misc_feature (1)..(40): Homolog of NCBI NO: 16974572 NR Description: AT4g14900/dl3490c [Arabidopsis thaliana]
  misc_feature (48)..(183): Homolog of NCBI NO: 18414336 NR Description: hydroxyproline-rich glycoprotein homolog
  misc_feature (1)..(40): Homolog of NCBI NO: 18414336 NR Description: hydroxyproline-rich glycoprotein homolog
  misc_feature (48)..(176): Homolog of NCBI NO: 18403383 NR Description: hydroxyproline-rich glycoprotein family
  misc_feature (1)..(40): Homolog of NCBI NO: 18403383 NR Description: hydroxyproline-rich glycoprotein family
  misc_feature (44)..(90): Homolog of NCBI NO: 34394454 NR Description: putative hydroxyproline-rich glycoprotein
  misc_feature (1)..(40): Homolog of NCBI NO: 34394454 NR Description: putative hydroxyproline-rich glycoprotein
  misc_feature (44)..(150): Homolog of NCBI NO: 34394453 NR Description: putative hydroxyproline-rich glycoprotein
  misc_feature (1)..(40): Homolog of NCBI NO: 34394453 NR Description: putative hydroxyproline-rich glycoprotein
  misc_feature (1)..(40): Homolog of NCBI NO: 34906200 NR Description: OJ1174_D05.18 [Oryza sativa (japonica
MDAAALWRFMAARRRELAVVRREAGPAVAMAVDPPRLVLDVEEANSLEGNAYRSVIRCVESCQLQSVFPLEVLRKKLGKLEKEKSDRKKAAGPSRFPNKRSRGAAGPYPFPAAKAARGSSFGPRFQNPVSRSLNYAPHAGYINPAAASPFSVPGSVSGRRGGVPYGGPGATYGGSPSFATGGGQQPFRR

SEQ ID NO: 111864 - protein, 180 aa, Zea mays subsp. mays
  misc_feature (1)..(180): Ceres Seq. ID no. 12634735
  misc_feature (14)..(93): Pfam Name: Atrophin-1 family Pfam Description: Atrophin-1 family
  misc_feature (1)..(31): Homolog of NCBI NO: 16974572 NR Description: AT4g14900/dl3490c [Arabidopsis thaliana]
  misc_feature (39)..(174): Homolog of NCBI NO: 18414336 NR Description: hydroxyproline-rich glycoprotein homolog
  misc_feature (1)..(31): Homolog of NCBI NO: 18414336 NR Description: hydroxyproline-rich glycoprotein homolog
  misc_feature (39)..(167): Homolog of NCBI NO: 18403383 NR Description: hydroxyproline-rich glycoprotein family
  misc_feature (1)..(31): Homolog of NCBI NO: 18403383 NR Description: hydroxyproline-rich glycoprotein family
  misc_feature (35)..(81): Homolog of NCBI NO: 34394454 NR Description: putative hydroxyproline-rich glycoprotein
  misc_feature (1)..(31): Homolog of NCBI NO: 34394454 NR Description: putative hydroxyproline-rich glycoprotein
  misc_feature (35)..(141): Homolog of NCBI NO: 34394453 NR Description: putative hydroxyproline-rich glycoprotein
  misc_feature (1)..(31): Homolog of NCBI NO: 34394453 NR Description: putative hydroxyproline-rich glycoprotein
  misc_feature (1)..(31): Homolog of NCBI NO: 34906200 NR Description: OJ1174_D05.18 [Oryza sativa (japonica
MAARRRELAVVRREAGPAVAMAVDPPRLVLDVEEANSLEGNAYRSVIRCVESCQLQSVFPLEVLRKKLGKLEKEKSDRKKAAGPSRFPNKRSRGAAGPYPFPAAKAARGSSFGPRFQNPVSRSLNYAPHAGYINPAAASPFSVPGSVSGRRGGVPYGGPGATYGGSPSFATGGGQQPFRR

SEQ ID NO: 111865 - DNA, 717 bp, Zea mays subsp. mays
  misc_feature (1)..(717): Ceres Seq. ID no. 14306032
atcagaaaccgatccttgtccctagcagcgcgcgacacgcacgtacccagcgcgcgagaaatcttacatcgatcatcacctgcgagccagccggccgagcagcaccgatggcggcgtacatgcgcgtgacgcaccgcgacgaggaaggcaagaaggtgacggagaagatgccggtcccggaaacgcggcgcccggacacggccaagcacttcgagcgcaagctggaggagcagggcctccaccgcttcgagcggcacccggcgaacgcgccccggggcgtgggcatcggcgccccgccgcccaagtccgggcgcggcggcaagtacacctgggagggccccggcagcgtcgtcgaggaccagctcgacccggcgccgcccgccatcgaccccaacgaccccaactacgaggaggcggaggacgacgaggcggccagggaggtggtcgtcggggaggtggaggtcgctaaggtcgccgagggcagggacggcgtcgccagggtcgacgtcgcgccgggcctgctccaggaccagaagcagtaaaaagacttgtcttttctggatacgtctagagtctagatcgactcggtgtgtgtcagtgtgttcgagtttattccgtgcagagagtgcacgtcaactccgctttaattaatctgcttttgttaatatttctactgatcagtaatatgaaccagtggttgatatttggatggacctt

SEQ ID NO: 111866 - protein, 179 aa, Zea mays subsp. mays
  misc_feature (1)..(179): Ceres Seq. ID no. 14306033
  misc_feature (40)..(174): Homolog of NCBI NO: 18398726 NR Description: expressed protein [Arabidopsis thaliana]
QKPILVPSSARHARTQRARNLTSIITCEPAGRAAPMAAYMRVTHRDEEGKKVTEKMPVPETRRPDTAKHFERKLEEQGLHRFERHPANAPRGVGIGAPPPKSGRGGKYTWEGPGSVVEDQLDPAPPAIDPNDPNYEEAEDDEAAREVVVGEVEVAKVAEGRDGVARVDVAPGLLQDQKQ

SEQ ID NO: 111867 - protein, 144 aa, Zea mays subsp. mays
  misc_feature (1)..(144): Ceres Seq. ID no. 14306034
  misc_feature (5)..(139): Homolog of NCBI NO: 18398726 NR Description: expressed protein [Arabidopsis thaliana]
MAAYMRVTHRDEEGKKVTEKMPVPETRRPDTAKHFERKLEEQGLHRFERHPANAPRGVGIGAPPPKSGRGGKYTWEGPGSVVEDQLDPAPPAIDPNDPNYEEAEDDEAAREVVVGEVEVAKVAEGRDGVARVDVAPGLLQDQKQ

SEQ ID NO: 111868 - protein, 140 aa, Zea mays subsp. mays
  misc_feature (1)..(140): Ceres Seq. ID no. 14306035
  misc_feature (1)..(135): Homolog of NCBI NO: 18398726 NR Description: expressed protein [Arabidopsis thaliana]
MRVTHRDEEGKKVTEKMPVPETRRPDTAKHFERKLEEQGLHRFERHPANAPRGVGIGAPPPKSGRGGKYTWEGPGSVVEDQLDPAPPAIDPNDPNYEEAEDDEAAREVVVGEVEVAKVAEGRDGVARVDVAPGLLQDQKQ

SEQ ID NO: 111869 - DNA, 1165 bp, Zea mays subsp. mays
  misc_feature (1)..(1165): Ceres Seq. ID no. 13599119
ctctccttccggcttccggccccgctcctccccaaaatcccccaaaacctgacgagctggagggccgatccgcggctccccgccgcctgatccgagcagtctactcggcccagccggggatccaagcgggatggggtacttgagctccgtgatcggccaccccaccgatggatcctccgtcagcggcggcggcctcagccagaatggtagatttagctatggctatgcaagctcccctggtaaaagggcatccatggaagacttctatgagacaaaaattgattgtgttgatggtcagatagttggtctttttggagtttttgatggtcatggtggtgctaaggtagcagagtatgttaaagaaaacctgttcaacaatcttgttagtcatccaaagttcatcagtgatactaaagtcgctatagatgatgcttataaaagcaccgacagtgaattcttagaatctgacagtagtcaaaatcaatgcgggtcaactgcatcaactgctgtacttgttggtgatcgtctcttcgtcgcaaatgttggtgactctagggctatcatatgcagggaaggaaatgctattgctgtttcaaaggatcacaagcctgatcaaactgatgagcggcagcgtattgaagatgctggaggttttgtgatgtgggcaggaacatggcgcgttggtggtgtacttgctgtttcgcgtgcttttggtgacaaactcttaaagcaatatgtggttgtggatccggagatccgagaggaagttgttgatgacacactcgagtttcttatccttgcaagtgatgggctgtgggatgtggtctctaacgaggaagctgttgcgatgactagatccattaaggacccagaagaggctgcaaagatgctcttgcaagaggcgtacaagagggagagcagtgacaacataacttgcgtcgtcgtgcacttcttgcatgggcaaggtagcagcggatacgcttaaagcgtagcagtaaaattattttacgcagtggtgtgctctgatgtacatgcgtcgattgatttcccgatgttaaatggagaaacgtaactacgtaaggtaggaaacgtgtattatgatgggttgaactgggaaatgcgtgtaccctatactatatatatatactgtagtgtggtcgcggac

SEQ ID NO: 111870 - protein, 284 aa, Zea mays subsp. mays
  misc_feature (1)..(284): Ceres Seq. ID no. 13599120
  misc_feature (43)..(267): Pfam Name: Protein phosphatase 2C Pfam Description: Protein phosphatase 2C
  misc_feature (1)..(274): Homolog of NCBI NO: 30693757 NR Description: protein phosphatase 2C (PP2C), putative
  misc_feature (1)..(281): Homolog of NCBI NO: 11358728 NR Description: protein phosphatase 2C-like protein - Arabidopsis
  misc_feature (1)..(281): Homolog of NCBI NO: 15238651 NR Description: protein phosphatase 2C (PP2C), putative
  misc_feature (1)..(281): Homolog of NCBI NO: 18416366 NR Description: protein phosphatase 2C (PP2C) -related
  misc_feature (199)..(284): Homolog of NCBI NO: 7486331 NR Description: hypothetical protein F28M20.60 - Arabidopsis
  misc_feature (23)..(210): Homolog of NCBI NO: 7486331 NR Description: hypothetical protein F28M20.60 - Arabidopsis
  misc_feature (1)..(275): Homolog of NCBI NO: 20146110 NR Description: protein phosphatase 2C [Mesembryanthemum
  misc_feature (1)..(284): Homolog of NCBI NO: 30689144 NR Description: protein phosphatase 2C (PP2C), putative
  misc_feature (42)..(284): Homolog of NCBI NO: 19387276 NR Description: putative protein phosphatase 2C
  misc_feature (1)..(284): Homolog of NCBI NO: 38345197 NR Description: OSJNBa0015K02.7 [Oryza sativa (japonica
MGYLSSVIGHPTDGSSVSGGGLSQNGRFSYGYASSPGKRASMEDFYETKIDCVDGQIVGLFGVFDGHGGAKVAEYVKENLFNNLVSHPKFISDTKVAIDDAYKSTDSEFLESDSSQNQCGSTASTAVLVGDRLFVANVGDSRAIICREGNAIAVSKDHKPDQTDERQRIEDAGGFVMWAGTWRVGGVLAVSRAFGDKLLKQYVVVDPEIREEVVDDTLEFLILASDGLWDVVSNEEAVAMTRSIKDPEEAAKMLLQEAYKRESSDNITCVVVHFLHGQGSSGYA

SEQ ID NO: 111871 - protein, 243 aa, Zea mays subsp. mays
  misc_feature (1)..(243): Ceres Seq. ID no. 13599121
  misc_feature (2)..(226): Pfam Name: Protein phosphatase 2C Pfam Description: Protein phosphatase 2C
  misc_feature (1)..(240): Homolog of NCBI NO: 18416366 NR Description: protein phosphatase 2C (PP2C) -related
  misc_feature (158)..(243): Homolog of NCBI NO: 7486331 NR Description: hypothetical protein F28M20.60 - Arabidopsis
  misc_feature (1)..(169): Homolog of NCBI NO: 7486331 NR Description: hypothetical protein F28M20.60 - Arabidopsis
  misc_feature (1)..(234): Homolog of NCBI NO: 20146110 NR Description: protein phosphatase 2C [Mesembryanthemum
  misc_feature (1)..(240): Homolog of NCBI NO: 11358728 NR Description: protein phosphatase 2C-like protein - Arabidopsis
  misc_feature (1)..(240): Homolog of NCBI NO: 15238651 NR Description: protein phosphatase 2C (PP2C), putative
  misc_feature (1)..(233): Homolog of NCBI NO: 30693757 NR Description: protein phosphatase 2C (PP2C), putative
  misc_feature (1)..(243): Homolog of NCBI NO: 30689144 NR Description: protein phosphatase 2C (PP2C), putative
  misc_feature (1)..(243): Homolog of NCBI NO: 19387276 NR Description: putative protein phosphatase 2C
  misc_feature (1)..(243): Homolog of NCBI NO: 38345197 NR Description: OSJNBa0015K02.7 [Oryza sativa (japonica
MEDFYETKIDCVDGQIVGLFGVFDGHGGAKVAEYVKENLFNNLVSHPKFISDTKVAIDDAYKSTDSEFLESDSSQNQCGSTASTAVLVGDRLFVANVGDSRAIICREGNAIAVSKDHKPDQTDERQRIEDAGGFVMWAGTWRVGGVLAVSRAFGDKLLKQYVVVDPEIREEVVDDTLEFLILASDGLWDVVSNEEAVAMTRSIKDPEEAAKMLLQEAYKRESSDNITCVVVHFLHGQGSSGYA

SEQ ID NO: 111872 - DNA, 763 bp, Zea mays subsp. mays
  misc_feature (1)..(763): Ceres Seq. ID no. 13599144
  misc_feature: MA Experiment ID: 20000108 Result: Up-regulated in Transcription
  misc_feature: MA Experiment 20000108 PARAMETER Experiment Name: Zm_Root-Tips_P Parameter: Age (day) Value: 12
  misc_feature: MA Experiment 20000108 PARAMETER Experiment Name: Zm_Root-Tips_P Parameter: Organism Value: Zea mays
  misc_feature: MA Experiment 20000108 PARAMETER Experiment Name: Zm_Root-Tips_P Parameter: Tissue Value: Root tips vs. Root mid region    35
  misc_feature: MA Experiment 20000108 PARAMETER Experiment Name: Zm_Root-Tips_P Parameter: Tissue Value: Root tips vs. Root mid region   Sequence Listing-Misc Features (4)
  misc_feature: MA Experiment ID: 20000492 Result: Up-regulated in Transcription
  misc_feature: MA Experiment 20000492 PARAMETER Experiment Name: Zm_Hybrid_Seed_Dev_P Parameter: DAP Value: 12
  misc_feature: MA Experiment 20000492 PARAMETER Experiment Name: Zm_Hybrid_Seed_Dev_P Parameter: Organism Value: Zea mays
  misc_feature: MA Experiment 20000492 PARAMETER Experiment Name: Zm_Hybrid_Seed_Dev_P Parameter: Plant Line Value: 35A19
  misc_feature: MA Experiment 20000492 PARAMETER Experiment Name: Zm_Hybrid_Seed_Dev_P Parameter: Tissue Value: Fert Kernel vs. Unfert Floret
ttcgcacgagacctttattgtgtttaaacactagaacatcctaatcgaaaaatacctaaagatttagcctgaatagaagtgcatggaaaacaactattcatgtgtctgaatcttaatcgtggtttctattggtttttaactctagcctaccctaacttgcttgagataaaagactttgttgttgttgttatagacttatagtgttaacttttcatgttgtatccatgttattttcataaacctgtcgtagatgtcactgggcttgcatgtagagatttttgttatgtttgttttcttgttgcagggaggatgggagaatgatgaaactgttgaagaggcagcagctcgagaagctatagaagaagctggagttcgaggtgatatagtgcattttctggggctctatgacttcaaaagcaagacgcatcaagatgcgtgctgccctgagggtatgtgcagagctgcagtgtttgcgctgcatgtaaaggaagagctggcctcatggcctgagcagagcacccgacagaggacctggctcacggtccctgaagctgcatcaagttgccgataccagtggatgcaagaggccttgctgacaggcttctctgactggcacgacaagtggagcagaggcggcggcggcacaaactgtgacccggcctaactgctgacaggcccatctgcagtcgtccaatttgttcatctcctctctttccctaggcccccaaccttgcagaatgcaataatacagtgtacttgtctt

SEQ ID NO: 111873 - protein, 137 aa, Zea mays subsp. mays
  misc_feature (1)..(137): Ceres Seq. ID no. 15222524
  misc_feature (18)..(119): Pfam Name: NUDIX domain Pfam Description: NUDIX domain
  misc_feature (18)..(114): Homolog of NCBI NO: 15221055 NR Description: MutT/nudix family protein [Arabidopsis thaliana]
  misc_feature (18)..(114): Homolog of NCBI NO: 15223919 NR Description: MutT/nudix family protein [Arabidopsis thaliana]
  misc_feature (18)..(114): Homolog of NCBI NO: 21595695 NR Description: unknown [Arabidopsis thaliana]
  misc_feature (18)..(114): Homolog of NCBI NO: 18379275 NR Description: MutT/nudix family protein [Arabidopsis thaliana]
  misc_feature (18)..(114): Homolog of NCBI NO: 25518008 NR Description: F13K23.14 protein - Arabidopsis thaliana
  misc_feature (18)..(114): Homolog of NCBI NO: 18391450 NR Description: MutT/nudix family protein [Arabidopsis thaliana]
  misc_feature (18)..(114): Homolog of NCBI NO: 15231598 NR Description: MutT/nudix family protein [Arabidopsis thaliana]
  misc_feature (18)..(128): Homolog of NCBI NO: 18399682 NR Description: MutT/nudix family protein [Arabidopsis thaliana]
  misc_feature (18)..(137): Homolog of NCBI NO: 38175436 NR Description: MutT-like protein [Oryza sativa (japonica
  misc_feature (18)..(137): Homolog of NCBI NO: 34900054 NR Description: MutT-like protein~contains ESTs
MSLGLHVEIFVMFVFLLQGGWENDETVEEAAAREAIEEAGVRGDIVHFLGLYDFKSKTHQDACCPEGMCRAAVFALHVKEELASWPEQSTRQRTWLTVPEAASSCRYQWMQEALLTGFSDWHDKWSRGGGGTNCDPA

SEQ ID NO: 111874 - protein, 126 aa, Zea mays subsp. mays
  misc_feature (1)..(126): Ceres Seq. ID no. 15222525
  misc_feature (7)..(108): Pfam Name: NUDIX domain Pfam Description: NUDIX domain
  misc_feature (7)..(103): Homolog of NCBI NO: 15221055 NR Description: MutT/nudix family protein [Arabidopsis thaliana]
  misc_feature (7)..(103): Homolog of NCBI NO: 15223919 NR Description: MutT/nudix family protein [Arabidopsis thaliana]
  misc_feature (7)..(103): Homolog of NCBI NO: 21595695 NR Description: unknown [Arabidopsis thaliana]
  misc_feature (7)..(103): Homolog of NCBI NO: 18379275 NR Description: MutT/nudix family protein [Arabidopsis thaliana]
  misc_feature (7)..(103): Homolog of NCBI NO: 25518008 NR Description: F13K23.14 protein - Arabidopsis thaliana
  misc_feature (7)..(103): Homolog of NCBI NO: 18391450 NR Description: MutT/nudix family protein [Arabidopsis thaliana]
  misc_feature (7)..(103): Homolog of NCBI NO: 15231598 NR Description: MutT/nudix family protein [Arabidopsis thaliana]
  misc_feature (7)..(117): Homolog of NCBI NO: 18399682 NR Description: MutT/nudix family protein [Arabidopsis thaliana]
  misc_feature (7)..(126): Homolog of NCBI NO: 38175436 NR Description: MutT-like protein [Oryza sativa (japonica
  misc_feature (7)..(126): Homolog of NCBI NO: 34900054 NR Description: MutT-like protein~contains ESTs
MFVFLLQGGWENDETVEEAAAREAIEEAGVRGDIVHFLGLYDFKSKTHQDACCPEGMCRAAVFALHVKEELASWPEQSTRQRTWLTVPEAASSCRYQWMQEALLTGFSDWHDKWSRGGGGTNCDPA

SEQ ID NO: 111875 - protein, 70 aa, Zea mays subsp. mays
  misc_feature (1)..(70): Ceres Seq. ID no. 15222526
  misc_feature (1)..(52): Pfam Name: NUDIX domain Pfam Description: NUDIX domain
  misc_feature (1)..(47): Homolog of NCBI NO: 15221055 NR Description: MutT/nudix family protein [Arabidopsis thaliana]
  misc_feature (1)..(47): Homolog of NCBI NO: 15223919 NR Description: MutT/nudix family protein [Arabidopsis thaliana]
  misc_feature (1)..(47): Homolog of NCBI NO: 21595695 NR Description: unknown [Arabidopsis thaliana]
  misc_feature (1)..(47): Homolog of NCBI NO: 18379275 NR Description: MutT/nudix family protein [Arabidopsis thaliana]
  misc_feature (1)..(47): Homolog of NCBI NO: 25518008 NR Description: F13K23.14 protein - Arabidopsis thaliana
  misc_feature (1)..(47): Homolog of NCBI NO: 18391450 NR Description: MutT/nudix family protein [Arabidopsis thaliana]
  misc_feature (1)..(47): Homolog of NCBI NO: 15231598 NR Description: MutT/nudix family protein [Arabidopsis thaliana]
  misc_feature (1)..(61): Homolog of NCBI NO: 18399682 NR Description: MutT/nudix family protein [Arabidopsis thaliana]
  misc_feature (1)..(70): Homolog of NCBI NO: 38175436 NR Description: MutT-like protein [Oryza sativa (japonica
  misc_feature (1)..(70): Homolog of NCBI NO: 34900054 NR Description: MutT-like protein~contains ESTs
MCRAAVFALHVKEELASWPEQSTRQRTWLTVPEAASSCRYQWMQEALLTGFSDWHDKWSRGGGGTNCDPA

SEQ ID NO: 111876 - DNA, 1112 bp, Zea mays subsp. mays
  misc_feature (1)..(1112): Ceres Seq. ID no. 14306402
actagagcaaatactctcaagtcccaactaaccaaaactgggaggaagagaaaagctgcagacacggtctctctctcacccttcaccgcttcacgtagcagcaagaaaaagaaagaaaataaaaagagagagagagacagagatggcttgcaccttgaaactccaaaacccaccacgaaaaaagaccttctctggcccctgaccctgagagagagttgctgttgctgccattcggtcggtgcctccttttcggtacgccgctggtatgtggtatcactggtatggttgttctcccatcccaaggcgacgagggaataggaagctagaaagttcgtctgcagtctgcacctttgcccatggcctaggcgcctagctcaggccgtagctcagcgtccgtccatgggccagggagtctgaaaccttgcttgccttgcctgcccgctcctctcacttctctctctcctcctcgctcgtgtccccggcgttctgctggtccctggggactggagagcgaaggtctgtctcctttgcgcctgctctgcttcttcaatgctgggcgtcggtggcttgggctcgggctcgggcatggaaccaggtaccagctgcggtgctctgctcagagagcttcagcaaatctgggcagaagtaggggaaagtgagggcgagaagaacaaggcgttgctggacatcgaaagagagtgcctggaagtctaccgcaggaaggtggacgatgccaatcggactagggtccagctgcaccagtcagtggctgccaaagaagctgaggttgcatctctgatggcaacccttggggagcacaagctgtacttgaaggtatacaactatacacggtgatgggctgatgatgaggtgacgcactaattaggttggttggcgtattggacatgcatggttcgcttcttgctgaaatggacatggactgtagatatatgaagcctcttgaggagacttgtttttctacgaatgctgaactttactttctcaccaagctttagtcagttctttctaaactgccgtgaattaataacattaccaatgttacacagtagtttgggttgcatatgttctacagcgttcattttattgcctac

SEQ ID NO: 111877 - protein, 105 aa, Zea mays subsp. mays
  misc_feature (1)..(105): Ceres Seq. ID no. 14306403
TRANTLKSQLTKTGRKRKAADTVSLSPFTASRSSKKKKENKKRERDRDGLHLETPKPTTKKDLLWPLTLRESCCCCHSVGASFSVRRWYVVSLVWLFSHPKATRE

SEQ ID NO: 111878 - protein, 101 aa, Zea mays subsp. mays
  misc_feature (1)..(101): Ceres Seq. ID no. 14306404
  misc_feature (17)..(96): Homolog of NCBI NO: 11558252 NR Description: microtubule-associated protein MAP65-1a
  misc_feature (13)..(95): Homolog of NCBI NO: 15224935 NR Description: microtubule associated protein (MAP65/ASE1)
  misc_feature (17)..(98): Homolog of NCBI NO: 34911266 NR Description: cytokinesis regulating protein - like
  misc_feature (17)..(100): Homolog of NCBI NO: 28200790 NR Description: 65kD microtubule associated protein [Daucus
  misc_feature (17)..(89): Homolog of NCBI NO: 27357984 NR Description: Unknown protein [Oryza sativa (japonica
  misc_feature (3)..(100): Homolog of NCBI NO: 28301942 NR Description: unknown protein [Oryza sativa (japonica
  misc_feature (17)..(95): Homolog of NCBI NO: 15242132 NR Description: microtubule associated protein (MAP65/ASE1)
  misc_feature (7)..(88): Homolog of NCBI NO: 25410943 NR Description: hypothetical protein At2g01910 [imported] -
  misc_feature (17)..(88): Homolog of NCBI NO: 8778239 NR Description: F10B6.9 [Arabidopsis thaliana]
  misc_feature (17)..(88): Homolog of NCBI NO: 21539547 NR Description: unknown protein [Arabidopsis thaliana]
MLGVGGLGSGSGMEPGTSCGALLRELQQIWAEVGESEGEKNKALLDIERECLEVYRRKVDDANRTRVQLHQSVAAKEAEVASLMATLGEHKLYLKVYNYTR

SEQ ID NO: 111879 - protein, 89 aa, Zea mays subsp. mays
  misc_feature (1)..(89): Ceres Seq. ID no. 14306405
  misc_feature (5)..(84): Homolog of NCBI NO: 11558252 NR Description: microtubule-associated protein MAP65-1a
  misc_feature (1)..(83): Homolog of NCBI NO: 15224935 NR Description: microtubule associated protein (MAP65/ASE1)
  misc_feature (5)..(86): Homolog of NCBI NO: 34911266 NR Description: cytokinesis regulating protein - like
  misc_feature (5)..(88): Homolog of NCBI NO: 28200790 NR Description: 65kD microtubule associated protein [Daucus
  misc_feature (5)..(77): Homolog of NCBI NO: 27357984 NR Description: Unknown protein [Oryza sativa (japonica
  misc_feature (1)..(88): Homolog of NCBI NO: 28301942 NR Description: unknown protein [Oryza sativa (japonica
  misc_feature (5)..(83): Homolog of NCBI NO: 15242132 NR Description: microtubule associated protein (MAP65/ASE1)
  misc_feature (1)..(76): Homolog of NCBI NO: 25410943 NR Description: hypothetical protein At2g01910 [imported] -
  misc_feature (5)..(76): Homolog of NCBI NO: 8778239 NR Description: F10B6.9 [Arabidopsis thaliana]
  misc_feature (5)..(76): Homolog of NCBI NO: 21539547 NR Description: unknown protein [Arabidopsis thaliana]
MEPGTSCGALLRELQQIWAEVGESEGEKNKALLDIERECLEVYRRKVDDANRTRVQLHQSVAAKEAEVASLMATLGEHKLYLKVYNYTR

SEQ ID NO: 111880 - DNA, 1062 bp, Zea mays subsp. mays
  misc_feature (1)..(1062): Ceres Seq. ID no. 14306100
  misc_feature: MA Experiment ID: 108522 Result: Down-regulated in Transcription
  misc_feature: MA Experiment 108522 PARAMETER Experiment Name: Zm_42deg_Heat_P Parameter: Age (day) Value: 8
  misc_feature: MA Experiment 108522 PARAMETER Experiment Name: Zm_42deg_Heat_P Parameter: Organism Value: Zea mays
  misc_feature: MA Experiment 108522 PARAMETER Experiment Name: Zm_42deg_Heat_P Parameter: Plant Line Value: 35A19
  misc_feature: MA Experiment 108522 PARAMETER Experiment Name: Zm_42deg_Heat_P Parameter: Temperature (deg C) Value: 42 vs. 22
  misc_feature: MA Experiment 108522 PARAMETER Experiment Name: Zm_42deg_Heat_P Parameter: Timepoint (hr) Value: 1
  misc_feature: MA Experiment 108522 PARAMETER Experiment Name: Zm_42deg_Heat_P Parameter: Tissue Value: Aerial
  misc_feature: MA Experiment ID: 108529 Result: Down-regulated in Transcription
  misc_feature: MA Experiment 108529 PARAMETER Experiment Name: Zm_Imbibed_Seeds_P Parameter: Age (day) Value: 5 vs. 2
  misc_feature: MA Experiment 108529 PARAMETER Experiment Name: Zm_Imbibed_Seeds_P Parameter: Organism Value: Zea mays
  misc_feature: MA Experiment 108529 PARAMETER Experiment Name: Zm_Imbibed_Seeds_P Parameter: Plant Line Value: 35A19
  misc_feature: MA Experiment 108529 PARAMETER Experiment Name: Zm_Imbibed_Seeds_P Parameter: Tissue Value: Roots vs. Embryo
  misc_feature: MA Experiment ID: 108533 Result: Down-regulated in Transcription
  misc_feature: MA Experiment 108533 PARAMETER Experiment Name: Zm_4deg_Cold_P Parameter: Age (hr) Value: 8
  misc_feature: MA Experiment 108533 PARAMETER Experiment Name: Zm_4deg_Cold_P Parameter: Organism Value: Zea mays
  misc_feature: MA Experiment 108533 PARAMETER Experiment Name: Zm_4deg_Cold_P Parameter: Plant Line Value: 35A19
  misc_feature: MA Experiment 108533 PARAMETER Experiment Name: Zm_4deg_Cold_P Parameter: Temperature (deg C) Value: 4 vs. 22
  misc_feature: MA Experiment 108533 PARAMETER Experiment Name: Zm_4deg_Cold_P Parameter: Timepoint (hr) Value: 1
  misc_feature: MA Experiment 108533 PARAMETER Experiment Name: Zm_4deg_Cold_P Parameter: Tissue Value: Aerial
  misc_feature: MA Experiment ID: 108543 Result: Down-regulated in Transcription
  misc_feature: MA Experiment ID: 108544 Result: Down-regulated in Transcription
  misc_feature: MA Experiment ID: 108556 Result: Down-regulated in Transcription
  misc_feature: MA Experiment 108556 PARAMETER Experiment Name: Zm_Drought_P Parameter: Age (day) Value: 9
  misc_feature: MA Experiment 108556 PARAMETER Experiment Name: Zm_Drought_P Parameter: Organism Value: Zea mays
  misc_feature: MA Experiment 108556 PARAMETER Experiment Name: Zm_Drought_P Parameter: Plant Line Value: 35A19
  misc_feature: MA Experiment 108556 PARAMETER Experiment Name: Zm_Drought_P Parameter: Timepoint (hr) Value: 24
  misc_feature: MA Experiment 108556 PARAMETER Experiment Name: Zm_Drought_P Parameter: Tissue Value: Aerial
  misc_feature: MA Experiment 108556 PARAMETER Experiment Name: Zm_Drought_P Parameter: Treatment Value: Drought vs. No Drought
  misc_feature: MA Experiment ID: 108689 Result: Down-regulated in Transcription
  misc_feature: MA Experiment 108689 PARAMETER Experiment Name: Zm_Drought_Roots_P Parameter: Age (day) Value: 9
  misc_feature: MA Experiment 108689 PARAMETER Experiment Name: Zm_Drought_Roots_P Parameter: Organism Value: Zea mays
  misc_feature: MA Experiment 108689 PARAMETER Experiment Name: Zm_Drought_Roots_P Parameter: Plant Line Value: 35A19
  misc_feature: MA Experiment 108689 PARAMETER Experiment Name: Zm_Drought_Roots_P Parameter: Timepoint (hr) Value: 24
  misc_feature: MA Experiment 108689 PARAMETER Experiment Name: Zm_Drought_Roots_P Parameter: Tissue Value: Roots
  misc_feature: MA Experiment 108689 PARAMETER Experiment Name: Zm_Drought_Roots_P Parameter: Treatment Value: Drought vs. No Drought
ataaacagagtgagagactggtagcagccgcatgtgctagagctagacagaagtcagtctccttcccctctctctagtgctcgccggctctttccgtcgccatggacgtcctcctctgctgctgcctgctgcttctcctggcctccgccgcgtccgccggcagcgagcggtgcgtgcggcaggggaaggcggcctactcttcctcgctctctccggcccctcacgatgagatgccgagacgcaaggctgtgcagcgccgggggagtgcgggtggtgctgaccgacttccacaggagcaaccgtacggacttcctgctcgccgggccggcgttcgcgggcctggccaagcccgggatggcccagcagttgaacaggcgagacgccctctccgtagagtacaaaaggattccctgcgagtacaaggagaagaacctgtcgatccgggtggaagaagcgggcgacaggagccggggcaagctggtggtgaagctgctgtaccagggcgggcagaccgacgtactggcggtggaggtggcccccgtggggtcgtcgtcggagtggcggttcatgacaagggcgtacgggccggtgtggagcacggaccgggcccccgccggcccgctgcagttccgcgcggtcgtcacgggcggctacgacggcaagtgggtgtgggccgagcaggaggtgctgccggccgactggcgccccggccaggtctacgacaccggcgtccgcatcgttgacgtcgcccgggacgcatcccgcggctgcaccgccgccgccatggacgactggaagtgaagtgaggatatggctgggtagattaaaaatacgtatgaatacatactaacacgtcgccacatcggtgctgcgacactctggtaagaagaggacagcatgcaatggctccaagaacagcatcccccccaagcgcgtccggctgtccagaggagaggaggaagaagattggagtagctagcagctagggtgtaattgtgtatgcaggatcttctatcaaggtcgatccgattagatgcaggcaaaaaaaaagagctgggatcc

SEQ ID NO: 111881 - protein, 213 aa, Zea mays subsp. mays
  misc_feature (1)..(213): Ceres Seq. ID no. 14306101
  misc_feature (1)..(40): Homolog of NCBI NO: 34901594 NR Description: P0571D04.11 [Oryza sativa (japonica
MDVLLCCCLLLLLASAASAGSERCVRQGKAAYSSSLSPAPHDEMPRRKAVQRRGSAGGADRLPQEQPYGLPARRAGVRGPGQARDGPAVEQARRPLRRVQKDSLRVQGEEPVDPGGRSGRQEPGQAGGEAAVPGRADRRTGGGGGPRGVVVGVAVHDKGVRAGVEHGPGPRRPAAVPRGRHGRLRRQVGVGRAGGAAGRLAPRPGLRHRRPHR

SEQ ID NO: 111882 - protein, 191 aa, Zea mays subsp. mays
  misc_feature (1)..(191): Ceres Seq. ID no. 14306102
  misc_feature (70)..(156): Pfam Name: Pollen allergen Pfam Description: Pollen allergen
  misc_feature (1)..(182): Homolog of NCBI NO: 30692657 NR Description: expansin protein family (EXPL3) [Arabidopsis
  misc_feature (1)..(182): Homolog of NCBI NO: 20138389 NR Description: Expansin-like 3 precursor (At-EXPL3)
  misc_feature (1)..(191): Homolog of NCBI NO: 33111959 NR Description: expansin-like protein [Quercus robur]
  misc_feature (1)..(184): Homolog of NCBI NO: 21555265 NR Description: Expansin-like 1 precursor (At-EXPL1)
  misc_feature (1)..(184): Homolog of NCBI NO: 15231303 NR Description: expansin protein family (EXPL1) [Arabidopsis
  misc_feature (1)..(191): Homolog of NCBI NO: 20502989 NR Description: Putative pollen allergen [Oryza sativa (japonica
  misc_feature (1)..(191): Homolog of NCBI NO: 37536544 NR Description: putative pollen allergen [Oryza sativa (japonica
  misc_feature (1)..(191): Homolog of NCBI NO: 25136297 NR Description: expansin-like protein [Oryza sativa (japonica
  misc_feature (1)..(191): Homolog of NCBI NO: 21654743 NR Description: expansin-like protein 1 [Oryza sativa]
  misc_feature (1)..(191): Homolog of NCBI NO: 34901594 NR Description: P0571D04.11 [Oryza sativa (japonica
MRCRDARLCSAGGVRVVLTDFHRSNRTDFLLAGPAFAGLAKPGMAQQLNRRDALSVEYKRIPCEYKEKNLSIRVEEAGDRSRGKLVVKLLYQGGQTDVLAVEVAPVGSSSEWRFMTRAYGPVWSTDRAPAGPLQFRAVVTGGYDGKWVWAEQEVLPADWRPGQVYDTGVRIVDVARDASRGCTAAAMDDWK

SEQ ID NO: 111883 - protein, 170 aa, Zea mays subsp. mays
  misc_feature (1)..(170): Ceres Seq. ID no. 14306103
MPRRKAVQRRGSAGGADRLPQEQPYGLPARRAGVRGPGQARDGPAVEQARRPLRRVQKDSLRVQGEEPVDPGGRSGRQEPGQAGGEAAVPGRADRRTGGGGGPRGVVVGVAVHDKGVRAGVEHGPGPRRPAAVPRGRHGRLRRQVGVGRAGGAAGRLAPRPGLRHRRPHR

SEQ ID NO: 111884 - DNA, 815 bp, Zea mays subsp. mays
  misc_feature (1)..(815): Ceres Seq. ID no. 12638267
cagcgttgttggtattaattaacaaaattaaatagaaaatcttggctaaactaccgaaacattcaagcaaggaaggtaggtagcgcaggaggttggcgtttccaaatccagacgagacgacggcagcagcagcaggatgccgcgcgcacagtttagcgagccggcgtcgtgtggaccgaccagccgcaccgcaacgcaccgcacagcgcagaagccacaaccagccgctgtctactcgtcgtcgccgccgccgccgccgccgaatagcgccgacctgtagtagaggagggcggcgatgagggcgagcgcgagcgcgaccccgacgggcgagccgccgacgcggtgcacggagtccggggagccgccgagggagagggcgccggcgagcgcggcggcgccgcggtcggaggagaggacgcggatgacgaggacgaggccgacggggagcaggagcaggcccgtggggccgagcaggtccgccacggcggaggtgaccgcctcgccgccctcgcccaggaacagcgggcccgccaccaccagccccaccaccaccgccatgatcaggccgtgcggcgcgccgccgccggggccgtgctgctgctgctgctggtggtaccggtactcgtcgtcgccccgcatcatcgtcggggcggatgcggagatcgcgaggcgggtgtggagggaggttgggagtgggagggtagtgaagtcaggaggaggtactgagtagctaggtgcgtggtggcgtggtgggatgagggagttggaaggaattgagtgtgtcgacgacgacgacgacgagggaaggagaagat

SEQ ID NO: 111885 - protein, 144 aa, Zea mays subsp. mays
  misc_feature (1)..(144): Ceres Seq. ID no. 12638268
  misc_feature (1)..(98): Homolog of NCBI NO: 25152837 NR Description: Q/N-rich domain Prion like protein PQN-75 (52.6
  misc_feature (1)..(98): Homolog of NCBI NO: 25152832 NR Description: Q/N-rich domain Prion like protein PQN-75
  misc_feature (1)..(98): Homolog of NCBI NO: 25152834 NR Description: Q/N-rich domain Prion like protein PQN-75 (50.5
MRASASATPTGEPPTRCTESGEPPRERAPASAAAPRSEERTRMTRTRPTGSRSRPVGPSRSATAEVTASPPSPRNSGPATTSPTTTAMIRPCGAPPPGPCCCCCWWYRYSSSPRIIVGADAEIARRVWREVGSGRVVKSGGGTE

SEQ ID NO: 111886 - protein, 102 aa, Zea mays subsp. mays
  misc_feature (1)..(102): Ceres Seq. ID no. 12638269
  misc_feature (1)..(56): Homolog of NCBI NO: 25152837 NR Description: Q/N-rich domain Prion like protein PQN-75 (52.6
  misc_feature (1)..(56): Homolog of NCBI NO: 25152832 NR Description: Q/N-rich domain Prion like protein PQN-75
  misc_feature (1)..(56): Homolog of NCBI NO: 25152834 NR Description: Q/N-rich domain Prion like protein PQN-75 (50.5
MTRTRPTGSRSRPVGPSRSATAEVTASPPSPRNSGPATTSPTTTAMIRPCGAPPPGPCCCCCWWYRYSSSPRIIVGADAEIARRVWREVGSGRVVKSGGGTE

SEQ ID NO: 111887 - DNA, 1484 bp, Zea mays subsp. mays
  misc_feature (1)..(1484): Ceres Seq. ID no. 13600617
gttcgaacccgccatggccgcctccaagcccctgcggctacgcctcgcggtgccgctcgccctcgccctcctcctcgcgctcgccctcgtcaccaacttcctctgggcctcatcctcccgacgagtctccccgctgtcggccccgtcttcttccagaacggtgatggggaagcgcgccaaggcagtgtggcgcctcaacgccacgtacgcagacttgccggcgccgcactgggactgggaggagatgcccgcggcgcctgtgccacgcctcgacggggcgtcggtgcagattggggatctcctctacgtcttcgccgggtacgggaacatcgaccatgtccattctcatgttgatgtttataatttcacctctaacacatggacccaaaggtttcatatgcccaaggagatggcgcattctcatttaggaatggcctcagatggcagatacatctatgcagtttcaggacagtatggaccacagtgccgcgcctcgattaatcgcaactttgtttttgacactgagactagagagtggcatgggttgccccctttaccacttcctaggtatgcaccagctactcagctttggcgtgggcggctccatgtgatgggtggaggcaaagaggaccgccatgaacctggattggagcattggagccttgctgtcaaggatggcaaggcactggagaacgagtggcgagctgaagtacccataccacgtggtggacctcatagggcgtgtattgtagctaatgataaactatttgtgattggtggacaagagggagactttatggctaaaccaggatcacctatttttaaatgtgtacggaggcatgaggttgtgtatggcgatgtgtatatgctagatgatggagcgaagtggaaggaactgtctccaatgccaaagccagattcccacattgaatttgcatgggttgtcgttaacaactccatagtaattgttggtggaactacagagaagcatcctatcaccaaaaagatgattcttgttggtgaagtcttccgttttgatttggaagcactgacctggtcagtcattgggcgcatgcctttccgaatcaagacagccttagctgggtactgggaggggtggctctattttacttctgggcagcgggatcgtgggcctgataatccagctccaaagaaagttgttggaagtatgtggaggacgaggctacacttgtgacggtagaagtgaaagtttttctgaaaattgtagatttgcatctgatttctagtccaacagctaggtccctctcagagaattgcttttatcctgtattttgttgtttggaatgcatattatctatttttactagatattttaaatttaacatttaggctatcagcttgtaaattgcctgaatactaacagcaaaacaatgtaaatactgccaaaaaaaaataagaaaaagcttatcgattccgtcgtcctcgaggggggggccggtacg

SEQ ID NO: 111888 - protein, 404 aa, Zea mays subsp. mays
  misc_feature (1)..(404): Ceres Seq. ID no. 15218985
  misc_feature (242)..(303): Pfam Name: Kelch motif Pfam Description: Kelch motif
  misc_feature (79)..(325): Homolog of NCBI NO: 37522944 NR Description: unknown protein [Gloeobacter violaceus]
  misc_feature (65)..(402): Homolog of NCBI NO: 15912245 NR Description: AT3g27220/K17E12_4 [Arabidopsis thaliana]
  misc_feature (65)..(402): Homolog of NCBI NO: 18405273 NR Description: Kelch repeats protein family [Arabidopsis
  misc_feature (24)..(404): Homolog of NCBI NO: 28416695 NR Description: At1g51540 [Arabidopsis thaliana]
  misc_feature (24)..(404): Homolog of NCBI NO: 15217949 NR Description: Kelch repeat-containing protein [Arabidopsis
  misc_feature (3)..(404): Homolog of NCBI NO: 38344229 NR Description: OJ991113_30.6 [Oryza sativa (japonica
  misc_feature (3)..(404): Homolog of NCBI NO: 29150199 NR Description: hypothetical protein [Oryza sativa (indica
FEPAMAASKPLRLRLAVPLALALLLALALVTNFLWASSSRRVSPLSAPSSSRTVMGKRAKAVWRLNATYADLPAPHWDWEEMPAAPVPRLDGASVQIGDLLYVFAGYGNIDHVHSHVDVYNFTSNTWTQRFHMPKEMAHSHLGMASDGRYIYAVSGQYGPQCRASINRNFVFDTETREWHGLPPLPLPRYAPATQLWRGRLHVMGGGKEDRHEPGLEHWSLAVKDGKALENEWRAEVPIPRGGPHRACIVANDKLFVIGGQEGDFMAKPGSPIFKCVRRHEVVYGDVYMLDDGAKWKELSPMPKPDSHIEFAWVVVNNSIVIVGGTTEKHPITKKMILVGEVFRFDLEALTWSVIGRMPFRIKTALAGYWEGWLYFTSGQRDRGPDNPAPKKVVGSMWRTRLHL

SEQ ID NO: 111889 - protein, 400 aa, Zea mays subsp. mays
  misc_feature (1)..(400): Ceres Seq. ID no. 15218986
  misc_feature (238)..(299): Pfam Name: Kelch motif Pfam Description: Kelch motif
  misc_feature (1)..(400): Homolog of NCBI NO: 38344229 NR Description: OJ991113_30.6 [Oryza sativa (japonica
  misc_feature (75)..(321): Homolog of NCBI NO: 37522944 NR Description: unknown protein [Gloeobacter violaceus]
  misc_feature (61)..(398): Homolog of NCBI NO: 18405273 NR Description: Kelch repeats protein family [Arabidopsis
  misc_feature (20)..(400): Homolog of NCBI NO: 15217949 NR Description: Kelch repeat-containing protein [Arabidopsis
  misc_feature (20)..(400): Homolog of NCBI NO: 28416695 NR Description: At1g51540 [Arabidopsis thaliana]
  misc_feature (61)..(398): Homolog of NCBI NO: 15912245 NR Description: AT3g27220/K17E12_4 [Arabidopsis thaliana]
  misc_feature (1)..(400): Homolog of NCBI NO: 29150199 NR Description: hypothetical protein [Oryza sativa (indica
MAASKPLRLRLAVPLALALLLALALVTNFLWASSSRRVSPLSAPSSSRTVMGKRAKAVWRLNATYADLPAPHWDWEEMPAAPVPRLDGASVQIGDLLYVFAGYGNIDHVHSHVDVYNFTSNTWTQRFHMPKEMAHSHLGMASDGRYIYAVSGQYGPQCRASINRNFVFDTETREWHGLPPLPLPRYAPATQLWRGRLHVMGGGKEDRHEPGLEHWSLAVKDGKALENEWRAEVPIPRGGPHRACIVANDKLFVIGGQEGDFMAKPGSPIFKCVRRHEVVYGDVYMLDDGAKWKELSPMPKPDSHIEFAWVVVNNSIVIVGGTTEKHPITKKMILVGEVFRFDLEALTWSVIGRMPFRIKTALAGYWEGWLYFTSGQRDRGPDNPAPKKVVGSMWRTRLHL

SEQ ID NO: 111890 - protein, 350 aa, Zea mays subsp. mays
  misc_feature (1)..(350): Ceres Seq. ID no. 15218987
  misc_feature (188)..(249): Pfam Name: Kelch motif Pfam Description: Kelch motif
  misc_feature (25)..(271): Homolog of NCBI NO: 37522944 NR Description: unknown protein [Gloeobacter violaceus]
  misc_feature (11)..(348): Homolog of NCBI NO: 15912245 NR Description: AT3g27220/K17E12_4 [Arabidopsis thaliana]
  misc_feature (11)..(348): Homolog of NCBI NO: 18405273 NR Description: Kelch repeats protein family [Arabidopsis
  misc_feature (1)..(350): Homolog of NCBI NO: 28416695 NR Description: At1g51540 [Arabidopsis thaliana]
  misc_feature (1)..(350): Homolog of NCBI NO: 15217949 NR Description: Kelch repeat-containing protein [Arabidopsis
  misc_feature (1)..(350): Homolog of NCBI NO: 38344229 NR Description: OJ991113_30.6 [Oryza sativa (japonica
  misc_feature (1)..(350): Homolog of NCBI NO: 29150199 NR Description: hypothetical protein [Oryza sativa (indica
MGKRAKAVWRLNATYADLPAPHWDWEEMPAAPVPRLDGASVQIGDLLYVFAGYGNIDHVHSHVDVYNFTSNTWTQRFHMPKEMAHSHLGMASDGRYIYAVSGQYGPQCRASINRNFVFDTETREWHGLPPLPLPRYAPATQLWRGRLHVMGGGKEDRHEPGLEHWSLAVKDGKALENEWRAEVPIPRGGPHRACIVANDKLFVIGGQEGDFMAKPGSPIFKCVRRHEVVYGDVYMLDDGAKWKELSPMPKPDSHIEFAWVVVNNSIVIVGGTTEKHPITKKMILVGEVFRFDLEALTWSVIGRMPFRIKTALAGYWEGWLYFTSGQRDRGPDNPAPKKVVGSMWRTRLHL

SEQ ID NO: 111891 - DNA, 903 bp, Zea mays subsp. mays
  misc_feature (1)..(903): Ceres Seq. ID no. 14306117
tcttccttttacttttttctgatatttctatcggctacgatctcatgcgttagcgagtgccgccccgcccgcgctatccactcgtctctccgtccccatggccacttatctcaacgcaccgccggcagccaccacgacgactgcaagctgccgccatgccttctccggtggcagcctccgtctactccggccgagccgaccgacgctgcacgtgacgtgccaagccgccgcctcctcccagcagccgtcgtccccgtccaggaggtcagcctgcctcctcggcatcgcgtgcgccgtcctgctccgcccacgtgccgcctccgccgccgaaaccgacgacgagccggccaacaacggctggtggctgaccgagttccccttgcccgtgcccaagatcgtcaacaaggagatcaacaacgcggagacgggcacgcgctccttcctcaagaacggcatctacatggcggacatcgggcccagcttcgcggcgcacgcgtaccggctgcgcagcacggccttcgacctgctggcgctggaggacctgctgggcaaggacgcctccaactacgtcaacaagtacctccgcctcaagtccaccttcatgtactacgacttcgacaagctcatctccgccgccgaagacaagccgcccttcgtcgacctcgccaaccgcctcttcgacagcttcgagacgctccaggaggccgtcacagccaaggacgacgccaggatcggcgaccgctacgccgagacaaagctcatcctccaggagctcatggccaagatggcctagcagaaccacaatttttcattcatatatcatgatgtgtaaatgaatacttgaaactcacaaggggtattgcagaattcccagagcagggaaatacaattatcatgtcagac

SEQ ID NO: 111892 - protein, 274 aa, Zea mays subsp. mays
  misc_feature (1)..(274): Ceres Seq. ID no. 14306118
SSFYFFLIFLSATISCVSECRPARAIHSSLRPHGHLSQRTAGSHHDDCKLPPCLLRWQPPSTPAEPTDAARDVPSRRLLPAAVVPVQEVSLPPRHRVRRPAPPTCRLRRRNRRRAGQQRLVADRVPLARAQDRQQGDQQRGDGHALLPQERHLHGGHRAQLRGARVPAAQHGLRPAGAGGPAGQGRLQLRQQVPPPQVHLHVLRLRQAHLRRRRQAALRRPRQPPLRQLRDAPGGRHSQGRRQDRRPLRRDKAHPPGAHGQDGLAEPQFFIHIS

SEQ ID NO: 111893 - protein, 231 aa, Zea mays subsp. mays
  misc_feature (1)..(231): Ceres Seq. ID no. 14306119
  misc_feature (28)..(231): Pfam Name: Oxygen evolving enhancer protein 3 (PsbQ) Pfam Description: Oxygen evolving enhancer protein 3 (PsbQ)
  misc_feature (41)..(231): Homolog of NCBI NO: 21537394 NR Description: unknown [Arabidopsis thaliana]
  misc_feature (41)..(231): Homolog of NCBI NO: 18395819 NR Description: PsbQ domain protein family, putative [Arabidopsis
  misc_feature (1)..(231): Homolog of NCBI NO: 34915502 NR Description: hypothetical protein~similar to Arabidopsis
MATYLNAPPAATTTTASCRHAFSGGSLRLLRPSRPTLHVTCQAAASSQQPSSPSRRSACLLGIACAVLLRPRAASAAETDDEPANNGWWLTEFPLPVPKIVNKEINNAETGTRSFLKNGIYMADIGPSFAAHAYRLRSTAFDLLALEDLLGKDASNYVNKYLRLKSTFMYYDFDKLISAAEDKPPFVDLANRLFDSFETLQEAVTAKDDARIGDRYAETKLILQELMAKMA

SEQ ID NO: 111894 - DNA, 918 bp, Zea mays subsp. mays
  misc_feature (1)..(918): Ceres Seq. ID no. 14306120
gacacccgcgcgcgccctcgcgcggacaaagccgtgaggggcagagccgagggaggcggggctgtgccggccacgcaatgcagcagccggagcctgccgatctgccgggctgggccttcccgccacgggcgggaccggcgcctgccgccgcgcgcggggcgcaccaccgccgggccagatctgaggttgccttccgcctgccggacgacctcggcctcggcggcggcggcggccccgatggcgacgccttcgacgagatcggttcggaggacgacctcttctccaccttcatggacatcgagaagatctccacctccgggccctccgaccgcgccgccgagaactcgtctccgccgcgccccaagcaccgccacagcagctccgtcgatggctcgggcttcttcttctcacccggcgccggcggtggcgcggggaaggatgccgccgcgtcgctggctgaggtcttggaggccaagaagtccatgactcccgagcaactggccgagctcgccgccatcgaccccaagcgcgccaagaggtaccgcctcctcgatcgcggcaatccatccacttctttagttacggaggtggcgaggaattgactaaggcgtcgaggacaatcatgtgctcatgctttatgatgggaatggctggagattaataaggtgtttggtttgaggaataagctatctagaataagttgatccatcatcactttattagtcagttagcattaacatgaaaaataatgtcgtcccaccaaattaaatttgaggaatggacttatgacgcaccaacccatcttggatggagtgaacacatccttaaggtgtttggtttaggaatgaggtggtctatttcttctcacttctcacttttttatttggttcgtggaataaaatgggttgatccatcacc

SEQ ID NO: 111895 - protein, 199 aa, Zea mays subsp. mays
  misc_feature (1)..(199): Ceres Seq. ID no. 14306121
  misc_feature (43)..(191): Homolog of NCBI NO: 21740783 NR Description: OSJNBa0067K08.2 [Oryza sativa (japonica
  misc_feature (29)..(191): Homolog of NCBI NO: 25406943 NR Description: hypothetical protein [imported] - Arabidopsis
  misc_feature (29)..(191): Homolog of NCBI NO: 15222213 NR Description: bZIP protein [Arabidopsis thaliana]
  misc_feature (29)..(191): Homolog of NCBI NO: 17065884 NR Description: AtbZIP transcription factor [Arabidopsis thaliana]
  misc_feature (42)..(142): Homolog of NCBI NO: 34914582 NR Description: P0455H0310.26 [Oryza sativa (japonica
  misc_feature (51)..(179): Homolog of NCBI NO: 7489564 NR Description: probable transcription activator RF2a - rice
  misc_feature (97)..(191): Homolog of NCBI NO: 34394739 NR Description: putative transcription activator RF2a
  misc_feature (28)..(179): Homolog of NCBI NO: 25453519 NR Description: b-Zip DNA binding protein [imported] -
  misc_feature (28)..(179): Homolog of NCBI NO: 15226727 NR Description: bZip DNA binding protein [Arabidopsis thaliana]
  misc_feature (47)..(191): Homolog of NCBI NO: 39579226 NR Description: bZIP transcription factor RF2b
HPRAPSRGQSREGQSRGRRGCAGHAMQQPEPADLPGWAFPPRAGPAPAAARGAHHRRARSEVAFRLPDDLGLGGGGGPDGDAFDEIGSEDDLFSTFMDIEKISTSGPSDRAAENSSPPRPKHRHSSSVDGSGFFFSPGAGGGAGKDAAASLAEVLEAKKSMTPEQLAELAAIDPKRAKRYRLLDRGNPSTSLVTEVARN

SEQ ID NO: 111896 - protein, 174 aa, Zea mays subsp. mays
  misc_feature (1)..(174): Ceres Seq. ID no. 14306122
  misc_feature (18)..(166): Homolog of NCBI NO: 21740783 NR Description: OSJNBa0067K08.2 [Oryza sativa (japonica
  misc_feature (4)..(166): Homolog of NCBI NO: 25406943 NR Description: hypothetical protein [imported] - Arabidopsis
  misc_feature (4)..(166): Homolog of NCBI NO: 15222213 NR Description: bZIP protein [Arabidopsis thaliana]
  misc_feature (4)..(166): Homolog of NCBI NO: 17065884 NR Description: AtbZIP transcription factor [Arabidopsis thaliana]
  misc_feature (17)..(117): Homolog of NCBI NO: 34914582 NR Description: P0455H0310.26 [Oryza sativa (japonica
  misc_feature (26)..(154): Homolog of NCBI NO: 7489564 NR Description: probable transcription activator RF2a - rice
  misc_feature (72)..(166): Homolog of NCBI NO: 34394739 NR Description: putative transcription activator RF2a
  misc_feature (3)..(154): Homolog of NCBI NO: 25453519 NR Description: b-Zip DNA binding protein [imported] -
  misc_feature (3)..(154): Homolog of NCBI NO: 15226727 NR Description: bZip DNA binding protein [Arabidopsis thaliana]
  misc_feature (22)..(166): Homolog of NCBI NO: 39579226 NR Description: bZIP transcription factor RF2b
MQQPEPADLPGWAFPPRAGPAPAAARGAHHRRARSEVAFRLPDDLGLGGGGGPDGDAFDEIGSEDDLFSTFMDIEKISTSGPSDRAAENSSPPRPKHRHSSSVDGSGFFFSPGAGGGAGKDAAASLAEVLEAKKSMTPEQLAELAAIDPKRAKRYRLLDRGNPSTSLVTEVARN

SEQ ID NO: 111897 - protein, 161 aa, Zea mays subsp. mays
  misc_feature (1)..(161): Ceres Seq. ID no. 14306123
  misc_feature (33)..(161): Pfam Name: Progesterone receptor Pfam Description: Progesterone receptor
  misc_feature (33)..(161): Homolog of NCBI NO: 17939907 NR Description: UL36 protein [Pseudorabies virus]
  misc_feature (1)..(161): Homolog of NCBI NO: 17551258 NR Description: COLlagen structural gene (col-41) [Caenorhabditis
  misc_feature (49)..(161): Homolog of NCBI NO: 1657601 NR Description: unknown [Nannocystis exedens]
  misc_feature (1)..(161): Homolog of NCBI NO: 141449 NR Description: Hypothetical 35.5 kDa protein in transposon
DTRARPRADKAVRGRAEGGGAVPATQCSSRSLPICRAGPSRHGRDRRLPPRAGRTTAGPDLRLPSACRTTSASAAAAAPMATPSTRSVRRTTSSPPSWTSRRSPPPGPPTAPPRTRLRRAPSTATAAPSMARASSSHPAPAVARGRMPPRRWLRSWRPRSP

SEQ ID NO: 111898 - DNA, 1226 bp, Zea mays subsp. mays
  misc_feature (1)..(1226): Ceres Seq. ID no. 13586843
agtgcgtgccagtcctccggcccaaaccccccgcacccaacccccagccccggcaaccgatggcggggtccgcggccgacgcggagcaggagcaaaagcgggcagcggcggcggcgtacgactacgagggcgacgcgcgctgggccgagtactggtccaacgtactcgtcccgccgaacctcgcctcccgccccgacgtcgtcgaccacttgaagcgcaagttctaccagcgctacatcgaccatgatctggtcgttgagccaaggtcattcaccagttccactcaggccagcaggccagatgtaaggtcttcgtcttcgtcatccaccgagaacgtcagggagcgtaattcaggatctactgcaaggtcagcgcctccaccaccgccaccaacacatacagacagtgccgtcaaccctttacggttcgacgcacgcactatacatttctccatcaacgcatggatacttgtggttgctggtctgggaatgcttcctattttgccaaaacaccttgccgacagagcttgcaaactttcacttctgggaacaatattgtcatcagggtattctctatacagtacttatgggaaaccaagagcatggaacatgccagcaattcaagcttggttgcagtctatacttgcaacaaaggattttatccatttaatgttctcttctatgctcttcacatcccaattgcacttgaagattgctgcactacctgtgttttgctgggcgcttgaccatgttgccagattcttaaggcgtaattttgcgcgatcctctttctataggagatacctggaagaaccttgtctttgggtagagacaaataacactacactaagcctccttagttcgaatgcggagattgccttgggttttcttctgatcatatcactgttctcgtggcgccgtagcatagttcagacattcatgtactggcaggtgttgaagctgatgtaccatgctcccgtgacatccagctatcaccagagtacctgggcgaaaatcggccggattgtgaacccgtacatccaccgctacgctccgttcctccagacgcccatttctgcgatccaaagatggtggttcaggtagagagacaggccgagctgcaaacatagcacagtcgagtcgccgcgttcttatgtaatgctgtaaccttttcccagaattctggagggccattatcataacaagaaggtttttagctgcagggcc

SEQ ID NO: 111899 - protein, 366 aa, Zea mays subsp. mays
  misc_feature (1)..(366): Ceres Seq. ID no. 13586844
  misc_feature (123)..(360): Pfam Name: Uncharacterised protein family (UPF0121) Pfam Description: Uncharacterised protein family (UPF0121)
  misc_feature (140)..(195): Homolog of NCBI NO: 34911634 NR Description: P0039G05.19 [Oryza sativa (japonica
  misc_feature (255)..(292): Homolog of NCBI NO: 4894630 NR Description: NT6 [Nicotiana tabacum]
  misc_feature (22)..(236): Homolog of NCBI NO: 34912430 NR Description: P0681B11.19 [Oryza sativa (japonica
  misc_feature (20)..(366): Homolog of NCBI NO: 18396183 NR Description: expressed protein [Arabidopsis thaliana]
CVPVLRPKPPAPNPQPRQPMAGSAADAEQEQKRAAAAAYDYEGDARWAEYWSNVLVPPNLASRPDVVDHLKRKFYQRYIDHDLVVEPRSFTSSTQASRPDVRSSSSSSTENVRERNSGSTARSAPPPPPPTHTDSAVNPLRFDARTIHFSINAWILVVAGLGMLPILPKHLADRACKLSLLGTILSSGYSLYSTYGKPRAWNMPAIQAWLQSILATKDFIHLMFSSMLFTSQLHLKIAALPVFCWALDHVARFLRRNFARSSFYRRYLEEPCLWVETNNTTLSLLSSNAEIALGFLLIISLFSWRRSIVQTFMYWQVLKLMYHAPVTSSYHQSTWAKIGRIVNPYIHRYAPFLQTPISAIQRWWFR

SEQ ID NO: 111900 - protein, 347 aa, Zea mays subsp. mays
  misc_feature (1)..(347): Ceres Seq. ID no. 13586845
  misc_feature (104)..(341): Pfam Name: Uncharacterised protein family (UPF0121) Pfam Description: Uncharacterised protein family (UPF0121)
  misc_feature (121)..(176): Homolog of NCBI NO: 34911634 NR Description: P0039G05.19 [Oryza sativa (japonica
  misc_feature (236)..(273): Homolog of NCBI NO: 4894630 NR Description: NT6 [Nicotiana tabacum]
  misc_feature (3)..(217): Homolog of NCBI NO: 34912430 NR Description: P0681B11.19 [Oryza sativa (japonica
  misc_feature (1)..(347): Homolog of NCBI NO: 18396183 NR Description: expressed protein [Arabidopsis thaliana]
MAGSAADAEQEQKRAAAAAYDYEGDARWAEYWSNVLVPPNLASRPDVVDHLKRKFYQRYIDHDLVVEPRSFTSSTQASRPDVRSSSSSSTENVRERNSGSTARSAPPPPPPTHTDSAVNPLRFDARTIHFSINAWILVVAGLGMLPILPKHLADRACKLSLLGTILSSGYSLYSTYGKPRAWNMPAIQAWLQSILATKDFIHLMFSSMLFTSQLHLKIAALPVFCWALDHVARFLRRNFARSSFYRRYLEEPCLWVETNNTTLSLLSSNAEIALGFLLIISLFSWRRSIVQTFMYWQVLKLMYHAPVTSSYHQSTWAKIGRIVNPYIHRYAPFLQTPISAIQRWWFR

SEQ ID NO: 111901 - protein, 204 aa, Zea mays subsp. mays
  misc_feature (1)..(204): Ceres Seq. ID no. 13586846
  misc_feature (1)..(198): Pfam Name: Uncharacterised protein family (UPF0121) Pfam Description: Uncharacterised protein family (UPF0121)
  misc_feature (1)..(33): Homolog of NCBI NO: 34911634 NR Description: P0039G05.19 [Oryza sativa (japonica
  misc_feature (93)..(130): Homolog of NCBI NO: 4894630 NR Description: NT6 [Nicotiana tabacum]
  misc_feature (1)..(74): Homolog of NCBI NO: 34912430 NR Description: P0681B11.19 [Oryza sativa (japonica
  misc_feature (1)..(204): Homolog of NCBI NO: 18396183 NR Description: expressed protein [Arabidopsis thaliana]
MLPILPKHLADRACKLSLLGTILSSGYSLYSTYGKPRAWNMPAIQAWLQSILATKDFIHLMFSSMLFTSQLHLKIAALPVFCWALDHVARFLRRNFARSSFYRRYLEEPCLWVETNNTTLSLLSSNAEIALGFLLIISLFSWRRSIVQTFMYWQVLKLMYHAPVTSSYHQSTWAKIGRIVNPYIHRYAPFLQTPISAIQRWWFR

SEQ ID NO: 111902 - DNA, 1223 bp, Zea mays subsp. mays
  misc_feature (1)..(1223): Ceres Seq. ID no. 13599131
  misc_feature: MA Experiment ID: 20000534 Result: Up-regulated in Transcription
  misc_feature: MA Experiment 20000534 PARAMETER Experiment Name: Zm_Hybrid_Pollen_P Parameter: Age (day) Value: 8
  misc_feature: MA Experiment 20000534 PARAMETER Experiment Name: Zm_Hybrid_Pollen_P Parameter: Organism Value: Zea mays
  misc_feature: MA Experiment 20000534 PARAMETER Experiment Name: Zm_Hybrid_Pollen_P Parameter: Plant Line Value: 35A19
  misc_feature: MA Experiment 20000534 PARAMETER Experiment Name: Zm_Hybrid_Pollen_P Parameter: Tissue Value: Pollen vs. Aerial
ataacccccaccccagccgaagccatccgatacgggagggcccatccagcggcccaggtcacgctctcacgccacgcacgcatgctcccccgcctgctcaacgggccccaccgcctgctccttggcgggccccacgcctcgggcgccgcgcccctccaccgccgccgcgtcctcgccggccgccgggccatgtccgcctccgcctcgcccgcgcccgcgcccgggcagaagcgtccgctgcgcggggtggtcttcgacatggacggcaccctcacggtgccagtcatcgatttcccggccatgtaccgcgaggtgctcggcggggacgccgcctacgccgcggcgcgcggcgcggggggaggctccgtcgacatcctccactgcatcgaggactgggcgcccgacaagcagcgccacgcgtacgaggtcatcgcgcgcttcgagcgggagggcctcgaccgcctccagatcatgcccggggcctcggagctgtgtggcttcctggacgcgaagcagatcagaagaggtttgatcacccgtaatgtgaaggacgcagttgatttgttccaccaaagatttggtatgacgttcactcctgcactgagcagagaatttcgcccctataaaccaaatcctgctccactgcttcacatatgctccgcttggaacattccaccacacgaagtgatcatggttggcgacagtctcaaggatgatgttgtttgtggaaagagggcaggagctttcacttgcttgcttgatgaaacggggcgatatggtcctcacgattctttacctgaggaagtaaaacctgacttcaaggtgtcctcactgacagaagtattcgctgtgctggaggagcacttcgatttggcaccagtgcctgacgagagtagaatatgacagggaagttttattggacctcccttctaaggtgaaatcggctacccaaccaacagcttgaataatgtggatgacgttgatgggactttcaagtatcagaagcccctgctagatgagcctgcagccagagcccagaaggacgatggctgttccaaaggtggattgaatgtatttggaaaggcaatgaagtgattcagttcgttgtaaatctattatattatgttgccccagactaaaccagcttgtgtggtttagtgactgaaatgaccacacgtatctggagattcagaatataacaatcgatttccacgggagggggg

SEQ ID NO: 111903 - protein, 300 aa, Zea mays subsp. mays
  misc_feature (1)..(300): Ceres Seq. ID no. 15222518
  misc_feature (80)..(256): Pfam Name: haloacid dehalogenase-like hydrolase Pfam Description: haloacid dehalogenase-like hydrolase
  misc_feature (51)..(256): Homolog of NCBI NO: 23104575 NR Description: hypothetical protein [Azotobacter vinelandii]
  misc_feature (80)..(254): Homolog of NCBI NO: 26991442 NR Description: hydrolase, haloacid dehalogenase-like family
  misc_feature (122)..(224): Homolog of NCBI NO: 21622506 NR Description: conserved hypothetical protein [Neurospora crassa]
  misc_feature (80)..(276): Homolog of NCBI NO: 24375526 NR Description: hydrolase, haloacid dehalogenase-like family
  misc_feature (87)..(254): Homolog of NCBI NO: 28871791 NR Description: HAD-superfamily hydrolase
  misc_feature (80)..(254): Homolog of NCBI NO: 23470846 NR Description: hypothetical protein [Pseudomonas syringae pv.
  misc_feature (80)..(286): Homolog of NCBI NO: 6324705 NR Description: Hypothetical ORF; Yor131cp [Saccharomyces
  misc_feature (77)..(293): Homolog of NCBI NO: 25408252 NR Description: hypothetical protein At2g33250 [imported] -
  misc_feature (77)..(293): Homolog of NCBI NO: 30685622 NR Description: haloacid dehalogenase-like hydrolase family
  misc_feature (77)..(293): Homolog of NCBI NO: 20196855 NR Description: unknown protein [Arabidopsis thaliana]
ITPTPAEAIRYGRAHPAAQVTLSRHARMLPRLLNGPHRLLLGGPHASGAAPLHRRRVLAGRRAMSASASPAPAPGQKRPLRGVVFDMDGTLTVPVIDFPAMYREVLGGDAAYAAARGAGGGSVDILHCIEDWAPDKQRHAYEVIARFEREGLDRLQIMPGASELCGFLDAKQIRRGLITRNVKDAVDLFHQRFGMTFTPALSREFRPYKPNPAPLLHICSAWNIPPHEVIMVGDSLKDDVVCGKRAGAFTCLLDETGRYGPHDSLPEEVKPDFKVSSLTEVFAVLEEHFDLAPVPDESRI

SEQ ID NO: 111904 - protein, 273 aa, Zea mays subsp. mays
  misc_feature (1)..(273): Ceres Seq. ID no. 15222519
  misc_feature (53)..(229): Pfam Name: haloacid dehalogenase-like hydrolase Pfam Description: haloacid dehalogenase-like hydrolase
  misc_feature (24)..(229): Homolog of NCBI NO: 23104575 NR Description: hypothetical protein [Azotobacter vinelandii]
  misc_feature (53)..(227): Homolog of NCBI NO: 26991442 NR Description: hydrolase, haloacid dehalogenase-like family
  misc_feature (95)..(197): Homolog of NCBI NO: 21622506 NR Description: conserved hypothetical protein [Neurospora crassa]
  misc_feature (53)..(249): Homolog of NCBI NO: 24375526 NR Description: hydrolase, haloacid dehalogenase-like family
  misc_feature (60)..(227): Homolog of NCBI NO: 28871791 NR Description: HAD-superfamily hydrolase
  misc_feature (53)..(227): Homolog of NCBI NO: 23470846 NR Description: hypothetical protein [Pseudomonas syringae pv.
  misc_feature (53)..(259): Homolog of NCBI NO: 6324705 NR Description: Hypothetical ORF; Yor131cp [Saccharomyces
  misc_feature (50)..(266): Homolog of NCBI NO: 25408252 NR Description: hypothetical protein At2g33250 [imported] -
  misc_feature (50)..(266): Homolog of NCBI NO: 30685622 NR Description: haloacid dehalogenase-like hydrolase family
  misc_feature (50)..(266): Homolog of NCBI NO: 20196855 NR Description: unknown protein [Arabidopsis thaliana]
MLPRLLNGPHRLLLGGPHASGAAPLHRRRVLAGRRAMSASASPAPAPGQKRPLRGVVFDMDGTLTVPVIDFPAMYREVLGGDAAYAAARGAGGGSVDILHCIEDWAPDKQRHAYEVIARFEREGLDRLQIMPGASELCGFLDAKQIRRGLITRNVKDAVDLFHQRFGMTFTPALSREFRPYKPNPAPLLHICSAWNIPPHEVIMVGDSLKDDVVCGKRAGAFTCLLDETGRYGPHDSLPEEVKPDFKVSSLTEVFAVLEEHFDLAPVPDESRI

SEQ ID NO: 111905 - protein, 237 aa, Zea mays subsp. mays
  misc_feature (1)..(237): Ceres Seq. ID no. 15222520
  misc_feature (17)..(193): Pfam Name: haloacid dehalogenase-like hydrolase Pfam Description: haloacid dehalogenase-like hydrolase
  misc_feature (1)..(193): Homolog of NCBI NO: 23104575 NR Description: hypothetical protein [Azotobacter vinelandii]
  misc_feature (17)..(191): Homolog of NCBI NO: 26991442 NR Description: hydrolase, haloacid dehalogenase-like family
  misc_feature (59)..(161): Homolog of NCBI NO: 21622506 NR Description: conserved hypothetical protein [Neurospora crassa]
  misc_feature (17)..(213): Homolog of NCBI NO: 24375526 NR Description: hydrolase, haloacid dehalogenase-like family
  misc_feature (24)..(191): Homolog of NCBI NO: 28871791 NR Description: HAD-superfamily hydrolase
  misc_feature (17)..(191): Homolog of NCBI NO: 23470846 NR Description: hypothetical protein [Pseudomonas syringae pv.
  misc_feature (17)..(223): Homolog of NCBI NO: 6324705 NR Description: Hypothetical ORF; Yor131cp [Saccharomyces
  misc_feature (14)..(230): Homolog of NCBI NO: 25408252 NR Description: hypothetical protein At2g33250 [imported] -
  misc_feature (14)..(230): Homolog of NCBI NO: 30685622 NR Description: haloacid dehalogenase-like hydrolase family
  misc_feature (14)..(230): Homolog of NCBI NO: 20196855 NR Description: unknown protein [Arabidopsis thaliana]
MSASASPAPAPGQKRPLRGVVFDMDGTLTVPVIDFPAMYREVLGGDAAYAAARGAGGGSVDILHCIEDWAPDKQRHAYEVIARFEREGLDRLQIMPGASELCGFLDAKQIRRGLITRNVKDAVDLFHQRFGMTFTPALSREFRPYKPNPAPLLHICSAWNIPPHEVIMVGDSLKDDVVCGKRAGAFTCLLDETGRYGPHDSLPEEVKPDFKVSSLTEVFAVLEEHFDLAPVPDESRI

SEQ ID NO: 111906 - DNA, 831 bp, Zea mays subsp. mays
  misc_feature (1)..(831): Ceres Seq. ID no. 12638203
  misc_feature: MA Experiment ID: 108522 Result: Down-regulated in Transcription
  misc_feature: MA Experiment 108522 PARAMETER Experiment Name: Zm_42deg_Heat_P Parameter: Age (day) Value: 8
  misc_feature: MA Experiment 108522 PARAMETER Experiment Name: Zm_42deg_Heat_P Parameter: Organism Value: Zea mays
  misc_feature: MA Experiment 108522 PARAMETER Experiment Name: Zm_42deg_Heat_P Parameter: Plant Line Value: 35A19
  misc_feature: MA Experiment 108522 PARAMETER Experiment Name: Zm_42deg_Heat_P Parameter: Temperature (deg C) Value: 42 vs. 22
  misc_feature: MA Experiment 108522 PARAMETER Experiment Name: Zm_42deg_Heat_P Parameter: Timepoint (hr) Value: 1
  misc_feature: MA Experiment 108522 PARAMETER Experiment Name: Zm_42deg_Heat_P Parameter: Tissue Value: Aerial
  misc_feature: MA Experiment ID: 108559 Result: Down-regulated in Transcription
  misc_feature: MA Experiment 108559 PARAMETER Experiment Name: Zm_5mM_NO_P Parameter: Age (day) Value: 8
  misc_feature: MA Experiment 108559 PARAMETER Experiment Name: Zm_5mM_NO_P Parameter: Organism Value: Zea mays
  misc_feature: MA Experiment 108559 PARAMETER Experiment Name: Zm_5mM_NO_P Parameter: Plant Line Value: 35A19
  misc_feature: MA Experiment 108559 PARAMETER Experiment Name: Zm_5mM_NO_P Parameter: Timepoint (hr) Value: 12
  misc_feature: MA Experiment 108559 PARAMETER Experiment Name: Zm_5mM_NO_P Parameter: Tissue Value: Aerial
  misc_feature: MA Experiment 108559 PARAMETER Experiment Name: Zm_5mM_NO_P Parameter: Treatment Value: 5mM NO vs. No Treatment
  misc_feature: MA Experiment ID: 20000535 Result: Down-regulated in Transcription
  misc_feature: MA Experiment 20000535 PARAMETER Experiment Name: Zm_Hybrid_Seed_Dev_P Parameter: DAP Value: 30 vs. 12
  misc_feature: MA Experiment 20000535 PARAMETER Experiment Name: Zm_Hybrid_Seed_Dev_P Parameter: Organism Value: Zea mays
  misc_feature: MA Experiment 20000535 PARAMETER Experiment Name: Zm_Hybrid_Seed_Dev_P Parameter: Plant Line Value: 35A19
  misc_feature: MA Experiment 20000535 PARAMETER Experiment Name: Zm_Hybrid_Seed_Dev_P Parameter: Tissue Value: Embryo vs. Unfert Floret
agttttcgggttcttggataggagaaagcggggcgctcaattccccccctcctgatccttgttccttgatcgccgccatgagcaacacgctgcttcgagtctacccttccgacctgaagatgccattcgagctcaggaagcagaactcagcgtgtcttgagctcgtcaacaagaccgaccggtgggtggctttcaaggtcaagacgacgaaccctaggaagtactcggtgcgctctgcctccggtgtcgtgccgcccaggggatcctgtggcatcacaataacgatgcaagcgcccaaggagatgcccccggactaccactgcaaggacaagtttcttgttcagagcattgctgtggaggaggggacgacgcagaaggacattgtccctgacatggatgattctacatccaagttggaactggaaagaagatacgcacaggaaaacaagaagattcagaaagagctggatctcctccggaaaacaaaggcgtctcctcggggcttctctgcgtttgtgctgcttgtcttcttgttatcttcacttcttggatacctgatgttcggaagcagagcttagcaagttagcagctaatggctgcacatcatttgcggcaccggcagcggtacggctctatcggcttttgtctattgctccttttagtacagtgtacagatatatacattaatagtgaagtagtcagtacataacagatatatagggcgttcttgggtttcaagtgtccataagaacatatcttcagttttgaaatatgtgtgtgtttgctagtaccgttcatgtttatactctatccaaatatatgatgtttact

SEQ ID NO: 111907 - protein, 191 aa, Zea mays subsp. mays
  misc_feature (1)..(191): Ceres Seq. ID no. 12638204
  misc_feature (26)..(131): Homolog of NCBI NO: 38345482 NR Description: OSJNBa0010H02.20 [Oryza sativa (japonica
  misc_feature (26)..(149): Homolog of NCBI NO: 34907216 NR Description: P0504E02.2 [Oryza sativa (japonica
  misc_feature (26)..(131): Homolog of NCBI NO: 11288307 NR Description: 27k vesicle-associated membrane
  misc_feature (26)..(131): Homolog of NCBI NO: 15225415 NR Description: putative VAMP-associated protein
  misc_feature (26)..(131): Homolog of NCBI NO: 21554053 NR Description: putative VAMP-associated protein [Arabidopsis
  misc_feature (23)..(131): Homolog of NCBI NO: 18411661 NR Description: putative protein
  misc_feature (23)..(131): Homolog of NCBI NO: 11288305 NR Description: hypothetical protein T4C21.10 - Arabidopsis
  misc_feature (30)..(131): Homolog of NCBI NO: 21592874 NR Description: putative proline-rich protein [Arabidopsis
  misc_feature (30)..(131): Homolog of NCBI NO: 18411240 NR Description: putative proline-rich protein
  misc_feature (136)..(186): Homolog of NCBI NO: 38345482 NR Description: OSJNBa0010H02.20 [Oryza sativa (japonica
FSGSWIGESGALNSPPPDPCSLIAAMSNTLLRVYPSDLKMPFELRKQNSACLELVNKTDRWVAFKVKTTNPRKYSVRSASGVVPPRGSCGITITMQAPKEMPPDYHCKDKFLVQSIAVEEGTTQKDIVPDMDDSTSKLELERRYAQENKKIQKELDLLRKTKASPRGFSAFVLLVFLLSSLLGYLMFGSRA

SEQ ID NO: 111908 - protein, 166 aa, Zea mays subsp. mays
  misc_feature (1)..(166): Ceres Seq. ID no. 12638205
  misc_feature (1)..(124): Homolog of NCBI NO: 34907216 NR Description: P0504E02.2 [Oryza sativa (japonica
  misc_feature (1)..(106): Homolog of NCBI NO: 11288307 NR Description: 27k vesicle-associated membrane
  misc_feature (1)..(106): Homolog of NCBI NO: 15225415 NR Description: putative VAMP-associated protein
  misc_feature (1)..(106): Homolog of NCBI NO: 21554053 NR Description: putative VAMP-associated protein [Arabidopsis
  misc_feature (1)..(106): Homolog of NCBI NO: 18411661 NR Description: putative protein
  misc_feature (1)..(106): Homolog of NCBI NO: 11288305 NR Description: hypothetical protein T4C21.10 - Arabidopsis
  misc_feature (5)..(106): Homolog of NCBI NO: 21592874 NR Description: putative proline-rich protein [Arabidopsis
  misc_feature (5)..(106): Homolog of NCBI NO: 18411240 NR Description: putative proline-rich protein
  misc_feature (111)..(161): Homolog of NCBI NO: 38345482 NR Description: OSJNBa0010H02.20 [Oryza sativa (japonica
  misc_feature (1)..(106): Homolog of NCBI NO: 38345482 NR Description: OSJNBa0010H02.20 [Oryza sativa (japonica
MSNTLLRVYPSDLKMPFELRKQNSACLELVNKTDRWVAFKVKTTNPRKYSVRSASGVVPPRGSCGITITMQAPKEMPPDYHCKDKFLVQSIAVEEGTTQKDIVPDMDDSTSKLELERRYAQENKKIQKELDLLRKTKASPRGFSAFVLLVFLLSSLLGYLMFGSRA

SEQ ID NO: 111909 - protein, 152 aa, Zea mays subsp. mays
  misc_feature (1)..(152): Ceres Seq. ID no. 12638206
  misc_feature (1)..(110): Homolog of NCBI NO: 34907216 NR Description: P0504E02.2 [Oryza sativa (japonica
  misc_feature (1)..(92): Homolog of NCBI NO: 11288307 NR Description: 27k vesicle-associated membrane
  misc_feature (1)..(92): Homolog of NCBI NO: 15225415 NR Description: putative VAMP-associated protein
  misc_feature (1)..(92): Homolog of NCBI NO: 21554053 NR Description: putative VAMP-associated protein [Arabidopsis
  misc_feature (1)..(92): Homolog of NCBI NO: 18411661 NR Description: putative protein
  misc_feature (1)..(92): Homolog of NCBI NO: 11288305 NR Description: hypothetical protein T4C21.10 - Arabidopsis
  misc_feature (1)..(92): Homolog of NCBI NO: 21592874 NR Description: putative proline-rich protein [Arabidopsis
  misc_feature (1)..(92): Homolog of NCBI NO: 18411240 NR Description: putative proline-rich protein
  misc_feature (97)..(147): Homolog of NCBI NO: 38345482 NR Description: OSJNBa0010H02.20 [Oryza sativa (japonica
  misc_feature (1)..(92): Homolog of NCBI NO: 38345482 NR Description: OSJNBa0010H02.20 [Oryza sativa (japonica
MPFELRKQNSACLELVNKTDRWVAFKVKTTNPRKYSVRSASGVVPPRGSCGITITMQAPKEMPPDYHCKDKFLVQSIAVEEGTTQKDIVPDMDDSTSKLELERRYAQENKKIQKELDLLRKTKASPRGFSAFVLLVFLLSSLLGYLMFGSRA

SEQ ID NO: 111910 - DNA, 700 bp, Zea mays subsp. mays
  misc_feature (1)..(700): Ceres Seq. ID no. 14306156
  misc_feature: MA Experiment ID: 108504 Result: Up-regulated in Transcription
  misc_feature: MA Experiment 108504 PARAMETER Experiment Name: Zm_Drought_P Parameter: Age (day) Value: 8
  misc_feature: MA Experiment 108504 PARAMETER Experiment Name: Zm_Drought_P Parameter: Organism Value: Zea mays
  misc_feature: MA Experiment 108504 PARAMETER Experiment Name: Zm_Drought_P Parameter: Plant Line Value: 35A19
  misc_feature: MA Experiment 108504 PARAMETER Experiment Name: Zm_Drought_P Parameter: Timepoint (hr) Value: 12
  misc_feature: MA Experiment 108504 PARAMETER Experiment Name: Zm_Drought_P Parameter: Tissue Value: Aerial
  misc_feature: MA Experiment 108504 PARAMETER Experiment Name: Zm_Drought_P Parameter: Treatment Value: Drought vs. No Drought
  misc_feature: MA Experiment ID: 108522 Result: Up-regulated in Transcription
  misc_feature: MA Experiment 108522 PARAMETER Experiment Name: Zm_42deg_Heat_P Parameter: Age (day) Value: 8
  misc_feature: MA Experiment 108522 PARAMETER Experiment Name: Zm_42deg_Heat_P Parameter: Organism Value: Zea mays
  misc_feature: MA Experiment 108522 PARAMETER Experiment Name: Zm_42deg_Heat_P Parameter: Plant Line Value: 35A19
  misc_feature: MA Experiment 108522 PARAMETER Experiment Name: Zm_42deg_Heat_P Parameter: Temperature (deg C) Value: 42 vs. 22
  misc_feature: MA Experiment 108522 PARAMETER Experiment Name: Zm_42deg_Heat_P Parameter: Timepoint (hr) Value: 1
  misc_feature: MA Experiment 108522 PARAMETER Experiment Name: Zm_42deg_Heat_P Parameter: Tissue Value: Aerial
  misc_feature: MA Experiment ID: 108523 Result: Up-regulated in Transcription
  misc_feature: MA Experiment 108523 PARAMETER Experiment Name: Zm_42deg_Heat_P Parameter: Age (day) Value: 8
  misc_feature: MA Experiment 108523 PARAMETER Experiment Name: Zm_42deg_Heat_P Parameter: Organism Value: Zea mays
  misc_feature: MA Experiment 108523 PARAMETER Experiment Name: Zm_42deg_Heat_P Parameter: Plant Line Value: 35A19
  misc_feature: MA Experiment 108523 PARAMETER Experiment Name: Zm_42deg_Heat_P Parameter: Temperature (deg C) Value: 42 vs. 22
  misc_feature: MA Experiment 108523 PARAMETER Experiment Name: Zm_42deg_Heat_P Parameter: Timepoint (hr) Value: 6
  misc_feature: MA Experiment 108523 PARAMETER Experiment Name: Zm_42deg_Heat_P Parameter: Tissue Value: Aerial
  misc_feature: MA Experiment ID: 108533 Result: Up-regulated in Transcription
  misc_feature: MA Experiment 108533 PARAMETER Experiment Name: Zm_4deg_Cold_P Parameter: Age (hr) Value: 8
  misc_feature: MA Experiment 108533 PARAMETER Experiment Name: Zm_4deg_Cold_P Parameter: Organism Value: Zea mays
  misc_feature: MA Experiment 108533 PARAMETER Experiment Name: Zm_4deg_Cold_P Parameter: Plant Line Value: 35A19
  misc_feature: MA Experiment 108533 PARAMETER Experiment Name: Zm_4deg_Cold_P Parameter: Temperature (deg C) Value: 4 vs. 22
  misc_feature: MA Experiment 108533 PARAMETER Experiment Name: Zm_4deg_Cold_P Parameter: Timepoint (hr) Value: 1
  misc_feature: MA Experiment 108533 PARAMETER Experiment Name: Zm_4deg_Cold_P Parameter: Tissue Value: Aerial
  misc_feature: MA Experiment ID: 108536 Result: Up-regulated in Transcription
  misc_feature: MA Experiment 108536 PARAMETER Experiment Name: Zm_Meristem_P Parameter: Age (day) Value: 8
  misc_feature: MA Experiment 108536 PARAMETER Experiment Name: Zm_Meristem_P Parameter: Organism Value: Zea mays
  misc_feature: MA Experiment 108536 PARAMETER Experiment Name: Zm_Meristem_P Parameter: Plant Line Value: 35A19
  misc_feature: MA Experiment 108536 PARAMETER Experiment Name: Zm_Meristem_P Parameter: Tissue Value: Shoot Meristem vs. Above Shoot Meristem
  misc_feature: MA Experiment ID: 108539 Result: Up-regulated in Transcription
  misc_feature: MA Experiment 108539 PARAMETER Experiment Name: Zm_20percent_PEG_P Parameter: Age (day) Value: 8
  misc_feature: MA Experiment 108539 PARAMETER Experiment Name: Zm_20percent_PEG_P Parameter: Organism Value: Zea mays
  misc_feature: MA Experiment 108539 PARAMETER Experiment Name: Zm_20percent_PEG_P Parameter: Plant Line Value: 35A19
  misc_feature: MA Experiment 108539 PARAMETER Experiment Name: Zm_20percent_PEG_P Parameter: Timepoint (hr) Value: 1
  misc_feature: MA Experiment 108539 PARAMETER Experiment Name: Zm_20percent_PEG_P Parameter: Tissue Value: Aerial
  misc_feature: MA Experiment 108539 PARAMETER Experiment Name: Zm_20percent_PEG_P Parameter: Treatment Value: 20percent PEG vs. No Treatment
  misc_feature: MA Experiment ID: 108540 Result: Up-regulated in Transcription
  misc_feature: MA Experiment 108540 PARAMETER Experiment Name: Zm_20percent_PEG_P Parameter: Age (day) Value: 8
  misc_feature: MA Experiment 108540 PARAMETER Experiment Name: Zm_20percent_PEG_P Parameter: Organism Value: Zea mays
  misc_feature: MA Experiment 108540 PARAMETER Experiment Name: Zm_20percent_PEG_P Parameter: Plant Line Value: 35A19
  misc_feature: MA Experiment 108540 PARAMETER Experiment Name: Zm_20percent_PEG_P Parameter: Timepoint (hr) Value: 6
  misc_feature: MA Experiment 108540 PARAMETER Experiment Name: Zm_20percent_PEG_P Parameter: Tissue Value: Aerial
  misc_feature: MA Experiment 108540 PARAMETER Experiment Name: Zm_20percent_PEG_P Parameter: Treatment Value: 20percent PEG vs. No Treatment
  misc_feature: MA Experiment ID: 108542 Result: Up-regulated in Transcription
  misc_feature: MA Experiment 108542 PARAMETER Experiment Name: Zm_150mM_NaCl_P Parameter: Age (day) Value: 8
  misc_feature: MA Experiment 108542 PARAMETER Experiment Name: Zm_150mM_NaCl_P Parameter: Organism Value: Zea mays
  misc_feature: MA Experiment 108542 PARAMETER Experiment Name: Zm_150mM_NaCl_P Parameter: Plant Line Value: 35A19
  misc_feature: MA Experiment 108542 PARAMETER Experiment Name: Zm_150mM_NaCl_P Parameter: Timepoint (hr) Value: 6
  misc_feature: MA Experiment 108542 PARAMETER Experiment Name: Zm_150mM_NaCl_P Parameter: Tissue Value: Aerial
  misc_feature: MA Experiment 108542 PARAMETER Experiment Name: Zm_150mM_NaCl_P Parameter: Treatment Value: 150mM NaCl vs. No Treatment
  misc_feature: MA Experiment ID: 108543 Result: Down-regulated in Transcription
  misc_feature: MA Experiment ID: 108544 Result: Down-regulated in Transcription
  misc_feature: MA Experiment ID: 108556 Result: Up-regulated in Transcription
  misc_feature: MA Experiment 108556 PARAMETER Experiment Name: Zm_Drought_P Parameter: Age (day) Value: 9
  misc_feature: MA Experiment 108556 PARAMETER Experiment Name: Zm_Drought_P Parameter: Organism Value: Zea mays
  misc_feature: MA Experiment 108556 PARAMETER Experiment Name: Zm_Drought_P Parameter: Plant Line Value: 35A19
  misc_feature: MA Experiment 108556 PARAMETER Experiment Name: Zm_Drought_P Parameter: Timepoint (hr) Value: 24
  misc_feature: MA Experiment 108556 PARAMETER Experiment Name: Zm_Drought_P Parameter: Tissue Value: Aerial
  misc_feature: MA Experiment 108556 PARAMETER Experiment Name: Zm_Drought_P Parameter: Treatment Value: Drought vs. No Drought
  misc_feature: MA Experiment ID: 20000479 Result: Up-regulated in Transcription
  misc_feature: MA Experiment 20000479 PARAMETER Experiment Name: Zm_Drought_P Parameter: Age (day) Value: 10
  misc_feature: MA Experiment 20000479 PARAMETER Experiment Name: Zm_Drought_P Parameter: Organism Value: Zea mays
  misc_feature: MA Experiment 20000479 PARAMETER Experiment Name: Zm_Drought_P Parameter: Plant Line Value: 35A19
  misc_feature: MA Experiment 20000479 PARAMETER Experiment Name: Zm_Drought_P Parameter: Timepoint (hr) Value: 48
  misc_feature: MA Experiment 20000479 PARAMETER Experiment Name: Zm_Drought_P Parameter: Tissue Value: Aerial
  misc_feature: MA Experiment 20000479 PARAMETER Experiment Name: Zm_Drought_P Parameter: Treatment Value: Drought vs. No Drought
  misc_feature: MA Experiment ID: 20000480 Result: Up-regulated in Transcription
  misc_feature: MA Experiment 20000480 PARAMETER Experiment Name: Zm_Drought_P Parameter: Age (day) Value: 11
  misc_feature: MA Experiment 20000480 PARAMETER Experiment Name: Zm_Drought_P Parameter: Organism Value: Zea mays
  misc_feature: MA Experiment 20000480 PARAMETER Experiment Name: Zm_Drought_P Parameter: Plant Line Value: 35A19
  misc_feature: MA Experiment 20000480 PARAMETER Experiment Name: Zm_Drought_P Parameter: Timepoint (hr) Value: 72
  misc_feature: MA Experiment 20000480 PARAMETER Experiment Name: Zm_Drought_P Parameter: Tissue Value: Aerial
  misc_feature: MA Experiment 20000480 PARAMETER Experiment Name: Zm_Drought_P Parameter: Treatment Value: Drought vs. No Drought
  misc_feature: MA Experiment ID: 20000626 Result: Down-regulated in Transcription
  misc_feature: MA Experiment 20000626 PARAMETER Experiment Name: Zm_Herbicide-Treatments_P Parameter: Timepoint (hr) Value: 12
  misc_feature: MA Experiment 20000626 PARAMETER Experiment Name: Zm_Herbicide-Treatments_P Parameter: Tissue Value: Aerial
  misc_feature: MA Experiment 20000626 PARAMETER Experiment Name: Zm_Herbicide-Treatments_P Parameter: Treatment Value: Roundup vs. No Treatment
  misc_feature: MA Experiment ID: 20000629 Result: Down-regulated in Transcription
  misc_feature: MA Experiment 20000629 PARAMETER Experiment Name: Zm_Herbicide-Treatments_P Parameter: Timepoint (hr) Value: 12
  misc_feature: MA Experiment 20000629 PARAMETER Experiment Name: Zm_Herbicide-Treatments_P Parameter: Tissue Value: Aerial
  misc_feature: MA Experiment 20000629 PARAMETER Experiment Name: Zm_Herbicide-Treatments_P Parameter: Treatment Value: Trimec vs. No Treatment
  misc_feature: MA Experiment ID: 20001612 Result: Up-regulated in Transcription
  misc_feature: MA Experiment 20001612 PARAMETER Experiment Name: Zm_50ppm_KNO3_L-to-H_P Parameter: Age (day) Value: 19
  misc_feature: MA Experiment 20001612 PARAMETER Experiment Name: Zm_50ppm_KNO3_L-to-H_P Parameter: Organism Value: Zea mays
  misc_feature: MA Experiment 20001612 PARAMETER Experiment Name: Zm_50ppm_KNO3_L-to-H_P Parameter: Plant Line Value: 35A19
  misc_feature: MA Experiment 20001612 PARAMETER Experiment Name: Zm_50ppm_KNO3_L-to-H_P Parameter: Timepoint (hr) Value: 8
  misc_feature: MA Experiment 20001612 PARAMETER Experiment Name: Zm_50ppm_KNO3_L-to-H_P Parameter: Tissue Value: Roots
  misc_feature: MA Experiment 20001612 PARAMETER Experiment Name: Zm_50ppm_KNO3_L-to-H_P Parameter: Treatment Value: 50ppm KNO3 vs. 50ppm KCl
aagacttcactagaatctactcgtcgagtcaccaaagataaggctctatcggactcggagtctcggacagcacagcaaagcaagagccgctactcaagtatagtctctgacaccggccgaccctgccctccaacccaagccatggcggacaacaacaaccggcggaaccacgggcagaccttgctcgccggcgcgggcctgggcctgctcgccgtgaactcgggcctcgccatctaccgcgcgaggggcgacacggccgccgtcctcttcgtcgcggggtcctgcgccaccctgctcctcctcttcgcctgcctccgcgcctacgagcgggcggcgcccgggtcgccggcccgggaccgggcgcggcgcgccgtgtggccgctcgccacgctgctcacgctctcgttcgcctggaaggtggcggcggccatgccttccgccgccgcggccgccctcgtatggggcctggccgtggccaccaccgccggcggcttcgtggcactgtacgtgcagcaggcatgaacacgtgggcgcgggacggactaggcaagcagctgcagacttgcagttcgttcagggatctagatctgggcgccgcgcgcttgtgtagaaatgtacagtgtatttggctagcttttcgattttgtgcatatgtatgtagctgactggctgatactataaaacagagtggcctctgtgt

SEQ ID NO: 111911 - protein, 173 aa, Zea mays subsp. mays
  misc_feature (1)..(173): Ceres Seq. ID no. 14306157
  misc_feature (65)..(173): Homolog of NCBI NO: 34906268 NR Description: P0489A01.19 [Oryza sativa (japonica
  misc_feature (69)..(170): Homolog of NCBI NO: 34910564 NR Description: B1131B07.10 [Oryza sativa (japonica
  misc_feature (62)..(172): Homolog of NCBI NO: 34904462 NR Description: OSJNBa0086P08.10 [Oryza sativa (japonica
  misc_feature (60)..(170): Homolog of NCBI NO: 34912134 NR Description: OSJNBb0024F06.19 [Oryza sativa (japonica
KTSLESTRRVTKDKALSDSESRTAQQSKSRYSSIVSDTGRPCPPTQAMADNNNRRNHGQTLLAGAGLGLLAVNSGLAIYRARGDTAAVLFVAGSCATLLLLFACLRAYERAAPGSPARDRARRAVWPLATLLTLSFAWKVAAAMPSAAAAALVWGLAVATTAGGFVALYVQQA

SEQ ID NO: 111912 - protein, 126 aa, Zea mays subsp. mays; identical to SEQ ID NO: 6413
  misc_feature (1)..(126): Ceres Seq. ID no. 14306158
  misc_feature (18)..(126): Homolog of NCBI NO: 34906268 NR Description: P0489A01.19 [Oryza sativa (japonica
  misc_feature (22)..(123): Homolog of NCBI NO: 34910564 NR Description: B1131B07.10 [Oryza sativa (japonica
  misc_feature (15)..(125): Homolog of NCBI NO: 34904462 NR Description: OSJNBa0086P08.10 [Oryza sativa (japonica
  misc_feature (13)..(123): Homolog of NCBI NO: 34912134 NR Description: OSJNBb0024F06.19 [Oryza sativa (japonica

SEQ ID NO: 111913 - DNA, 910 bp, Zea mays subsp. mays
  misc_feature (1)..(910): Ceres Seq. ID no. 13600585
ctctctacagctacctagctagtatctacccgccattgcattgcaccacctctgtcctcgatctctcttgctcgaccacacacacacgcacacgatcgactaacaaccctgtatctgtatggatatggcaatgagccagcacagctccgacacctcgtccacgtcctcctactcgtccgacccctcctccacgtcgtccaccaccagcggcaagaagcgcccgcgcccgcacgccgccgccgccccggcgtaccgcggcgtccgcatgcgcgcgtggggcaagtgggtgtcggagatcagggagccccgcaagaagtcgcgcatctggctgggcaccttcccgcgcccggagatggcggcgcgcgcgcacgacgccgccgcgctcagcgtcaagggcgcgcgcgccgtgctcaacttcccggccctcgcgcgccacctcccgcgcccggcctccctggcgccgcgcgacgtccaggccgccgccgcgcgcgccgccgtcatgcacgagccagagcctcaacaacctgatgagcccggacggcagcccgtggaggaggtggccctggccgccgagctggtgttcgacgacctggcgcctctgtgggtggaggacgtggtggagttgggcccgtgcccgtcccagcatagctcgtggacgccgtgcgatgggctcgacgccgccgcctgtctgcactctctccctctcttgtgggactactagctgctactaggctccttgctccgtttgtacatggccttgaaccattttcgtttccgcttgtttttttttttttttggttttcacttgttttcatatatccaccggagctacctacaaagagtaaatccctactcgcactgtactacttctcgtatatttggactaaattttggcgggtagccatcgctt

SEQ ID NO: 111914 - protein, 200 aa, Zea mays subsp. mays
  misc_feature (1)..(200): Ceres Seq. ID no. 13600586
  misc_feature (42)..(104): Pfam Name: AP2 domain Pfam Description: AP2 domain
  misc_feature (5)..(156): Homolog of NCBI NO: 15235858 NR Description: transcription factor TINY, putative [Arabidopsis
  misc_feature (12)..(128): Homolog of NCBI NO: 15239501 NR Description: AP2 domain transcription factor TINY [Arabidopsis
  misc_feature (26)..(128): Homolog of NCBI NO: 15223860 NR Description: AP2 domain transcription factor TINY, putative
  misc_feature (6)..(131): Homolog of NCBI NO: 14140163 NR Description: putative AP2 domain containing protein [Oryza
  misc_feature (13)..(179): Homolog of NCBI NO: 15239113 NR Description: AP2 domain transcription factor TINY, putative
  misc_feature (1)..(139): Homolog of NCBI NO: 38605845 NR Description: OSJNBb0034G17.3 [Oryza sativa (japonica
  misc_feature (32)..(199): Homolog of NCBI NO: 25990951 NR Description: DREB-like protein [Zea mays]
  misc_feature (32)..(199): Homolog of NCBI NO: 21908034 NR Description: DRE binding factor 2 [Zea mays]
  misc_feature (2)..(200): Homolog of NCBI NO: 38605848 NR Description: OSJNBb0034G17.6 [Oryza sativa (japonica
  misc_feature (3)..(129): Homolog of NCBI NO: 34903650 NR Description: B1015E06.8 [Oryza sativa (japonica
MDMAMSQHSSDTSSTSSYSSDPSSTSSTTSGKKRPRPHAAAAPAYRGVRMRAWGKWVSEIREPRKKSRIWLGTFPRPEMAARAHDAAALSVKGARAVLNFPALARHLPRPASLAPRDVQAAAARAAVMHEPEPQQPDEPGRQPVEEVALAAELVFDDLAPLWVEDVVELGPCPSQHSSWTPCDGLDAAACLHSLPLLWDY

SEQ ID NO: 111915 - protein, 198 aa, Zea mays subsp. mays
  misc_feature (1)..(198): Ceres Seq. ID no. 13600587
  misc_feature (40)..(102): Pfam Name: AP2 domain Pfam Description: AP2 domain
  misc_feature (3)..(154): Homolog of NCBI NO: 15235858 NR Description: transcription factor TINY, putative [Arabidopsis
  misc_feature (10)..(126): Homolog of NCBI NO: 15239501 NR Description: AP2 domain transcription factor TINY [Arabidopsis
  misc_feature (24)..(126): Homolog of NCBI NO: 15223860 NR Description: AP2 domain transcription factor TINY, putative
  misc_feature (4)..(129): Homolog of NCBI NO: 14140163 NR Description: putative AP2 domain containing protein [Oryza
  misc_feature (11)..(177): Homolog of NCBI NO: 15239113 NR Description: AP2 domain transcription factor TINY, putative
  misc_feature (1)..(137): Homolog of NCBI NO: 38605845 NR Description: OSJNBb0034G17.3 [Oryza sativa (japonica
  misc_feature (30)..(197): Homolog of NCBI NO: 25990951 NR Description: DREB-like protein [Zea mays]
  misc_feature (30)..(197): Homolog of NCBI NO: 21908034 NR Description: DRE binding factor 2 [Zea mays]
  misc_feature (1)..(198): Homolog of NCBI NO: 38605848 NR Description: OSJNBb0034G17.6 [Oryza sativa (japonica
  misc_feature (1)..(127): Homolog of NCBI NO: 34903650 NR Description: B1015E06.8 [Oryza sativa (japonica
MAMSQHSSDTSSTSSYSSDPSSTSSTTSGKKRPRPHAAAAPAYRGVRMRAWGKWVSEIREPRKKSRIWLGTFPRPEMAARAHDAAALSVKGARAVLNFPALARHLPRPASLAPRDVQAAAARAAVMHEPEPQQPDEPGRQPVEEVALAAELVFDDLAPLWVEDVVELGPCPSQHSSWTPCDGLDAAACLHSLPLLWDY

SEQ ID NO: 111916 - protein, 196 aa, Zea mays subsp. mays
  misc_feature (1)..(196): Ceres Seq. ID no. 13600588
  misc_feature (38)..(100): Pfam Name: AP2 domain Pfam Description: AP2 domain
  misc_feature (1)..(152): Homolog of NCBI NO: 15235858 NR Description: transcription factor TINY, putative [Arabidopsis
  misc_feature (8)..(124): Homolog of NCBI NO: 15239501 NR Description: AP2 domain transcription factor TINY [Arabidopsis
  misc_feature (22)..(124): Homolog of NCBI NO: 15223860 NR Description: AP2 domain transcription factor TINY, putative
  misc_feature (2)..(127): Homolog of NCBI NO: 14140163 NR Description: putative AP2 domain containing protein [Oryza
  misc_feature (9)..(175): Homolog of NCBI NO: 15239113 NR Description: AP2 domain transcription factor TINY, putative
  misc_feature (1)..(135): Homolog of NCBI NO: 38605845 NR Description: OSJNBb0034G17.3 [Oryza sativa (japonica
  misc_feature (28)..(195): Homolog of NCBI NO: 25990951 NR Description: DREB-like protein [Zea mays]
  misc_feature (28)..(195): Homolog of NCBI NO: 21908034 NR Description: DRE binding factor 2 [Zea mays]
  misc_feature (1)..(196): Homolog of NCBI NO: 38605848 NR Description: OSJNBb0034G17.6 [Oryza sativa (japonica
  misc_feature (1)..(125): Homolog of NCBI NO: 34903650 NR Description: B1015E06.8 [Oryza sativa (japonica
MSQHSSDTSSTSSYSSDPSSTSSTTSGKKRPRPHAAAAPAYRGVRMRAWGKWVSEIREPRKKSRIWLGTFPRPEMAARAHDAAALSVKGARAVLNFPALARHLPRPASLAPRDVQAAAARAAVMHEPEPQQPDEPGRQPVEEVALAAELVFDDLAPLWVEDVVELGPCPSQHSSWTPCDGLDAAACLHSLPLLWDY

SEQ ID NO: 111917 - DNA, 834 bp, Zea mays subsp. mays
  misc_feature (1)..(834): Ceres Seq. ID no. 12590539
aaatcagatcgtataggccgtgtctgctggctagctagggccggcggagtaaaatgtcccttattttgtttagtaaatctattttcgtaagggatttttattttttcaaagtaaaattatataattttgtttggaaaaataaaaatcccgcgggaaaaatgaagtttctaaactaggtaggttaagatttcatggtgacgtttgtttaattaatgggtgtttattaattgcttgcagtgcgagagcatggtagcggtggagcggcggctgaaggagatcggcatcccgtacgtgcagcgctgcgtggaggagggcggcatcaacgtggaccagatcttcttccacgaccccgacggcttcatgatcgagatctgcaactgcgacaacctccccgtcgtcccgctagccggcgaccagcagcgcgcgccggccgcctgcaggcgggctccggcggcggtcaataccgtcaagcagcagcagcagggcagcgtggtgcctgcttcttccgctccggtcacgacggcggcggcggcgcccgcgcagtgcatgccgtcggcggccacggccgcgcaagccatccgcgtcgccgaggagtcgtcgtcgcacatttcgtgcgcgtgattaattactagcttgttgacgacgacgccagcgcaaggattcggcgcggacggtgacgaagcaggcacgatggatcgacgagcgccgagtcacggccacatcaaggcgtctctgtacatgcgcgtgcgtgcgtgtaggtgctgtatgtgcagtgcactcaaactgcctagctttttttttagtaaagaataaacccatggtacggtgggagtg

SEQ ID NO: 111918 - protein, 124 aa, Zea mays subsp. mays
  misc_feature (1)..(124): Ceres Seq. ID no. 12590540
  misc_feature (1)..(53): Homolog of NCBI NO: 21740426 NR Description: OSJNBa0091D06.24 [Oryza sativa (japonica
  misc_feature (1)..(55): Homolog of NCBI NO: 34899038 NR Description: hypothetical protein~similar to Arabidopsis
  misc_feature (1)..(55): Homolog of NCBI NO: 34395261 NR Description: glyoxalase family-like protein
  misc_feature (1)..(68): Homolog of NCBI NO: 18401734 NR Description: expressed protein
  misc_feature (1)..(68): Homolog of NCBI NO: 15529260 NR Description: At2g28420/T1B3.6 [Arabidopsis thaliana]
  misc_feature (1)..(82): Homolog of NCBI NO: 34910246 NR Description: OSJNBa0089K24.9 [Oryza sativa (japonica
  misc_feature (1)..(60): Homolog of NCBI NO: 25406639 NR Description: hypothetical protein F18B13.24 [imported] -
  misc_feature (1)..(60): Homolog of NCBI NO: 18412683 NR Description: expressed protein
  misc_feature (1)..(60): Homolog of NCBI NO: 18394235 NR Description: expressed protein
MVAVERRLKEIGIPYVQRCVEEGGINVDQIFFHDPDGFMIEICNCDNLPVVPLAGDQQRAPAACRRAPAAVNTVKQQQQGSVVPASSAPVTTAAAAPAQCMPSAATAAQAIRVAEESSSHISCA

SEQ ID NO: 111919 - protein, 86 aa, Zea mays subsp. mays
  misc_feature (1)..(86): Ceres Seq. ID no. 12590541
  misc_feature (1)..(30): Homolog of NCBI NO: 15529260 NR Description: At2g28420/T1B3.6 [Arabidopsis thaliana]
  misc_feature (1)..(44): Homolog of NCBI NO: 34910246 NR Description: OSJNBa0089K24.9 [Oryza sativa (japonica
  misc_feature (1)..(22): Homolog of NCBI NO: 25406639 NR Description: hypothetical protein F18B13.24 [imported] -
  misc_feature (1)..(22): Homolog of NCBI NO: 18412683 NR Description: expressed protein
  misc_feature (1)..(22): Homolog of NCBI NO: 18394235 NR Description: expressed protein
  misc_feature (1)..(15): Homolog of NCBI NO: 21740426 NR Description: OSJNBa0091D06.24 [Oryza sativa (japonica
  misc_feature (1)..(17): Homolog of NCBI NO: 34899038 NR Description: hypothetical protein~similar to Arabidopsis
  misc_feature (1)..(17): Homolog of NCBI NO: 34395261 NR Description: glyoxalase family-like protein
  misc_feature (1)..(30): Homolog of NCBI NO: 18401734 NR Description: expressed protein
MIEICNCDNLPVVPLAGDQQRAPAACRRAPAAVNTVKQQQQGSVVPASSAPVTTAAAAPAQCMPSAATAAQAIRVAEESSSHISCA

SEQ ID NO: 111920 - DNA, 1533 bp, Zea mays subsp. mays
  misc_feature (1)..(1533): Ceres Seq. ID no. 13573778
cctaatcgaaaaactccactcctaaatccaaagcaaatccgaaagcaccacgaaacacggcggcagcagcctgcgtgcctgcctgcctatccaccccctcctccagcctccgcctccgacacccccgcgcgccctcgcgcggacaaagccgtaaggggcagagccgagggaggcggggctgtgccggcctcgcaatgcagcagccggagcctgccgatctgccgggctgggccttccagccacgggcggcgccggcgcctgccgccgcgcgcggggcgcaccaccgccgggccagatctgaggttgccttccgcctgccggacgacctcggcctcggcggcggcgccggccccgatggcgacgccttcgacgagatcggctcggaggacgacctcttctccaccttcatggacatcgagaagatctccacctccgggccctccgaccgcgccgccgagaactcgtctccgccgcgccccaagcaccgccacagcagctccgtcgatggctcgggcttcttcttctcacccggcgccggcggtggcgcggggaaggatgcagcggcgtcgctggctgaggtcttggaggccaagaagtccatgactcccgagcaactggccgagctcgccgccatcgaccccaagcgcgccaagagaattctagccaacagacaatcagcagctagatcaaaagaaagaaaggctcgttatatgacagaccttgagcggaaggtccaaactcttcagactgaagccaccaccctgtcagctcaacttacactatttcagagggacacgaccggactttctacagaaaatgcagagcttaagataaggttacaggccatggaacaacaggctcaactccgtgatgctctgaatgatgcactaaagcaggagctggagaggcttaaacatgctactggtgagatgaccaattccagcgaggcatataacatgagattccaacatgttccatacaattcttccttcttcccgctttcccagcaaaatgcatccccacaccttggtagcacccagctgccactgccgttccacccaccccatcccaacgtgccaaaccaccagatgcgaaacactctcccggacataatgcagcaagagtctctcggacggctgcagggtttggacattgggaaggggcctctggttgtgaagttagagagcagctcgatctctgcaagtgaaagcagcagcaccttctaacgaggcctacaagtgaaaacccaccgtttcagtaggttccattgttcatagtagcctgacatccttgtgctgcttcctgctctgtaagcccatttgttatttaattcattcatttagttgaaattatacgctgtcgcactggctgatcaatcatgttgtagaatggtccaggaacccttcaattatgtttgttttgggctcgtttcctgtttctgtgactggtatcatcagggcatttgggttttggagtgaaattctctagtggtaacaactaaaaaaaaaaagcttatctataccgtcaacctct

SEQ ID NO: 111921 - protein, 343 aa, Zea mays subsp. mays
  misc_feature (1)..(343): Ceres Seq. ID no. 13573779
  misc_feature (147)..(210): Pfam Name: bZIP transcription factor Pfam Description: bZIP transcription factor
  misc_feature (70)..(253): Homolog of NCBI NO: 15224665 NR Description: bZIP transcription factor (POSF21) [Arabidopsis
  misc_feature (1)..(339): Homolog of NCBI NO: 21740783 NR Description: OSJNBa0067K08.24 [Oryza sativa (japonica
  misc_feature (4)..(249): Homolog of NCBI NO: 17065884 NR Description: AtbZIP transcription factor [Arabidopsis thaliana]
  misc_feature (26)..(325): Homolog of NCBI NO: 7489564 NR Description: probable transcription activator RF2a - rice
  misc_feature (4)..(337): Homolog of NCBI NO: 25406943 NR Description: hypothetical protein [imported] - Arabidopsis
  misc_feature (4)..(343): Homolog of NCBI NO: 15222213 NR Description: bZIP protein [Arabidopsis thaliana]
  misc_feature (3)..(309): Homolog of NCBI NO: 25453519 NR Description: b-Zip DNA binding protein [imported] -
  misc_feature (3)..(309): Homolog of NCBI NO: 15226727 NR Description: bZip DNA binding protein [Arabidopsis thaliana]
  misc_feature (72)..(343): Homolog of NCBI NO: 34394739 NR Description: putative transcription activator RF2a
  misc_feature (22)..(343): Homolog of NCBI NO: 39579226 NR Description: bZIP transcription factor RF2b
MQQPEPADLPGWAFQPRAAPAPAAARGAHHRRARSEVAFRLPDDLGLGGGAGPDGDAFDEIGSEDDLFSTFMDIEKISTSGPSDRAAENSSPPRPKHRHSSSVDGSGFFFSPGAGGGAGKDAAASLAEVLEAKKSMTPEQLAELAAIDPKRAKRILANRQSAARSKERKARYMTDLERKVQTLQTEATTLSAQLTLFQRDTTGLSTENAELKIRLQAMEQQAQLRDALNDALKQELERLKHATGEMTNSSEAYNMRFQHVPYNSSFFPLSQQNASPHLGSTQLPLPFHPPHPNVPNHQMRNTLPDIMQQESLGRLQGLDIGKGPLVVKLESSSISASESSSTF

SEQ ID NO: 111922 - protein, 272 aa, Zea mays subsp. mays
  misc_feature (1)..(272): Ceres Seq. ID no. 13573780
  misc_feature (76)..(139): Pfam Name: bZIP transcription factor Pfam Description: bZIP transcription factor
  misc_feature (1)..(182): Homolog of NCBI NO: 15224665 NR Description: bZIP transcription factor (POSF21) [Arabidopsis
  misc_feature (1)..(268): Homolog of NCBI NO: 21740783 NR Description: OSJNBa0067K08.24 [Oryza sativa (japonica
  misc_feature (1)..(178): Homolog of NCBI NO: 17065884 NR Description: AtbZIP transcription factor [Arabidopsis thaliana]
  misc_feature (1)..(254): Homolog of NCBI NO: 7489564 NR Description: probable transcription activator RF2a - rice
  misc_feature (1)..(266): Homolog of NCBI NO: 25406943 NR Description: hypothetical protein [imported] - Arabidopsis
  misc_feature (1)..(272): Homolog of NCBI NO: 15222213 NR Description: bZIP protein [Arabidopsis thaliana]
  misc_feature (1)..(238): Homolog of NCBI NO: 25453519 NR Description: b-Zip DNA binding protein [imported] -
  misc_feature (1)..(238): Homolog of NCBI NO: 15226727 NR Description: bZip DNA binding protein [Arabidopsis thaliana]
  misc_feature (1)..(272): Homolog of NCBI NO: 34394739 NR Description: putative transcription activator RF2a
  misc_feature (1)..(272): Homolog of NCBI NO: 39579226 NR Description: bZIP transcription factor RF2b
MDIEKISTSGPSDRAAENSSPPRPKHRHSSSVDGSGFFFSPGAGGGAGKDAAASLAEVLEAKKSMTPEQLAELAAIDPKRAKRILANRQSAARSKERKARYMTDLERKVQTLQTEATTLSAQLTLFQRDTTGLSTENAELKIRLQAMEQQAQLRDALNDALKQELERLKHATGEMTNSSEAYNMRFQHVPYNSSFFPLSQQNASPHLGSTQLPLPFHPPHPNVPNHQMRNTLPDIMQQESLGRLQGLDIGKGPLVVKLESSSISASESSSTF

SEQ ID NO: 111923 - protein, 208 aa, Zea mays subsp. mays
  misc_feature (1)..(208): Ceres Seq. ID no. 13573781
  misc_feature (12)..(75): Pfam Name: bZIP transcription factor Pfam Description: bZIP transcription factor
  misc_feature (1)..(118): Homolog of NCBI NO: 15224665 NR Description: bZIP transcription factor (POSF21) [Arabidopsis
  misc_feature (1)..(204): Homolog of NCBI NO: 21740783 NR Description: OSJNBa0067K08.24 [Oryza sativa (japonica
  misc_feature (1)..(114): Homolog of NCBI NO: 17065884 NR Description: AtbZIP transcription factor [Arabidopsis thaliana]
  misc_feature (1)..(190): Homolog of NCBI NO: 7489564 NR Description: probable transcription activator RF2a - rice
  misc_feature (1)..(202): Homolog of NCBI NO: 25406943 NR Description: hypothetical protein [imported] - Arabidopsis
  misc_feature (1)..(208): Homolog of NCBI NO: 15222213 NR Description: bZIP protein [Arabidopsis thaliana]
  misc_feature (1)..(174): Homolog of NCBI NO: 25453519 NR Description: b-Zip DNA binding protein [imported] -
  misc_feature (1)..(174): Homolog of NCBI NO: 15226727 NR Description: bZip DNA binding protein [Arabidopsis thaliana]
  misc_feature (1)..(208): Homolog of NCBI NO: 34394739 NR Description: putative transcription activator RF2a
  misc_feature (1)..(208): Homolog of NCBI NO: 39579226 NR Description: bZIP transcription factor RF2b
MTPEQLAELAAIDPKRAKRILANRQSAARSKERKARYMTDLERKVQTLQTEATTLSAQLTLFQRDTTGLSTENAELKIRLQAMEQQAQLRDALNDALKQELERLKHATGEMTNSSEAYNMRFQHVPYNSSFFPLSQQNASPHLGSTQLPLPFHPPHPNVPNHQMRNTLPDIMQQESLGRLQGLDIGKGPLVVKLESSSISASESSSTF

SEQ ID NO: 111924 - DNA, 1074 bp, Zea mays subsp. mays
  misc_feature (1)..(1074): Ceres Seq. ID no. 14306242
  misc_feature: MA Experiment ID: 108529 Result: Up-regulated in Transcription
  misc_feature: MA Experiment 108529 PARAMETER Experiment Name: Zm_Imbibed_Seeds_P Parameter: Age (day) Value: 5 vs. 2
  misc_feature: MA Experiment 108529 PARAMETER Experiment Name: Zm_Imbibed_Seeds_P Parameter: Organism Value: Zea mays
  misc_feature: MA Experiment 108529 PARAMETER Experiment Name: Zm_Imbibed_Seeds_P Parameter: Plant Line Value: 35A19
  misc_feature: MA Experiment 108529 PARAMETER Experiment Name: Zm_Imbibed_Seeds_P Parameter: Tissue Value: Roots vs. Embryo
  misc_feature: MA Experiment ID: 108535 Result: Up-regulated in Transcription
  misc_feature: MA Experiment 108535 PARAMETER Experiment Name: Zm_Meristem_P Parameter: Age (day) Value: 8
  misc_feature: MA Experiment 108535 PARAMETER Experiment Name: Zm_Meristem_P Parameter: Organism Value: Zea mays
  misc_feature: MA Experiment 108535 PARAMETER Experiment Name: Zm_Meristem_P Parameter: Plant Line Value: 35A19
  misc_feature: MA Experiment 108535 PARAMETER Experiment Name: Zm_Meristem_P Parameter: Tissue Value: Root Meristem vs. Above Root Meristem
  misc_feature: MA Experiment ID: 108544 Result: Down-regulated in Transcription
  misc_feature: MA Experiment ID: 108545 Result: Down-regulated in Transcription
  misc_feature: MA Experiment 108545 PARAMETER Experiment Name: Zm_Imbibed_Seeds_P Parameter: Age (day) Value: 3 vs. 2
  misc_feature: MA Experiment 108545 PARAMETER Experiment Name: Zm_Imbibed_Seeds_P Parameter: Organism Value: Zea mays
  misc_feature: MA Experiment 108545 PARAMETER Experiment Name: Zm_Imbibed_Seeds_P Parameter: Plant Line Value: 35A19
  misc_feature: MA Experiment 108545 PARAMETER Experiment Name: Zm_Imbibed_Seeds_P Parameter: Tissue Value: Aerial vs. Embryo
  misc_feature: MA Experiment ID: 108546 Result: Up-regulated in Transcription
  misc_feature: MA Experiment 108546 PARAMETER Experiment Name: Zm_Imbibed_Seeds_P Parameter: Age (day) Value: 3 vs. 2
  misc_feature: MA Experiment 108546 PARAMETER Experiment Name: Zm_Imbibed_Seeds_P Parameter: Organism Value: Zea mays
  misc_feature: MA Experiment 108546 PARAMETER Experiment Name: Zm_Imbibed_Seeds_P Parameter: Plant Line Value: 35A19
  misc_feature: MA Experiment 108546 PARAMETER Experiment Name: Zm_Imbibed_Seeds_P Parameter: Tissue Value: Roots vs. Embryo
  misc_feature: MA Experiment ID: 108687 Result: Up-regulated in Transcription
  misc_feature: MA Experiment 108687 PARAMETER Experiment Name: Zm_Embryos-Flowers__P Parameter: Tissue Value: Embryo vs. Aerial+
aacagcactagctagctagctagaatcgaaacagaatggatgcctctactaccttcctcttcctcgcgcttgcatgcatggcggccactaatactctccctcactgtgccaacgcaaggcatttcctccctcctagtcgtagccatggcagcagcactggcacgaggagctctagcgccgtcgacgccgccgccgccgccgccagcagcagcaagctctcgtggccactgctaccgtggaagaagcctggccgtggcggcagcagccgtggctccgggagcgggcacggtttcggctggaccgtctcgcacaacgggtcggacaccgacgtcgggttcggcggcggcgccggcgccggcacgagcagctccggaggtggctcgagcgcgggcgggggagctggtctcggcgtcggcatccacgtcggcaacgacggagtggacgtcgcgatcggcgtcgccggaggcggcgccgtcgtcgtcagtaccagcaacggcggcggcgtgggtgtcggcgctggcggtggaggaggagtcgggatccacctgggccccgacgtcgtggccgtcacccgtggcggtggcggtggcgccggcggcgatgattcgtcgtctggcagcggaaccggggtgggacgcgccggaagcgctgtgggcagcgcccatgggtatgggaatgcaagcggtggaacaggggccggtggcgggagtggagctggctctggcggccaaggtggatacggcggcggcggtggcggtggcaccggaagtagcggtggccatccatgacgaccatgagcttgcattggtgaccgactgatgactgctgcatgatggttggatccggtgcctttggtttggggataaaaatgctgctttcgttggatccagcgcctttggggattgtattcaaaactatatactttttatagctgtctagtattgttgtggttactttgttttacgttgctgattgatgaggttcgttgattagtacgtactgttatccagcgcagtaatataacgcggttttcactcttcttggatgcactaaaacaatgtcagttggtggagt

SEQ ID NO: 111925 - protein, 259 aa, Zea mays subsp. mays
  misc_feature (1)..(259): Ceres Seq. ID no. 14306243
MPLLPSSSSRLHAWRPLILSLTVPTQGISSLLVVAMAAALARGALAPSTPPPPPPAAASSRGHCYRGRSLAVAAAAVAPGAGTVSAGPSRTTGRTPTSGSAAAPAPARAAPEVARARAGELVSASASTSATTEWTSRSASPEAAPSSSVPATAAAWVSALAVEEESGSTWAPTSWPSPVAVAVAPAAMIRRLAAEPGWDAPEALWAAPMGMGMQAVEQGPVAGVELALAAKVDTAAAVAVAPEVAVAIHDDHELALVTD

SEQ ID NO: 111926 - protein, 250 aa, Zea mays subsp. mays
  misc_feature (1)..(250): Ceres Seq. ID no. 14306244
  misc_feature (155)..(248): Pfam Name: Herpesvirus large structural phosphoprotein UL32 Pfam Description: Herpesvirus large structural phosphoprotein UL32
  misc_feature (74)..(248): Homolog of NCBI NO: 34898126 NR Description: putative glycine-rich cell wall protein precursor
  misc_feature (72)..(248): Homolog of NCBI NO: 30679126 NR Description: expressed protein [Arabidopsis thaliana]
  misc_feature (72)..(248): Homolog of NCBI NO: 30679122 NR Description: expressed protein [Arabidopsis thaliana]
  misc_feature (74)..(249): Homolog of NCBI NO: 30679126 NR Description: expressed protein [Arabidopsis thaliana]
  misc_feature (74)..(249): Homolog of NCBI NO: 30679126 NR Description: expressed protein [Arabidopsis thaliana]
  misc_feature (37)..(248): Homolog of NCBI NO: 15234690 NR Description: hypothetical protein [Arabidopsis thaliana]
  misc_feature (72)..(248): Homolog of NCBI NO: 322647 NR Description: glycine-rich protein GRP22 - rape
  misc_feature (72)..(248): Homolog of NCBI NO: 30679122 NR Description: expressed protein [Arabidopsis thaliana]
  misc_feature (72)..(249): Homolog of NCBI NO: 30679122 NR Description: expressed protein [Arabidopsis thaliana]
  misc_feature (51)..(250): Homolog of NCBI NO: 38344707 NR Description: OSJNBb0115I09.11 [Oryza sativa (japonica
MDASTTFLFLALACMAATNTLPHCANARHFLPPSRSHGSSTGTRSSSAVDAAAAAASSSKLSWPLLPWKKPGRGGSSRGSGSGHGFGWTVSHNGSDTDVGFGGGAGAGTSSSGGGSSAGGGAGLGVGIHVGNDGVDVAIGVAGGGAVVVSTSNGGGVGVGAGGGGGVGIHLGPDVVAVTRGGGGGAGGDDSSSGSGTGVGRAGSAVGSAHGYGNASGGTGAGGGSGAGSGGQGGYGGGGGGGTGSSGGHP

SEQ ID NO: 111927 - protein, 236 aa, Zea mays subsp. mays
  misc_feature (1)..(236): Ceres Seq. ID no. 14306245
  misc_feature (141)..(234): Pfam Name: Herpesvirus large structural phosphoprotein UL32 Pfam Description: Herpesvirus large structural phosphoprotein UL32
  misc_feature (60)..(234): Homolog of NCBI NO: 34898126 NR Description: putative glycine-rich cell wall protein precursor
  misc_feature (58)..(234): Homolog of NCBI NO: 30679126 NR Description: expressed protein [Arabidopsis thaliana]
  misc_feature (58)..(234): Homolog of NCBI NO: 30679122 NR Description: expressed protein [Arabidopsis thaliana]
  misc_feature (60)..(235): Homolog of NCBI NO: 30679126 NR Description: expressed protein [Arabidopsis thaliana]
  misc_feature (60)..(235): Homolog of NCBI NO: 30679126 NR Description: expressed protein [Arabidopsis thaliana]
  misc_feature (23)..(234): Homolog of NCBI NO: 15234690 NR Description: hypothetical protein [Arabidopsis thaliana]
  misc_feature (58)..(234): Homolog of NCBI NO: 322647 NR Description: glycine-rich protein GRP22 - rape
  misc_feature (58)..(234): Homolog of NCBI NO: 30679122 NR Description: expressed protein [Arabidopsis thaliana]
  misc_feature (58)..(235): Homolog of NCBI NO: 30679122 NR Description: expressed protein [Arabidopsis thaliana]
  misc_feature (37)..(236): Homolog of NCBI NO: 38344707 NR Description: OSJNBb0115I09.11 [Oryza sativa (japonica
MAATNTLPHCANARHFLPPSRSHGSSTGTRSSSAVDAAAAAASSSKLSWPLLPWKKPGRGGSSRGSGSGHGFGWTVSHNGSDTDVGFGGGAGAGTSSSGGGSSAGGGAGLGVGIHVGNDGVDVAIGVAGGGAVVVSTSNGGGVGVGAGGGGGVGIHLGPDVVAVTRGGGGGAGGDDSSSGSGTGVGRAGSAVGSAHGYGNASGGTGAGGGSGAGSGGQGGYGGGGGGGTGSSGGHP

SEQ ID NO: 111928 - DNA, 936 bp, Zea mays subsp. mays
  misc_feature (1)..(936): Ceres Seq. ID no. 13600563
aaaaaaaagaatagaacggaatgaaattctttccgtcacaaactgaggaccctaatcccaaatcgagaggctgaagcgctggactccagctactgttgctcgcctggttcgggacggccgattgggtgccgggttgccaaggacatggaggattcgagcggctgctcgtcgtctccagccgtcctacggaacaagtactgggtcctccgccacggccgcagcgtccccaacgagcgcggtctcatcgtgtcatctctggagaacggcacgaagccggagttcgggctggccccgcagggagtcgagcaggcgcgcgcggccggcgaaaagttccggaaggagcttgacgagattggtgtgccggtgggttccgtcaagattcgttactcgccgttctcacggaccaccgagacggctagagtggtcgccggtgtgctcggcatcccctttgaagctcctagttgcgaagcggtgctgggacttcgtgagcgctactttgggccatcatatgagttactttcacatgataagtatgcagacatatggtcagtagatgaagcacatccctgtatggctcctgaaggtggcgagagcgtcgcagatgttgctagtagattttcagctgtgctgtcatctacagagacacattttcatggctctgcaattcttattgtcagccatggggacccactacaaatctttcaagctgtcctcagtggagccaaggagaacatgtctttccttcacgatctcaccaacctgaaggtgaaagatactgacgatctcaccaacctggaagtgaaagacacgatggtggcatccattctgtcacagcatcgtaagtttgcgctcatcacaggagagctgcgccgagttgtgtaacttgctgctgcttgggtttaacgtcgcctgtcagttgaccatatgtaaacctgc

SEQ ID NO: 111929 - protein, 245 aa, Zea mays subsp. mays
  misc_feature (1)..(245): Ceres Seq. ID no. 13600564
  misc_feature (16)..(240): Pfam Name: Phosphoglycerate mutase family Pfam Description: Phosphoglycerate mutase family
  misc_feature (16)..(122): Homolog of NCBI NO: 7485952 NR Description: hypothetical protein F22I13.140 - Arabidopsis
  misc_feature (113)..(245): Homolog of NCBI NO: 7485952 NR Description: hypothetical protein F22I13.140 - Arabidopsis
  misc_feature (16)..(245): Homolog of NCBI NO: 21592519 NR Description: unknown [Arabidopsis thaliana]
  misc_feature (16)..(245): Homolog of NCBI NO: 18420226 NR Description: expressed protein [Arabidopsis thaliana]
  misc_feature (3)..(245): Homolog of NCBI NO: 38344128 NR Description: OSJNBb0072N21.7 [Oryza sativa (japonica
MEDSSGCSSSPAVLRNKYWVLRHGRSVPNERGLIVSSLENGTKPEFGLAPQGVEQARAAGEKFRKELDEIGVPVGSVKIRYSPFSRTTETARVVAGVLGIPFEAPSCEAVLGLRERYFGPSYELLSHDKYADIWSVDEAHPCMAPEGGESVADVASRFSAVLSSTETHFHGSAILIVSHGDPLQIFQAVLSGAKENMSFLHDLTNLKVKDTDDLTNLEVKDTMVASILSQHRKFALITGELRRVV

SEQ ID NO: 111930 - DNA, 1500 bp, Zea mays subsp. mays
  misc_feature (1)..(1500): Ceres Seq. ID no. 13600581
  misc_feature: MA Experiment ID: 108535 Result: Up-regulated in Transcription
  misc_feature: MA Experiment 108535 PARAMETER Experiment Name: Zm_Meristem_P Parameter: Age (day) Value: 8
  misc_feature: MA Experiment 108535 PARAMETER Experiment Name: Zm_Meristem_P Parameter: Organism Value: Zea mays
  misc_feature: MA Experiment 108535 PARAMETER Experiment Name: Zm_Meristem_P Parameter: Plant Line Value: 35A19
  misc_feature: MA Experiment 108535 PARAMETER Experiment Name: Zm_Meristem_P Parameter: Tissue Value: Root Meristem vs. Above Root Meristem
cccmcctagamcagttcctaacgaaaaagagtttcccgcatcggcctccgccacccaccgccgccgccgccccgccccgccccgccaaaggaacggaggatggaagccccgggctcgccctacgcctcctcgccggaatccgcccccaagcgtgcccctcgctccccaccgcagcagcagcctccctccgaggaaggagatgacaaggagaaaccaatacatttgaggtttctggtgtctaatgcgtcagcaggatgtatcattggcaagggtggatcaactattaatgactttcagtcccaatctggggctcgtattcagttatcacgtagccatgagtttttccctggtactaatgacagaatcatcatggtttctggactgtttggtgaagtaatgaaggccatggagttgattcttgagaaacttttggctgagggtgaagaattcaatgaagctgaagctagacctaaagttagacttgtagttcctaacaactcttgtggcgggataattggtaaaggtggagcaacaataaagtcatttattgaagaatcacatgctggaatcaaaatttcgccacaggataacaattatgttggtttgcatgataggcttgttacagttacaggaacctttgataatcagatgaatgcgatagatttgatactgaaaaagttatctgaggatgttcactacccagctaatttgagctccccatttccatatgcaggtcttactttcccaagctaccctggtgttcctgttggttatatgattccgcaggtgccatataataatgctgtgaactatggacctaataacgggtatggaggaaggtaccaaaacaacaagcccagtacacctatgagatctcctgctagtaatgaagcccaagaatctctgaccattggtattgccgatgaacacattggtgctgttgtaggacgtgctggaaggaacataacagagattattcaggctagtggtgctcggatcaagatatcggataggggtgacttcatatctgggacatctgacaggaaggtgacgattactggaacatcagaagctatccggaccgcggagtccatgatcatgcagagggtgtcagccagttcggagaggctatgataccagatatgtttgacggactgtgggggccgttgttgagtccgagcagcatgtttgatgcaagttattattgtttgttgcgttgcgccaatggtttagtcgaagatatataggtgcagcgtttgaatggatttgggaatagggctgagttatatcccgtggatgccacaacaaggcaggcaggcgccgctctgtgctagtggctgagtaggttgacaattcggtatgttgatttcctggtacccccccttcctttttttttgagtcttgtgtatgtagatctgagtatgggttctttctttcacgtggccagaaagagcatggttggaagctaaacacaataaagcttaksgaacgggagggggg

SEQ ID NO: 111931 - protein, 344 aa, Zea mays subsp. mays
  misc_feature (1)..(344): Ceres Seq. ID no. 15218978
  misc_feature (127)..(178): Pfam Name: KH domain Pfam Description: KH domain
  misc_feature (259)..(344): Homolog of NCBI NO: 24645370 NR Description: pasilla CG8144-PC [Drosophila melanogaster]
  misc_feature (26)..(237): Homolog of NCBI NO: 24645370 NR Description: pasilla CG8144-PC [Drosophila melanogaster]
  misc_feature (259)..(344): Homolog of NCBI NO: 19527741 NR Description: AT03366p [Drosophila melanogaster]
  misc_feature (37)..(237): Homolog of NCBI NO: 19527741 NR Description: AT03366p [Drosophila melanogaster]
  misc_feature (242)..(338): Homolog of NCBI NO: 33516919 NR Description: RNA-binding protein Nova-1 (Neuro-oncological
  misc_feature (1)..(240): Homolog of NCBI NO: 33516919 NR Description: RNA-binding protein Nova-1 (Neuro-oncological
  misc_feature (234)..(343): Homolog of NCBI NO: 15237716 NR Description: KH domain protein Nova, putative [Arabidopsis
  misc_feature (1)..(211): Homolog of NCBI NO: 15237716 NR Description: KH domain protein Nova, putative [Arabidopsis
  misc_feature (1)..(343): Homolog of NCBI NO: 30680512 NR Description: KH domain protein Nova, putative [Arabidopsis
  misc_feature (116)..(343): Homolog of NCBI NO: 542190 NR Description: hypothetical protein 1087 - maize
MEAPGSPYASSPESAPKRAPRSPPQQQPPSEEGDDKEKPIHLRFLVSNASAGCIIGKGGSTINDFQSQSGARIQLSRSHEFFPGTNDRIIMVSGLFGEVMKAMELILEKLLAEGEEFNEAEARPKVRLVVPNNSCGGIIGKGGATIKSFIEESHAGIKISPQDNNYVGLHDRLVTVTGTFDNQMNAIDLILKKLSEDVHYPANLSSPFPYAGLTFPSYPGVPVGYMIPQVPYNNAVNYGPNNGYGGRYQNNKPSTPMRSPASNEAQESLTIGIADEHIGAVVGRAGRNITEIIQASGARIKISDRGDFISGTSDRKVTITGTSEAIRTAESMIMQRVSASSERL

SEQ ID NO: 111932 - protein, 254 aa, Zea mays subsp. mays
  misc_feature (1)..(254): Ceres Seq. ID no. 15218979
  misc_feature (37)..(88): Pfam Name: KH domain Pfam Description: KH domain
  misc_feature (169)..(254): Homolog of NCBI NO: 24645370 NR Description: pasilla CG8144-PC [Drosophila melanogaster]
  misc_feature (1)..(147): Homolog of NCBI NO: 24645370 NR Description: pasilla CG8144-PC [Drosophila melanogaster]
  misc_feature (169)..(254): Homolog of NCBI NO: 19527741 NR Description: AT03366p [Drosophila melanogaster]
  misc_feature (1)..(147): Homolog of NCBI NO: 19527741 NR Description: AT03366p [Drosophila melanogaster]
  misc_feature (152)..(248): Homolog of NCBI NO: 33516919 NR Description: RNA-binding protein Nova-1 (Neuro-oncological
  misc_feature (1)..(150): Homolog of NCBI NO: 33516919 NR Description: RNA-binding protein Nova-1 (Neuro-oncological
  misc_feature (144)..(253): Homolog of NCBI NO: 15237716 NR Description: KH domain protein Nova, putative [Arabidopsis
  misc_feature (1)..(121): Homolog of NCBI NO: 15237716 NR Description: KH domain protein Nova, putative [Arabidopsis
  misc_feature (1)..(253): Homolog of NCBI NO: 30680512 NR Description: KH domain protein Nova, putative [Arabidopsis
  misc_feature (26)..(253): Homolog of NCBI NO: 542190 NR Description: hypothetical protein 1087 - maize
MVSGLFGEVMKAMELILEKLLAEGEEFNEAEARPKVRLVVPNNSCGGIIGKGGATIKSFIEESHAGIKISPQDNNYVGLHDRLVTVTGTFDNQMNAIDLILKKLSEDVHYPANLSSPFPYAGLTFPSYPGVPVGYMIPQVPYNNAVNYGPNNGYGGRYQNNKPSTPMRSPASNEAQESLTIGIADEHIGAVVGRAGRNITEIIQASGARIKISDRGDFISGTSDRKVTITGTSEAIRTAESMIMQRVSASSERL

SEQ ID NO: 111933 - protein, 245 aa, Zea mays subsp. mays
  misc_feature (1)..(245): Ceres Seq. ID no. 15218980
  misc_feature (28)..(79): Pfam Name: KH domain Pfam Description: KH domain
  misc_feature (160)..(245): Homolog of NCBI NO: 19527741 NR Description: AT03366p [Drosophila melanogaster]
  misc_feature (1)..(138): Homolog of NCBI NO: 19527741 NR Description: AT03366p [Drosophila melanogaster]
  misc_feature (143)..(239): Homolog of NCBI NO: 33516919 NR Description: RNA-binding protein Nova-1 (Neuro-oncological
  misc_feature (1)..(141): Homolog of NCBI NO: 33516919 NR Description: RNA-binding protein Nova-1 (Neuro-oncological
  misc_feature (160)..(245): Homolog of NCBI NO: 24645370 NR Description: pasilla CG8144-PC [Drosophila melanogaster]
  misc_feature (1)..(138): Homolog of NCBI NO: 24645370 NR Description: pasilla CG8144-PC [Drosophila melanogaster]
  misc_feature (135)..(244): Homolog of NCBI NO: 15237716 NR Description: KH domain protein Nova, putative [Arabidopsis
  misc_feature (1)..(112): Homolog of NCBI NO: 15237716 NR Description: KH domain protein Nova, putative [Arabidopsis
  misc_feature (1)..(244): Homolog of NCBI NO: 30680512 NR Description: KH domain protein Nova, putative [Arabidopsis
  misc_feature (17)..(244): Homolog of NCBI NO: 542190 NR Description: hypothetical protein 1087 - maize
MKAMELILEKLLAEGEEFNEAEARPKVRLVVPNNSCGGIIGKGGATIKSFIEESHAGIKISPQDNNYVGLHDRLVTVTGTFDNQMNAIDLILKKLSEDVHYPANLSSPFPYAGLTFPSYPGVPVGYMIPQVPYNNAVNYGPNNGYGGRYQNNKPSTPMRSPASNEAQESLTIGIADEHIGAVVGRAGRNITEIIQASGARIKISDRGDFISGTSDRKVTITGTSEAIRTAESMIMQRVSASSERL

SEQ ID NO: 111934 - DNA, 991 bp, Zea mays subsp. mays
  misc_feature (1)..(991): Ceres Seq. ID no. 13586919
aggcttcacccgttttgctctcgagtctctcccggttcggatccaaattcagcaatccgacctgagaccaagaccgcgcaccacgcggctcgccgccgatggcgaacgccgacgccgacgaagcgccgctgctctctgtggaacacctccgtccaggatcctgcagccgcgagctcgagctgcgggagttccgcgaccgctacgtgatccgttcgctcgacggcgccgccgctttcgccgtccttcgctccggcggctccatccgccctctctccccagaggaagccgtagctgagagcgactgcaaggtttccagaatatacggcgtggtcggcaccataagattgctcgctggaagctatgtactcgttatcacttctcagaaagatgctggctcttatctgggctcccctgtgtaccaagtgaactcaatgaaattcttatgctgcaacgaggctatcaagcacttgactccacaggaaagaagggatgaggcatacttcatgtctctcctgagaattgcagaaactacttgtggattgtattattcatatgacagggatttgacactaaagtaagtgctttgtcatgcatgtatctgaataaggcaaccaaaagacattggcttaatattcagaaaaggccaacaacctttgtgtagtgattatgcacatccttaagatatttttttttctcaaacaacacatgagaactgtgtgcatttcattaagtagagaaaaaaaaccaaaggagaagcagtgtgtggcgctgttagccttgtactaggtggcctagggaagttggcctcctggaaaaaagccgaaacagtcagagcaccctgaatgtcctggatccagagattctgatctaaatcctcctgtaccgttcatctcctcgtcgacatttgtaactaatcgattgcctgttagttccattattccttgcagatgtgtagtaggttcttgaagtatggatctattgagcacttctt

SEQ ID NO: 111935 - protein, 159 aa, Zea mays subsp. mays
  misc_feature (1)..(159): Ceres Seq. ID no. 13586920
  misc_feature (74)..(158): Pfam Name: SacI homology domain Pfam Description: SacI homology domain
  misc_feature (26)..(158): Homolog of NCBI NO: 11281506 NR Description: hypothetical protein F26O13.100 - Arabidopsis
  misc_feature (26)..(158): Homolog of NCBI NO: 30693470 NR Description: expressed protein [Arabidopsis thaliana]
  misc_feature (26)..(158): Homolog of NCBI NO: 10177117 NR Description: emb|CAB63010.1~gene_id:K2A18.9~strong similarity
  misc_feature (26)..(158): Homolog of NCBI NO: 30840665 NR Description: SAC1-like protein AtSAC1b [Arabidopsis thaliana]
  misc_feature (26)..(158): Homolog of NCBI NO: 15239234 NR Description: hypothetical protein [Arabidopsis thaliana]
  misc_feature (25)..(158): Homolog of NCBI NO: 30693541 NR Description: transmembrane protein G5p (AtG5) -related
MANADADEAPLLSVEHLRPGSCSRELELREFRDRYVIRSLDGAAAFAVLRSGGSIRPLSPEEAVAESDCKVSRIYGVVGTIRLLAGSYVLVITSQKDAGSYLGSPVYQVNSMKFLCCNEAIKHLTPQERRDEAYFMSLLRIAETTCGLYYSYDRDLTLK

SEQ ID NO: 111936 - protein, 97 aa, Zea mays subsp. mays
  misc_feature (1)..(97): Ceres Seq. ID no. 13586921
GFTRFALESLPVRIQIQQSDLRPRPRTTRLAADGERRRRRSAAALCGTPPSRILQPRARAAGVPRPLRDPFARRRRRFRRPSLRRLHPPSLPRGSRS

SEQ ID NO: 111937 - DNA, 889 bp, Zea mays subsp. mays
  misc_feature (1)..(889): Ceres Seq. ID no. 12589728
gtggtatttgactttcagtcgttttcttttgttttaaagtgttgtattatgttacaatgttctgtactgacttgccgttgccttacgctacatgttagttcatccatttttgagagatagctttttataatcccattttttgttttgcagcatgtcctgcagcatgggaaaccagaagagcgttctacaataattacacaactcgctggacagatagtgaaaatgagccagcagaaatttgcttctaatgttgttgaaaagtgtcttacttttggtaatcctgagcaacgtcagattctgatcactgaaatgcttggcacaactgatgagaatgagccgttacaggttcgttttcaacaattggactgagcatgctccttttaaaaaaaaacagtaccaggatttgctgctgcagggttgaatttcatacattctaagtttctaacaacacttgtaatgtgaacttatgttccccaggcaatgatgaaagaccagttcgcaaactatgtggtgcagaaggttctggagatatgtgatgaccagaaccgtgaattgattctttcccgtatcaaggtccacttgaatgcactgaaaagatacacctatgggaagcatatcgtggcacgtgttgagaagcttattgctgcaggagaacggcgcattggtgccccatcctcttgctgagatggcaataaagctatatacaggtcgcagaataacacctgtacagacagacagggatagcgaggcctagctttttaccattaccagtagtcggtaatattgagcgacggagaggttaaaaaaggctcccaaatcctttgatgtaaataaaggatagccgctggaaataaataaaaagaatgagaaaagatgaagagattttgct

SEQ ID NO: 111938 - protein, 67 aa, Zea mays subsp. mays
  misc_feature (1)..(67): Ceres Seq. ID no. 12589729
  misc_feature (1)..(52): Homolog of NCBI NO: 15489333 NR Description: Unknown (protein for IMAGE:3595161) [Mus musculus]
  misc_feature (1)..(62): Homolog of NCBI NO: 34908236 NR Description: putative pumilio/Mpt5 family RNA-binding protein
  misc_feature (1)..(65): Homolog of NCBI NO: 20465637 NR Description: putative pumilio/Mpt5 family RNA-binding protein
  misc_feature (1)..(65): Homolog of NCBI NO: 15227051 NR Description: pumilio-family RNA-binding protein, putative
  misc_feature (1)..(66): Homolog of NCBI NO: 34906006 NR Description: P0518C01.14 [Oryza sativa (japonica
  misc_feature (1)..(57): Homolog of NCBI NO: 6056191 NR Description: putative RNA binding protein [Arabidopsis
  misc_feature (1)..(65): Homolog of NCBI NO: 15227052 NR Description: pumilio-family RNA-binding protein, putative
  misc_feature (1)..(66): Homolog of NCBI NO: 22330960 NR Description: pumilio-family RNA-binding protein, putative
  misc_feature (1)..(65): Homolog of NCBI NO: 15227038 NR Description: pumilio-family RNA-binding protein, putative
  misc_feature (1)..(66): Homolog of NCBI NO: 26450884 NR Description: putative RNA binding protein [Arabidopsis
MMKDQFANYVVQKVLEICDDQNRELILSRIKVHLNALKRYTYGKHIVARVEKLIAAGERRIGAPSSC

SEQ ID NO: 111939 - protein, 66 aa, Zea mays subsp. mays
  misc_feature (1)..(66): Ceres Seq. ID no. 12589730
  misc_feature (1)..(51): Homolog of NCBI NO: 15489333 NR Description: Unknown (protein for IMAGE:3595161) [Mus musculus]
  misc_feature (1)..(61): Homolog of NCBI NO: 34908236 NR Description: putative pumilio/Mpt5 family RNA-binding protein
  misc_feature (1)..(64): Homolog of NCBI NO: 20465637 NR Description: putative pumilio/Mpt5 family RNA-binding protein
  misc_feature (1)..(64): Homolog of NCBI NO: 15227051 NR Description: pumilio-family RNA-binding protein, putative
  misc_feature (1)..(65): Homolog of NCBI NO: 34906006 NR Description: P0518C01.14 [Oryza sativa (japonica
  misc_feature (1)..(56): Homolog of NCBI NO: 6056191 NR Description: putative RNA binding protein [Arabidopsis
  misc_feature (1)..(64): Homolog of NCBI NO: 15227052 NR Description: pumilio-family RNA-binding protein, putative
  misc_feature (1)..(65): Homolog of NCBI NO: 22330960 NR Description: pumilio-family RNA-binding protein, putative
  misc_feature (1)..(64): Homolog of NCBI NO: 15227038 NR Description: pumilio-family RNA-binding protein, putative
  misc_feature (1)..(65): Homolog of NCBI NO: 26450884 NR Description: putative RNA binding protein [Arabidopsis
MKDQFANYVVQKVLEICDDQNRELILSRIKVHLNALKRYTYGKHIVARVEKLIAAGERRIGAPSSC

SEQ ID NO: 111940 - protein, 49 aa, Zea mays subsp. mays
  misc_feature (1)..(49): Ceres Seq. ID no. 12589731
MGSISWHVLRSLLLQENGALVPHPLAEMAIKLYTGRRITPVQTDRDSEA

SEQ ID NO: 111941 - DNA, 878 bp, Zea mays subsp. mays
  misc_feature (1)..(878): Ceres Seq. ID no. 14312702
  misc_feature: MA Experiment ID: 108530 Result: Down-regulated in Transcription
  misc_feature: MA Experiment 108530 PARAMETER Experiment Name: Zm_Imbibed_Seeds_P Parameter: Age (day) Value: 6 vs. 2
  misc_feature: MA Experiment 108530 PARAMETER Experiment Name: Zm_Imbibed_Seeds_P Parameter: Organism Value: Zea mays
  misc_feature: MA Experiment 108530 PARAMETER Experiment Name: Zm_Imbibed_Seeds_P Parameter: Plant Line Value: 35A19
  misc_feature: MA Experiment 108530 PARAMETER Experiment Name: Zm_Imbibed_Seeds_P Parameter: Tissue Value: Aerial vs. Embryo
  misc_feature: MA Experiment ID: 108535 Result: Up-regulated in Transcription
  misc_feature: MA Experiment 108535 PARAMETER Experiment Name: Zm_Meristem_P Parameter: Age (day) Value: 8
  misc_feature: MA Experiment 108535 PARAMETER Experiment Name: Zm_Meristem_P Parameter: Organism Value: Zea mays
  misc_feature: MA Experiment 108535 PARAMETER Experiment Name: Zm_Meristem_P Parameter: Plant Line Value: 35A19
  misc_feature: MA Experiment 108535 PARAMETER Experiment Name: Zm_Meristem_P Parameter: Tissue Value: Root Meristem vs. Above Root Meristem
  misc_feature: MA Experiment ID: 108544 Result: Down-regulated in Transcription
  misc_feature: MA Experiment ID: 20000488 Result: Up-regulated in Transcription
  misc_feature: MA Experiment 20000488 PARAMETER Experiment Name: Zm_50mM_NH4NO3_L_to_H_P Parameter: Organism Value: Zea mays
  misc_feature: MA Experiment 20000488 PARAMETER Experiment Name: Zm_50mM_NH4NO3_L_to_H_P Parameter: Timepoint (hr) Value: 8
  misc_feature: MA Experiment 20000488 PARAMETER Experiment Name: Zm_50mM_NH4NO3_L_to_H_P Parameter: Tissue Value: Leaves
  misc_feature: MA Experiment 20000488 PARAMETER Experiment Name: Zm_50mM_NH4NO3_L_to_H_P Parameter: Treatment Value: 50mM NH4NO3 vs. 100mM Mannitol
  misc_feature: MA Experiment ID: 20001612 Result: Up-regulated in Transcription
  misc_feature: MA Experiment 20001612 PARAMETER Experiment Name: Zm_50ppm_KNO3_L-to-H_P Parameter: Age (day) Value: 19
  misc_feature: MA Experiment 20001612 PARAMETER Experiment Name: Zm_50ppm_KNO3_L-to-H_P Parameter: Organism Value: Zea mays
  misc_feature: MA Experiment 20001612 PARAMETER Experiment Name: Zm_50ppm_KNO3_L-to-H_P Parameter: Plant Line Value: 35A19
  misc_feature: MA Experiment 20001612 PARAMETER Experiment Name: Zm_50ppm_KNO3_L-to-H_P Parameter: Timepoint (hr) Value: 8
  misc_feature: MA Experiment 20001612 PARAMETER Experiment Name: Zm_50ppm_KNO3_L-to-H_P Parameter: Tissue Value: Roots
  misc_feature: MA Experiment 20001612 PARAMETER Experiment Name: Zm_50ppm_KNO3_L-to-H_P Parameter: Treatment Value: 50ppm KNO3 vs. 50ppm KCl
aaattaaaccgccggcgcctccacttcgcgttctcgcctcatctcctcccgctcaggatccgccggcgaaggtaaggcaagatgtacaccgcgaggaagaagatccagaaggataagggccttgagccctctgagttcgaggactctgtcgcccaggctttcttcgacctggagaacggtaaccaggagctcaagagcgacctcaaggacctttacatcaacggtgctatccagctggatgttgccgggagcaggaaggctgttgtgatccacgtcccataccgcttgcgcaaggccttcaggaagatccatgtcaggatcgtcagggagctggagaagaaattcagcggcaaggatgtggtaattgttgccacaaggaggatcgtgcggccgcccaagaagggttcagctgttcagcgccctcgctccaggactctgactgctgtccacgatggcatcttggaggatgttgtcttcccagctgagattgtggggaagcgagtcaggtaccgtctggatggtgccaagatcatcaaggtaacctacatgtcttattgaggaactgaaagatgccacatgatcttcttggacccaaaggagaggaacaacaccgaatacaagctggacacctacactacggtctaccgcaggctgtgtgggaaagatgtggtctttgagtaccctatgaccgaaaatgcataaatatgacgccccggatatccccatttcatttcgttgaatctgggtgtttctttggggtctcaactagactgctccgtatgtacttcaaaaaccatagttttgatgccaaagttgcctaggaatttggtactcgggaattggcagcggacgtgaacaatgttaagttttgagcattt

SEQ ID NO: 111942 - protein, 158 aa, Zea mays subsp. mays
  misc_feature (1)..(158): Ceres Seq. ID no. 14312703
  misc_feature (4)..(158): Pfam Name: Ribosomal protein S7e Pfam Description: Ribosomal protein S7e
  misc_feature (1)..(158): Homolog of NCBI NO: 22758886 NR Description: ribosomal protein S7 [Argopecten irradians]
  misc_feature (1)..(158): Homolog of NCBI NO: 21592413 NR Description: 40S ribosomal protein S7-like [Arabidopsis
  misc_feature (1)..(158): Homolog of NCBI NO: 15237278 NR Description: 40S ribosomal protein S7 (RPS7C) [Arabidopsis
  misc_feature (1)..(158): Homolog of NCBI NO: 15232926 NR Description: 40S ribosomal protein S7 (RPS7B) [Arabidopsis
  misc_feature (1)..(158): Homolog of NCBI NO: 15221972 NR Description: 40S ribosomal protein S7 (RPS7A) [Arabidopsis
  misc_feature (1)..(158): Homolog of NCBI NO: 20139962 NR Description: 40S ribosomal protein S7
  misc_feature (1)..(158): Homolog of NCBI NO: 20139964 NR Description: 40S ribosomal protein S7
  misc_feature (1)..(158): Homolog of NCBI NO: 14787424 NR Description: Ribosomal protein S7 [Hordeum vulgare subsp.
  misc_feature (1)..(158): Homolog of NCBI NO: 22671664 NR Description: ribosomal protein S7 [Oryza sativa (japonica
  misc_feature (1)..(158): Homolog of NCBI NO: 4588906 NR Description: ribosomal protein S7 [Secale cereale]
MYTARKKIQKDKGLEPSEFEDSVAQAFFDLENGNQELKSDLKDLYINGAIQLDVAGSRKAVVIHVPYRLRKAFRKIHVRIVRELEKKFSGKDVVIVATRRIVRPPKKGSAVQRPRSRTLTAVHDGILEDVVFPAEIVGKRVRYRLDGAKIIKVTYMSY

SEQ ID NO: 111943 - DNA, 1035 bp, Zea mays subsp. mays
  misc_feature (1)..(1035): Ceres Seq. ID no. 13586862
acatcctaatcgaaaaagaggaacccaaaccacctcggccggtcggcccacgggccacgacccaaaaaaggatcaaggtgggagaaacaaaacacaaggcggcgtccacagcttccccactccacgttccgtgtttccgactccggtgactccaccaccagcaacccgtgcagcgagcgcactccgaccatcgccatgtcgaggcgcggcgactgggtctacgagaacaacggcgggacctgcgtggccatcgccggcgctgattactgtgtcgtcgctgcggacacccgcctctctgtaggatacagtatcctcacgcgtgatcactccaagatctgcgacctggctgacaaatgtgtactggcatcttctggctttcaaggtgatattaaggctctgcagaagaacctagctgccagagaattgctgtaccaacaccagcataataaaaggatgagctgccccgccatggcacagctcctctccaataccctgtactacaagcgattcttcccatattacgccttcaatgtgctcggtgggcttgacagcgaggggaaaggatgcgttttcacctatgatgcagtaggttcctatgagagaaccggttacagtgctcagggaacgggatctactttgatcatgccagtcctggacaatcaactaaaatcaccaagtcctctattactccctgtcagggatgctgtcacaccattgtcggagtcagaggccatcgatctagttaaggacgtgttcgcatctgcaactgagagagacatctacactggagacaagttggaaattgtagtcattaacaaggccggtactatgcgcgagtatatcgacctgagaaaggattaagccaacacttcagttgtgctgcagctgtcatttgctttgaactttttttcctagtctggtgatttatgtctaaagctgttgcttcataggaacacttgtgtttacttgcatatgtaatgtacggtatgtaccaggattcagtgagttttttttctgttgaaacaaattgcttgg

SEQ ID NO: 111944 - protein, 221 aa, Zea mays subsp. mays
  misc_feature (1)..(221): Ceres Seq. ID no. 13586863
  misc_feature (10)..(206): Pfam Name: Proteasome A-type and B-type Pfam Description: Proteasome A-type and B-type
  misc_feature (9)..(221): Homolog of NCBI NO: 12653473 NR Description: proteasome (prosome, macropain) subunit, beta
  misc_feature (9)..(221): Homolog of NCBI NO: 4506193 NR Description: proteasome beta 1 subunit
  misc_feature (9)..(221): Homolog of NCBI NO: 17380207 NR Description: Proteasome subunit beta type 1-A (20S proteasome
  misc_feature (9)..(221): Homolog of NCBI NO: 17380206 NR Description: Proteasome subunit beta type 1-B (20S proteasome
  misc_feature (9)..(221): Homolog of NCBI NO: 28829610 NR Description: similar to Petunia hybrida (Petunia). Proteasome beta type 1 (EC 3.4.99.46) (20S proteasome alpha subunit F) (20S
  misc_feature (9)..(198): Homolog of NCBI NO: 14594933 NR Description: putative beta6 proteasome subunit [Nicotiana
  misc_feature (3)..(221): Homolog of NCBI NO: 15232965 NR Description: 20S proteasome beta subunit F1 (PBF1)
  misc_feature (1)..(221): Homolog of NCBI NO: 600387 NR Description: proteosome subunit [Arabidopsis thaliana]
  misc_feature (3)..(221): Homolog of NCBI NO: 17380185 NR Description: Proteasome subunit beta type 1 (20S proteasome
  misc_feature (1)..(221): Homolog of NCBI NO: 17380182 NR Description: Proteasome subunit beta type 1 (20S proteasome
MSRRGDWVYENNGGTCVAIAGADYCVVAADTRLSVGYSILTRDHSKICDLADKCVLASSGFQGDIKALQKNLAARELLYQHQHNKRMSCPAMAQLLSNTLYYKRFFPYYAFNVLGGLDSEGKGCVFTYDAVGSYERTGYSAQGTGSTLIMPVLDNQLKSPSPLLLPVRDAVTPLSESEAIDLVKDVFASATERDIYTGDKLEIVVINKAGTMREYIDLRKD

SEQ ID NO: 111945 - protein, 135 aa, Zea mays subsp. mays
  misc_feature (1)..(135): Ceres Seq. ID no. 13586864
  misc_feature (1)..(120): Pfam Name: Proteasome A-type and B-type Pfam Description: Proteasome A-type and B-type
  misc_feature (1)..(135): Homolog of NCBI NO: 12653473 NR Description: proteasome (prosome, macropain) subunit, beta
  misc_feature (1)..(135): Homolog of NCBI NO: 4506193 NR Description: proteasome beta 1 subunit
  misc_feature (1)..(135): Homolog of NCBI NO: 17380207 NR Description: Proteasome subunit beta type 1-A (20S proteasome
  misc_feature (1)..(135): Homolog of NCBI NO: 17380206 NR Description: Proteasome subunit beta type 1-B (20S proteasome
  misc_feature (1)..(135): Homolog of NCBI NO: 28829610 NR Description: similar to Petunia hybrida (Petunia). Proteasome beta type 1 (EC 3.4.99.46) (20S proteasome alpha subunit F) (20S
  misc_feature (1)..(112): Homolog of NCBI NO: 14594933 NR Description: putative beta6 proteasome subunit [Nicotiana
  misc_feature (1)..(135): Homolog of NCBI NO: 15232965 NR Description: 20S proteasome beta subunit F1 (PBF1)
  misc_feature (1)..(135): Homolog of NCBI NO: 600387 NR Description: proteosome subunit [Arabidopsis thaliana]
  misc_feature (1)..(135): Homolog of NCBI NO: 17380185 NR Description: Proteasome subunit beta type 1 (20S proteasome
  misc_feature (1)..(135): Homolog of NCBI NO: 17380182 NR Description: Proteasome subunit beta type 1 (20S proteasome
MSCPAMAQLLSNTLYYKRFFPYYAFNVLGGLDSEGKGCVFTYDAVGSYERTGYSAQGTGSTLIMPVLDNQLKSPSPLLLPVRDAVTPLSESEAIDLVKDVFASATERDIYTGDKLEIVVINKAGTMREYIDLRKD

SEQ ID NO: 111946 - protein, 130 aa, Zea mays subsp. mays
  misc_feature (1)..(130): Ceres Seq. ID no. 13586865
  misc_feature (1)..(115): Pfam Name: Proteasome A-type and B-type Pfam Description: Proteasome A-type and B-type
  misc_feature (1)..(130): Homolog of NCBI NO: 12653473 NR Description: proteasome (prosome, macropain) subunit, beta
  misc_feature (1)..(130): Homolog of NCBI NO: 4506193 NR Description: proteasome beta 1 subunit
  misc_feature (1)..(130): Homolog of NCBI NO: 17380207 NR Description: Proteasome subunit beta type 1-A (20S proteasome
  misc_feature (1)..(130): Homolog of NCBI NO: 17380206 NR Description: Proteasome subunit beta type 1-B (20S proteasome
  misc_feature (1)..(130): Homolog of NCBI NO: 28829610 NR Description: similar to Petunia hybrida (Petunia). Proteasome beta type 1 (EC 3.4.99.46) (20S proteasome alpha subunit F) (20S
  misc_feature (1)..(107): Homolog of NCBI NO: 14594933 NR Description: putative beta6 proteasome subunit [Nicotiana
  misc_feature (1)..(130): Homolog of NCBI NO: 15232965 NR Description: 20S proteasome beta subunit F1 (PBF1)
  misc_feature (1)..(130): Homolog of NCBI NO: 600387 NR Description: proteosome subunit [Arabidopsis thaliana]
  misc_feature (1)..(130): Homolog of NCBI NO: 17380185 NR Description: Proteasome subunit beta type 1 (20S proteasome
  misc_feature (1)..(130): Homolog of NCBI NO: 17380182 NR Description: Proteasome subunit beta type 1 (20S proteasome
MAQLLSNTLYYKRFFPYYAFNVLGGLDSEGKGCVFTYDAVGSYERTGYSAQGTGSTLIMPVLDNQLKSPSPLLLPVRDAVTPLSESEAIDLVKDVFASATERDIYTGDKLEIVVINKAGTMREYIDLRKD

SEQ ID NO: 111947 - DNA, 1411 bp, Zea mays subsp. mays
  misc_feature (1)..(1411): Ceres Seq. ID no. 14301978
ataaaaatgcctctgccttgcgtctctctcttcttcctccccaccccacgaggcgctagctgcggcacggaaccagcgccattagaggccacaagcccgcaccacgcctccctcgttctcgcgcgcgcgcacgcatgcacgaggagctgctgcagagaagaggaggcctgtcgatttgattgaactttccaaattcagattcagaagctggccaagatgactgccggtttccagctcggcgtgatcgggtctctcacgctctccgtcgcgtcgtcggttgccattgtcatctgcaacaaagccctcatcagcaccctaggctttccattcgctacgactctgacaagctggcacctgatggtgaccttctgcaccctccacgtggcgcagcgcctgcgctttttcgagcccaaggcgatcgacgggcagacggtagttctgtttggcttgctcaacgggacctcgattggccttctgaaccttagtttagggttcaactccatcggattctaccagatgacgaagttggccataatacccttcacggtgctgttggagactatattcctgaagaaaagattcagtgagacgatcaagttttctctgctggtcttgctgctcggagttggcatcgcctcagttacggacctcaagttaaactgcctcgggtccgttctttccggcctcgccatcgccaccacttgtgtcggccaaattctcacgaatacgatacagaggaagctgaaggtctcgtcaacgcagctcctgtaccagtcagcgccttaccaagcagccattctgttcgccactggccccttcgtggaccatctcctcaccggccgcagcgtcttcgcccatagatacactttcccggttgtgggcttcatcgtcctgtcgtgcttgatcgcggtgtcggtgaacttcagcacgttcctggtgatcgggacgacgtcgccggtgacgtaccaggtgctgggccacctcaagacgtgcctggtgctgtcgttcgggtacacgctgctgcacgatcctttcaccgtgcggaacatcctgggcatcctcgtcgccatcttcgggatggcgctctactccatcttctcggtgcgtgagggcaagaagaagtccgcaggcgacgccctcccggtgtcacagatgcctgacaaggagacggagccgctgttggcgaccaaggacaacagcgacaccaaaaaggcgaacggggttgctcacgactgctaagatgttcccgtttgccgttgcttatagcctaattagtccagctctagtgttactacgacgcactgttctgaatctcagaaagtcagggaagaagtcattcctttttgtttcttataatattgtatatgtaatattcctctattgcgaattataagccgtttcaatttttttg

SEQ ID NO: 111948 - protein, 340 aa, Zea mays subsp. mays
  misc_feature (1)..(340): Ceres Seq. ID no. 14301979
  misc_feature (162)..(291): Pfam Name: Integral membrane protein DUF6 Pfam Description: Integral membrane protein DUF6
  misc_feature (16)..(329): Homolog of NCBI NO: 15234794 NR Description: transporter-related [Arabidopsis thaliana]
  misc_feature (10)..(336): Homolog of NCBI NO: 15238957 NR Description: transporter-related [Arabidopsis thaliana]
  misc_feature (101)..(335): Homolog of NCBI NO: 25406945 NR Description: hypothetical protein [imported] - Arabidopsis
  misc_feature (101)..(322): Homolog of NCBI NO: 37535412 NR Description: putative
  misc_feature (5)..(339): Homolog of NCBI NO: 13699188 NR Description: putative glucose-6-phosphate/phosphate-tranlocat
  misc_feature (5)..(339): Homolog of NCBI NO: 34896140 NR Description: P0701D05.25 [Oryza sativa (japonica
  misc_feature (5)..(335): Homolog of NCBI NO: 22329373 NR Description: transporter-related [Arabidopsis thaliana]
  misc_feature (5)..(336): Homolog of NCBI NO: 27311731 NR Description: putative integral membrane protein [Arabidopsis
  misc_feature (6)..(332): Homolog of NCBI NO: 30683853 NR Description: transporter-related [Arabidopsis thaliana]
  misc_feature (3)..(322): Homolog of NCBI NO: 13384378 NR Description: putative phosphate translocator
MTAGFQLGVIGSLTLSVASSVAIVICNKALISTLGFPFATTLTSWHLMVTFCTLHVAQRLRFFEPKAIDGQTVVLFGLLNGTSIGLLNLSLGFNSIGFYQMTKLAIIPFTVLLETIFLKKRFSETIKFSLLVLLLGVGIASVTDLKLNCLGSVLSGLAIATTCVGQILTNTIQRKLKVSSTQLLYQSAPYQAAILFATGPFVDHLLTGRSVFAHRYTFPVVGFIVLSCLIAVSVNFSTFLVIGTTSPVTYQVLGHLKTCLVLSFGYTLLHDPFTVRNILGILVAIFGMALYSIFSVREGKKKSAGDALPVSQMPDKETEPLLATKDNSDTKKANGVAHDC

SEQ ID NO: 111949 - protein, 293 aa, Zea mays subsp. mays
  misc_feature (1)..(293): Ceres Seq. ID no. 14301980
  misc_feature (115)..(244): Pfam Name: Integral membrane protein DUF6 Pfam Description: Integral membrane protein DUF6
  misc_feature (1)..(282): Homolog of NCBI NO: 15234794 NR Description: transporter-related [Arabidopsis thaliana]
  misc_feature (1)..(289): Homolog of NCBI NO: 15238957 NR Description: transporter-related [Arabidopsis thaliana]
  misc_feature (54)..(288): Homolog of NCBI NO: 25406945 NR Description: hypothetical protein [imported] - Arabidopsis
  misc_feature (54)..(275): Homolog of NCBI NO: 37535412 NR Description: putative
  misc_feature (1)..(292): Homolog of NCBI NO: 13699188 NR Description: putative glucose-6-phosphate/phosphate-tranlocat
  misc_feature (1)..(292): Homolog of NCBI NO: 34896140 NR Description: P0701D05.25 [Oryza sativa (japonica
  misc_feature (1)..(288): Homolog of NCBI NO: 22329373 NR Description: transporter-related [Arabidopsis thaliana]
  misc_feature (1)..(289): Homolog of NCBI NO: 27311731 NR Description: putative integral membrane protein [Arabidopsis
  misc_feature (1)..(285): Homolog of NCBI NO: 30683853 NR Description: transporter-related [Arabidopsis thaliana]
  misc_feature (1)..(275): Homolog of NCBI NO: 13384378 NR Description: putative phosphate translocator
MVTFCTLHVAQRLRFFEPKAIDGQTVVLFGLLNGTSIGLLNLSLGFNSIGFYQMTKLAIIPFTVLLETIFLKKRFSETIKFSLLVLLLGVGIASVTDLKLNCLGSVLSGLAIATTCVGQILTNTIQRKLKVSSTQLLYQSAPYQAAILFATGPFVDHLLTGRSVFAHRYTFPVVGFIVLSCLIAVSVNFSTFLVIGTTSPVTYQVLGHLKTCLVLSFGYTLLHDPFTVRNILGILVAIFGMALYSIFSVREGKKKSAGDALPVSQMPDKETEPLLATKDNSDTKKANGVAHDC

SEQ ID NO: 111950 - protein, 240 aa, Zea mays subsp. mays
  misc_feature (1)..(240): Ceres Seq. ID no. 14301981
  misc_feature (62)..(191): Pfam Name: Integral membrane protein DUF6 Pfam Description: Integral membrane protein DUF6
  misc_feature (1)..(229): Homolog of NCBI NO: 15234794 NR Description: transporter-related [Arabidopsis thaliana]
  misc_feature (1)..(236): Homolog of NCBI NO: 15238957 NR Description: transporter-related [Arabidopsis thaliana]
  misc_feature (1)..(235): Homolog of NCBI NO: 25406945 NR Description: hypothetical protein [imported] - Arabidopsis
  misc_feature (1)..(222): Homolog of NCBI NO: 37535412 NR Description: putative
  misc_feature (1)..(239): Homolog of NCBI NO: 13699188 NR Description: putative glucose-6-phosphate/phosphate-tranlocat
  misc_feature (1)..(239): Homolog of NCBI NO: 34896140 NR Description: P0701D05.25 [Oryza sativa (japonica
  misc_feature (1)..(235): Homolog of NCBI NO: 22329373 NR Description: transporter-related [Arabidopsis thaliana]
  misc_feature (1)..(236): Homolog of NCBI NO: 27311731 NR Description: putative integral membrane protein [Arabidopsis
  misc_feature (1)..(232): Homolog of NCBI NO: 30683853 NR Description: transporter-related [Arabidopsis thaliana]
  misc_feature (1)..(222): Homolog of NCBI NO: 13384378 NR Description: putative phosphate translocator
MTKLAIIPFTVLLETIFLKKRFSETIKFSLLVLLLGVGIASVTDLKLNCLGSVLSGLAIATTCVGQILTNTIQRKLKVSSTQLLYQSAPYQAAILFATGPFVDHLLTGRSVFAHRYTFPVVGFIVLSCLIAVSVNFSTFLVIGTTSPVTYQVLGHLKTCLVLSFGYTLLHDPFTVRNILGILVAIFGMALYSIFSVREGKKKSAGDALPVSQMPDKETEPLLATKDNSDTKKANGVAHDC

SEQ ID NO: 111951 - DNA, 886 bp, Zea mays subsp. mays
  misc_feature (1)..(886): Ceres Seq. ID no. 12634921
  misc_feature: MA Experiment ID: 108689 Result: Down-regulated in Transcription
  misc_feature: MA Experiment 108689 PARAMETER Experiment Name: Zm_Drought_Roots_P Parameter: Age (day) Value: 9
  misc_feature: MA Experiment 108689 PARAMETER Experiment Name: Zm_Drought_Roots_P Parameter: Organism Value: Zea mays
  misc_feature: MA Experiment 108689 PARAMETER Experiment Name: Zm_Drought_Roots_P Parameter: Plant Line Value: 35A19
  misc_feature: MA Experiment 108689 PARAMETER Experiment Name: Zm_Drought_Roots_P Parameter: Timepoint (hr) Value: 24
  misc_feature: MA Experiment 108689 PARAMETER Experiment Name: Zm_Drought_Roots_P Parameter: Tissue Value: Roots
  misc_feature: MA Experiment 108689 PARAMETER Experiment Name: Zm_Drought_Roots_P Parameter: Treatment Value: Drought vs. No Drought
gaactcggagcttccagcaacctcagctcatagccgcattcgcctctgcagcgggagcgcacaagaacgcaggctcccacggcccacgtgtcctgctttcgacagatggcgcgtcggaacgaccacgtgttatccctcctcggggcaatggcggcgctggtgctgtttgcggccaccgccgccgcagcccagggctgtgcgccgggaaacctccagccaggaaggtcgttcgagcggtgcgccgacctgcccgagctcggcgccagcctgtactggacgtaccacccggcgaacggcacggcggacctggcgttccgggcgccgcagagcagcagcggctgggtggcctggggcatcaacaccgagcgccccagcagcatggcgggcagcagcgtgttcgtcgcctcgctgggcggcgacggcggctcggtgtccgtcctggcgacctacctggagtccacgtcgcccgccctggccaacggcaccctcaagctcgacgtgcccgtcgcgcccctcgccgagtacgcggccggcgcctacaccgtctacgtcacggtggcgctccccgggaactccacgcagcagaacacggtgtggcaggcgggcccgctcagcgccggccagatcgcgccacacccgatcgccgggccaaacgtgcagagcaccatggtgttggacttcctgtctggcggcaaaagcacagcgctacccaacttcgacgtgcaccgtcgtagcttgaggagtttccggggatgaaaggctatcccatgcgatcgtgaacatcgtctagttcaatgtctcaagcatagagatacattagatgtgtttaaattatgtgtcttactttatttattgtatcaatcaaaatattcaataaattaaattg

SEQ ID NO: 111952 - protein, 245 aa, Zea mays subsp. mays
  misc_feature (1)..(245): Ceres Seq. ID no. 12634922
  misc_feature (68)..(218): Homolog of NCBI NO: 23012768 NR Description: hypothetical protein [Magnetospirillum
  misc_feature (102)..(237): Homolog of NCBI NO: 1657601 NR Description: unknown [Nannocystis exedens]
  misc_feature (54)..(227): Homolog of NCBI NO: 29828765 NR Description: putative protoporphyrinogen oxidase
NSELPATSAHSRIRLCSGSAQERRLPRPTCPAFDRWRVGTTTCYPSSGQWRRWCCLRPPPPQPRAVRRETSSQEGRSSGAPTCPSSAPACTGRTTRRTARRTWRSGRRRAAAAGWPGASTPSAPAAWRAAACSSPRWAATAARCPSWRPTWSPRRPPWPTAPSSSTCPSRPSPSTRPAPTPSTSRWRSPGTPRSRTRCGRRARSAPARSRHTRSPGQTCRAPWCWTSCLAAKAQRYPTSTCTVVA

SEQ ID NO: 111953 - protein, 243 aa, Zea mays subsp. mays
  misc_feature (1)..(243): Ceres Seq. ID no. 12634923
TRSFQQPQLIAAFASAAGAHKNAGSHGPRVLLSTDGASERPRVIPPRGNGGAGAVCGHRRRSPGLCAGKPPARKVVRAVRRPARARRQPVLDVPPGERHGGPGVPGAAEQQRLGGLGHQHRAPQQHGGQQRVRRLAGRRRRLGVRPGDLPGVHVARPGQRHPQARRARRAPRRVRGRRLHRLRHGGAPRELHAAEHGVAGGPAQRRPDRATPDRRAKRAEHHGVGLPVWRQKHSATQLRRAPS

SEQ ID NO: 111954 - protein, 216 aa, Zea mays subsp. mays
  misc_feature (1)..(216): Ceres Seq. ID no. 12634924
  misc_feature (92)..(211): Pfam Name: Protein of unknown function (DUF568) Pfam Description: Protein of unknown function (DUF568)
  misc_feature (12)..(198): Homolog of NCBI NO: 29647484 NR Description: OJ1191_A10.2 [Oryza sativa (japonica
  misc_feature (10)..(198): Homolog of NCBI NO: 13785209 NR Description: putative membrane protein [Solanum tuberosum]
  misc_feature (1)..(203): Homolog of NCBI NO: 11357190 NR Description: auxin-induced protein AIR12
  misc_feature (11)..(195): Homolog of NCBI NO: 13785213 NR Description: putative membrane protein [Solanum tuberosum]
  misc_feature (11)..(195): Homolog of NCBI NO: 13785207 NR Description: putative membrane protein [Solanum tuberosum]
  misc_feature (11)..(195): Homolog of NCBI NO: 13785211 NR Description: putative membrane protein [Solanum tuberosum]
  misc_feature (1)..(203): Homolog of NCBI NO: 30680258 NR Description: auxin-induced protein (AIR12) [Arabidopsis
  misc_feature (8)..(192): Homolog of NCBI NO: 38424013 NR Description: auxin-induced protein-like
  misc_feature (11)..(211): Homolog of NCBI NO: 24414270 NR Description: Putative membrane protein [Oryza sativa (japonica
  misc_feature (16)..(194): Homolog of NCBI NO: 24414271 NR Description: Unknown protein [Oryza sativa (japonica
MARRNDHVLSLLGAMAALVLFAATAAAAQGCAPGNLQPGRSFERCADLPELGASLYWTYHPANGTADLAFRAPQSSSGWVAWGINTERPSSMAGSSVFVASLGGDGGSVSVLATYLESTSPALANGTLKLDVPVAPLAEYAAGAYTVYVTVALPGNSTQQNTVWQAGPLSAGQIAPHPIAGPNVQSTMVLDFLSGGKSTALPNFDVHRRSLRSFRG

SEQ ID NO: 111955 - DNA, 1059 bp, Zea mays subsp. mays
  misc_feature (1)..(1059): Ceres Seq. ID no. 14306190
aaaggcctaaaccgaactcgcagtcgcaacaggtcagccctcaccgcccccccggtcgtcccaggcatggccccagcgagagcgctgcccgcccctctggttgtccatggccgccgccgccagctacgtcgtcggagaaagtactgcaagttgtgctatctgaagggcagttccatggtccccactatccaagcccagggcgacgtcgggctgctggaccgccgctgcctcgccggctacgacttctcccgcggcgacgtcgttgttttcaggttgtcgacggatcatgggatgaagatggtccagaggatgatcgcgctgccaggggattggatccagatcccggagaagcgggacatccggcaggtccccagcggccactgttgggtggaaggggacaatgccggcaacagctgggactcgagacactatggccccgttcctctggacctgatggaagggaagatcacacacataatctggccaccccatagagtgcgtcgggtggacaggatggtgccggaaggcaggattatgcctctgtcagcgactccaaggaggaagcaacaatagtctcaatcgacggcgtcgaaggcgtcaacaattggaagaacttgatgggaagacaactcgagcgcgagaacaacatctaatggcgtgtttagtttgcaggttggactgcttccagagtcatccgaacctacgtccgagcctatattatcatttggtttgaatcgcggaacgatgtcgtccgtcactacgttgttctaataatatactaacacgtgggatcagctcactccgcaagaaagtgcaagaccacttcgtccggagccaggccacgatggatgagccaaaccatcaaaccaaacacgctgtaaatgtcaagtacagcgggccacaatgagctgggtaaccacgagtgggctgtgcgttgagaaagacgtgttgtgcaggcgctgaccggtcgtctatagtacttaagcaacaatcagaactttgtatcggcatcgaagaattaatgaatagaacaaaaacgctagttctcagcctttcttc

SEQ ID NO: 111956 - protein, 190 aa, Zea mays subsp. mays
  misc_feature (1)..(190): Ceres Seq. ID no. 14306191
  misc_feature (51)..(165): Pfam Name: Signal peptidase I Pfam Description: Signal peptidase I
  misc_feature (54)..(177): Homolog of NCBI NO: 31198973 NR Description: ENSANGP00000018428 [Anopheles gambiae]
  misc_feature (54)..(178): Homolog of NCBI NO: 14211845 NR Description: IMP2 inner mitochondrial membrane protease-like
  misc_feature (54)..(181): Homolog of NCBI NO: 38174601 NR Description: Inner mitochondrial membrane peptidase 2-like
  misc_feature (54)..(181): Homolog of NCBI NO: 31981468 NR Description: inner mitochondrial membrane peptidase 2-like
  misc_feature (54)..(181): Homolog of NCBI NO: 14030458 NR Description: inner mitochondrial membrane peptidase 2 [Mus
  misc_feature (49)..(171): Homolog of NCBI NO: 15231994 NR Description: signal peptidase -related [Arabidopsis thaliana]
  misc_feature (145)..(181): Homolog of NCBI NO: 15451599 NR Description: Putative signal peptidase [Oryza sativa]
  misc_feature (67)..(146): Homolog of NCBI NO: 15451599 NR Description: Putative signal peptidase [Oryza sativa]
  misc_feature (67)..(179): Homolog of NCBI NO: 10241631 NR Description: putative singal peptidase [Oryza sativa (indica
  misc_feature (47)..(179): Homolog of NCBI NO: 38346460 NR Description: OSJNBa0019G23.8 [Oryza sativa (japonica
KGLNRTRSRNRSALTAPPVVPGMAPARALPAPLVVHGRRRQLRRRRKYCKLCYLKGSSMVPTIQAQGDVGLLDRRCLAGYDFSRGDVVVFRLSTDHGMKMVQRMIALPGDWIQIPEKRDIRQVPSGHCWVEGDNAGNSWDSRHYGPVPLDLMEGKITHIIWPPHRVRRVDRMVPEGRIMPLSATPRRKQQ

SEQ ID NO: 111957 - protein, 168 aa, Zea mays subsp. mays
  misc_feature (1)..(168): Ceres Seq. ID no. 14306192
  misc_feature (29)..(143): Pfam Name: Signal peptidase I Pfam Description: Signal peptidase I
  misc_feature (32)..(155): Homolog of NCBI NO: 31198973 NR Description: ENSANGP00000018428 [Anopheles gambiae]
  misc_feature (32)..(156): Homolog of NCBI NO: 14211845 NR Description: IMP2 inner mitochondrial membrane protease-like
  misc_feature (32)..(159): Homolog of NCBI NO: 38174601 NR Description: Inner mitochondrial membrane peptidase 2-like
  misc_feature (32)..(159): Homolog of NCBI NO: 31981468 NR Description: inner mitochondrial membrane peptidase 2-like
  misc_feature (32)..(159): Homolog of NCBI NO: 14030458 NR Description: inner mitochondrial membrane peptidase 2 [Mus
  misc_feature (27)..(149): Homolog of NCBI NO: 15231994 NR Description: signal peptidase -related [Arabidopsis thaliana]
  misc_feature (123)..(159): Homolog of NCBI NO: 15451599 NR Description: Putative signal peptidase [Oryza sativa]
  misc_feature (45)..(124): Homolog of NCBI NO: 15451599 NR Description: Putative signal peptidase [Oryza sativa]
  misc_feature (45)..(157): Homolog of NCBI NO: 10241631 NR Description: putative singal peptidase [Oryza sativa (indica
  misc_feature (25)..(157): Homolog of NCBI NO: 38346460 NR Description: OSJNBa0019G23.8 [Oryza sativa (japonica
MAPARALPAPLVVHGRRRQLRRRRKYCKLCYLKGSSMVPTIQAQGDVGLLDRRCLAGYDFSRGDVVVFRLSTDHGMKMVQRMIALPGDWIQIPEKRDIRQVPSGHCWVEGDNAGNSWDSRHYGPVPLDLMEGKITHIIWPPHRVRRVDRMVPEGRIMPLSATPRRKQQ

SEQ ID NO: 111958 - protein, 163 aa, Zea mays subsp. mays
  misc_feature (1)..(163): Ceres Seq. ID no. 14306193
RPKPNSQSQQVSPHRPPGRPRHGPSESAARPSGCPWPPPPATSSEKVLQVVLSEGQFHGPHYPSPGRRRAAGPPLPRRLRLLPRRRRCFQVVDGSWDEDGPEDDRAARGLDPDPGEAGHPAGPQRPLLGGRGQCRQQLGLETLWPRSSGPDGREDHTHNLATP

SEQ ID NO: 111959 - DNA, 1483 bp, Zea mays subsp. mays
  misc_feature (1)..(1483): Ceres Seq. ID no. 13587581
  misc_feature: MA Experiment ID: 108535 Result: Up-regulated in Transcription
  misc_feature: MA Experiment 108535 PARAMETER Experiment Name: Zm_Meristem_P Parameter: Age (day) Value: 8
  misc_feature: MA Experiment 108535 PARAMETER Experiment Name: Zm_Meristem_P Parameter: Organism Value: Zea mays
  misc_feature: MA Experiment 108535 PARAMETER Experiment Name: Zm_Meristem_P Parameter: Plant Line Value: 35A19
  misc_feature: MA Experiment 108535 PARAMETER Experiment Name: Zm_Meristem_P Parameter: Tissue Value: Root Meristem vs. Above Root Meristem
  misc_feature: MA Experiment ID: 108544 Result: Up-regulated in Transcription
acccgattcggatccgattccgcggcaggcggcattcccagcctcccaaacccatttccctctccgatcaaatcaaatcaaactcaaaccgacacgggacccacgccgcatctccgcctccgcagatcgccgccgcctactcgcgcccctccgcgcgccgatggccgccgcggacccgccgccgcgcggggaggccgcgcccgcgctgaagcggagcgccagcatcgaccggataccggcggacgcgcgccgcatcctgcaccgcctcgccggggacctctggggcggcgacgtggaccccggcgcgctggccgtgtcccagctcaggggcgccatgaccaacgaggtcttccggatcacctggcccggcggcgaggccgagggcaacggcccgcgcaaggtgctcgtgcgcatctacggccggggcgtcgaggtcttcttcgaccgcgccgacgaggtccgcaccttcgagtgcatgtcgcgccacggccagaggccccgcctcctgggccgcttcgccaacggccgcgtcgaggagttcatcaacgccaggaccctctccgccgcggatctgcgcgacccggagatgtccgcgctgattgccaggaagctgcgcgagtttcacgatctcgacatgcctggacctagggacgtgtcattgtggcagaggctcaagcggtggcttggggaggctcgtgacaggtgttctgaggaagagtctaaccaatttcagctgaataaactaggtgatgagatttcagtgctggagaagacgctctcggggctccaacagtcagtaggattctgccataacgatctgcagtatggaaatattatgatatatgaagagaccagacaagtcaccttgatagactatgaatatgcgagttttaacccagtcgcattcgacattgctaatcacttctgtgagatggctgctgattaccatacatcaacaccacatgtgttggattttacgaaatatcctgacactggggagcagagaagattcgttgaggcataccttagctctgcaggtaaaaagccaacggatggggaagttgaagaactgctagggttgatagcaaagtacactcttgcgagccatctcttctggggcctgtggggaataatctcggcgcacgtgaacgaaaatatcgacttcgcgtacaaggagtatgcaaggcagcgcttggatcagtactggcaaacaaaacctcgaattcttggacccaagtgatgagtcgttgctttttgtagggggtccttggccagctagtcatgtgaattctgtttgtcagtagcggctagtagctgccagtttttgactgcagattgttcagctcgctgtgacctgtgtcgtgaccatattcttgacttacggggtgtaattattttgcctggtcttaggctaaggtaaccagtctttctatcctaatgtaaatagtacagtctataatgaccttatcctcacatggttctg

SEQ ID NO: 111960 - protein, 412 aa, Zea mays subsp. mays
  misc_feature (1)..(412): Ceres Seq. ID no. 13587582
  misc_feature (132)..(403): Pfam Name: Choline/ethanolamine kinase Pfam Description: Choline/ethanolamine kinase
  misc_feature (77)..(409): Homolog of NCBI NO: 25348157 NR Description: protein choline kinase F1O17.1 [imported] -
  misc_feature (77)..(409): Homolog of NCBI NO: 22330627 NR Description: choline kinase -related [Arabidopsis thaliana]
  misc_feature (85)..(409): Homolog of NCBI NO: 7488652 NR Description: choline kinase (EC 2.7.1.32) CK1 - soybean
  misc_feature (84)..(409): Homolog of NCBI NO: 12311795 NR Description: choline kinase [Pisum sativum]
  misc_feature (85)..(409): Homolog of NCBI NO: 7488653 NR Description: choline kinase (EC 2.7.1.32) CK2 - soybean
  misc_feature (79)..(409): Homolog of NCBI NO: 15217543 NR Description: choline kinase -related [Arabidopsis thaliana]
  misc_feature (54)..(406): Homolog of NCBI NO: 34910612 NR Description: putative choline kinase [Oryza sativa (japonica
  misc_feature (72)..(409): Homolog of NCBI NO: 7488654 NR Description: choline kinase (EC 2.7.1.32) CK3 - soybean
  misc_feature (54)..(409): Homolog of NCBI NO: 33149685 NR Description: choline kinase [Oryza sativa (indica
  misc_feature (54)..(412): Homolog of NCBI NO: 34906246 NR Description: P0489A01.8 [Oryza sativa (japonica
PDSDPIPRQAAFPASQTHFPLRSNQIKLKPTRDPRRISASADRRRLLAPLRAPMAAADPPPRGEAAPALKRSASIDRIPADARRILHRLAGDLWGGDVDPGALAVSQLRGAMTNEVFRITWPGGEAEGNGPRKVLVRIYGRGVEVFFDRADEVRTFECMSRHGQRPRLLGRFANGRVEEFINARTLSAADLRDPEMSALIARKLREFHDLDMPGPRDVSLWQRLKRWLGEARDRCSEEESNQFQLNKLGDEISVLEKTLSGLQQSVGFCHNDLQYGNIMIYEETRQVTLIDYEYASFNPVAFDIANHFCEMAADYHTSTPHVLDFTKYPDTGEQRRFVEAYLSSAGKKPTDGEVEELLGLIAKYTLASHLFWGLWGIISAHVNENIDFAYKEYARQRLDQYWQTKPRILGPK

SEQ ID NO: 111961 - protein, 359 aa, Zea mays subsp. mays
  misc_feature (1)..(359): Ceres Seq. ID no. 13587583
  misc_feature (79)..(350): Pfam Name: Choline/ethanolamine kinase Pfam Description: Choline/ethanolamine kinase
  misc_feature (26)..(356): Homolog of NCBI NO: 15217543 NR Description: choline kinase -related [Arabidopsis thaliana]
  misc_feature (24)..(356): Homolog of NCBI NO: 25348157 NR Description: protein choline kinase F1O17.1 [imported] -
  misc_feature (24)..(356): Homolog of NCBI NO: 22330627 NR Description: choline kinase -related [Arabidopsis thaliana]
  misc_feature (32)..(356): Homolog of NCBI NO: 7488652 NR Description: choline kinase (EC 2.7.1.32) CK1 - soybean
  misc_feature (31)..(356): Homolog of NCBI NO: 12311795 NR Description: choline kinase [Pisum sativum]
  misc_feature (32)..(356): Homolog of NCBI NO: 7488653 NR Description: choline kinase (EC 2.7.1.32) CK2 - soybean
  misc_feature (1)..(353): Homolog of NCBI NO: 34910612 NR Description: putative choline kinase [Oryza sativa (japonica
  misc_feature (19)..(356): Homolog of NCBI NO: 7488654 NR Description: choline kinase (EC 2.7.1.32) CK3 - soybean
  misc_feature (1)..(356): Homolog of NCBI NO: 33149685 NR Description: choline kinase [Oryza sativa (indica
  misc_feature (1)..(359): Homolog of NCBI NO: 34906246 NR Description: P0489A01.8 [Oryza sativa (japonica
MAAADPPPRGEAAPALKRSASIDRIPADARRILHRLAGDLWGGDVDPGALAVSQLRGAMTNEVFRITWPGGEAEGNGPRKVLVRIYGRGVEVFFDRADEVRTFECMSRHGQRPRLLGRFANGRVEEFINARTLSAADLRDPEMSALIARKLREFHDLDMPGPRDVSLWQRLKRWLGEARDRCSEEESNQFQLNKLGDEISVLEKTLSGLQQSVGFCHNDLQYGNIMIYEETRQVTLIDYEYASFNPVAFDIANHFCEMAADYHTSTPHVLDFTKYPDTGEQRRFVEAYLSSAGKKPTDGEVEELLGLIAKYTLASHLFWGLWGIISAHVNENIDFAYKEYARQRLDQYWQTKPRILGPK

SEQ ID NO: 111962 - protein, 301 aa, Zea mays subsp. mays
  misc_feature (1)..(301): Ceres Seq. ID no. 13587584
  misc_feature (21)..(292): Pfam Name: Choline/ethanolamine kinase Pfam Description: Choline/ethanolamine kinase
  misc_feature (1)..(298): Homolog of NCBI NO: 15217543 NR Description: choline kinase -related [Arabidopsis thaliana]
  misc_feature (1)..(298): Homolog of NCBI NO: 25348157 NR Description: protein choline kinase F1O17.1 [imported] -
  misc_feature (1)..(298): Homolog of NCBI NO: 22330627 NR Description: choline kinase -related [Arabidopsis thaliana]
  misc_feature (1)..(298): Homolog of NCBI NO: 7488652 NR Description: choline kinase (EC 2.7.1.32) CK1 - soybean
  misc_feature (1)..(298): Homolog of NCBI NO: 12311795 NR Description: choline kinase [Pisum sativum]
  misc_feature (1)..(298): Homolog of NCBI NO: 7488653 NR Description: choline kinase (EC 2.7.1.32) CK2 - soybean
  misc_feature (1)..(295): Homolog of NCBI NO: 34910612 NR Description: putative choline kinase [Oryza sativa (japonica
  misc_feature (1)..(298): Homolog of NCBI NO: 7488654 NR Description: choline kinase (EC 2.7.1.32) CK3 - soybean
  misc_feature (1)..(298): Homolog of NCBI NO: 33149685 NR Description: choline kinase [Oryza sativa (indica
  misc_feature (1)..(301): Homolog of NCBI NO: 34906246 NR Description: P0489A01.8 [Oryza sativa (japonica
MTNEVFRITWPGGEAEGNGPRKVLVRIYGRGVEVFFDRADEVRTFECMSRHGQRPRLLGRFANGRVEEFINARTLSAADLRDPEMSALIARKLREFHDLDMPGPRDVSLWQRLKRWLGEARDRCSEEESNQFQLNKLGDEISVLEKTLSGLQQSVGFCHNDLQYGNIMIYEETRQVTLIDYEYASFNPVAFDIANHFCEMAADYHTSTPHVLDFTKYPDTGEQRRFVEAYLSSAGKKPTDGEVEELLGLIAKYTLASHLFWGLWGIISAHVNENIDFAYKEYARQRLDQYWQTKPRILGPK

SEQ ID NO: 111963 - DNA, 1177 bp, Zea mays subsp. mays
  misc_feature (1)..(1177): Ceres Seq. ID no. 13586936
ggcagcgaaggcaactacactttgtatatacactggtagtaatgatcgaacgaacgagaaccatgtacagcagcacgccacgcttacagattgcagtattaatagttgcaccaggtttggtttatatccacaagaagaatgatgcaaattcatgaaagaaaatggtacgatcaatattgcttaacgaagctgttccgttgacgacgccggcagcagcgagcgaaggagatcgcagatcggcatccaccacatcttggacgcctacatcaccagctccgacacccatcccaagtccggcccgtcgtcctccgtgaccgcagccgcaggcaggaccggcgccgacgacgacgccttggccttcctgaatccgagctcccgcatcgcgagcaacagctcctccacctcggcgtccgccggctcgtcgacccacctccggccctccaccggcgacaccggcggcgactcccagggcggcgccagcgtcgacttgggcgagagcgacagcgcgagcggcgagcagccgtccttggcggcgccggcgccggcgccggcgccggcgcggagctcggccgcggcgtgcgcgaagaagcagacgcggcggcggcaggcagcgcccgcgcggcaggggcgcgtgcggtagcgggacgggtggagccacagctcgaaggtgccgtgcgcgagcgggcaggcggccccgcgcgggcacgcggcgcccgcgcccgggcggcgccggaagtccgggcacggctcccccgcgtaggccacgcggcgcgggtcccgccgccgcgcggcctcccccgggtgcgcgtaggggcacgccgtccagtcgtggctccgcgcgcgcgcgcaccgccgcaccttgaactcgtgcatcatgaactcgtcgtccgcctccgtcgcgacgtcgccgccctcggcgcgggtggaggagaggtactctcccagcgcggcgaggagctgcggcgggatctctgcggcggacgggtcggcccacggcgcgcccagagacgccgggtccagcaccaggtgcaaattttcacggctcaccatgcctgccgtcgctctatctgcctcgccctcagtgttgttcaacactcggtccagtccggttagcctgggtggtggtggtgccggggaaagagaggactgtggtgaacgtgccttgaggagatataac

SEQ ID NO: 111964 - protein, 101 aa, Zea mays subsp. mays
  misc_feature (1)..(101): Ceres Seq. ID no. 13586937
  misc_feature (1)..(80): Homolog of NCBI NO: 5420387 NR Description: proteophosphoglycan [Leishmania major]
  misc_feature (1)..(69): Homolog of NCBI NO: 13592175 NR Description: ppg3 [Leishmania major]
  misc_feature (1)..(69): Homolog of NCBI NO: 13592175 NR Description: ppg3 [Leishmania major]
  misc_feature (1)..(69): Homolog of NCBI NO: 5420387 NR Description: proteophosphoglycan [Leishmania major]
  misc_feature (1)..(69): Homolog of NCBI NO: 13592175 NR Description: ppg3 [Leishmania major]
  misc_feature (1)..(83): Homolog of NCBI NO: 13592175 NR Description: ppg3 [Leishmania major]
  misc_feature (1)..(80): Homolog of NCBI NO: 13592175 NR Description: ppg3 [Leishmania major]
  misc_feature (1)..(69): Homolog of NCBI NO: 13592175 NR Description: ppg3 [Leishmania major]
  misc_feature (1)..(69): Homolog of NCBI NO: 13592175 NR Description: ppg3 [Leishmania major]
  misc_feature (1)..(69): Homolog of NCBI NO: 13592175 NR Description: ppg3 [Leishmania major]
MNSSSASVATSPPSARVEERYSPSAARSCGGISAADGSAHGAPRDAGSSTRCKFSRLTMPAVALSASPSVLFNTRSSPVSLGGGGAGEREDCGERALRRYN

SEQ ID NO: 111965 - protein, 50 aa, Zea mays subsp. mays
  misc_feature (1)..(50): Ceres Seq. ID no. 13586938
  misc_feature (28)..(50): Homolog of NCBI NO: 15145795 NR Description: basic proline-rich protein [Sus scrofa]
  misc_feature (28)..(50): Homolog of NCBI NO: 15145797 NR Description: basic proline-rich protein [Sus scrofa]
QRRQLHFVYTLVVMIERTRTMYSSTPRLQIAVLIVAPGLVYIHKKNDANS

SEQ ID NO: 111966 - protein, 50 aa, Zea mays subsp. mays
  misc_feature (1)..(50): Ceres Seq. ID no. 13586939
  misc_feature (8)..(50): Homolog of NCBI NO: 6649242 NR Description: splicing coactivator subunit SRm300 [Homo sapiens]
  misc_feature (34)..(50): Homolog of NCBI NO: 9629838 NR Description: very large virion protein (tegument) [Bovine
  misc_feature (8)..(50): Homolog of NCBI NO: 5821143 NR Description: RNA binding protein [Homo sapiens]
  misc_feature (8)..(50): Homolog of NCBI NO: 5821145 NR Description: RNA binding protein [Homo sapiens]
  misc_feature (8)..(50): Homolog of NCBI NO: 29833662 NR Description: putative serine/threonine protein kinase
  misc_feature (10)..(50): Homolog of NCBI NO: 33865132 NR Description: possible N-terminal part of IF-2 [Synechococcus
  misc_feature (18)..(50): Homolog of NCBI NO: 22962211 NR Description: hypothetical protein [Rhodopseudomonas palustris]
  misc_feature (12)..(50): Homolog of NCBI NO: 29829093 NR Description: putative translation initiation factor IF-2
  misc_feature (12)..(50): Homolog of NCBI NO: 23104656 NR Description: hypothetical protein [Azotobacter vinelandii]
  misc_feature (10)..(50): Homolog of NCBI NO: 27375632 NR Description: blr0521 [Bradyrhizobium japonicum]
MVRSILLNEAVPLTTPAAASEGDRRSASTTSWTPTSPAPTPIPSPARRPP

SEQ ID NO: 111967 - DNA, 886 bp, Zea mays subsp. mays
  misc_feature (1)..(886): Ceres Seq. ID no. 14306339
acgtcggcgtcttccatcgaagtggccttttcggcggcgagtgagagggcgaggaataaaactcgcgtcgcgcacgcaccgcaacaataatatccttccacgcgaatattcgccgcttcccacctcccccgccccgcatatccttccgtccgtccgttcgtctcccccctttcccttcccctctatttcaccaccccatcagccgcccgccaccgcgacgatcaccggcgcaatccgttcaccccaccactcatccactccccctccgcgaatctcatttctttactgcggctaggaggaggcggcggcggcgatgaagttcggcaagagcctgagcggacagatcgtggagacgctcccggagtggcgcgacaagttcctgtcctacaaggatctcaagaagcgcctcaagctcatcggcgccgggaacggggctgagcggcagccgaagcgggcccgccgcgacgactccggggaggctgacgcggccgcggccgcggcggcaatgacgccagaggaggcggagttcatgcagctcctggaggctgagctcgacaaattcaactcttttttcgtcgagaaagaggaggagtacatcatccgtcagaaggagctgcaggaccgggtggccagggcggccgggcgggagtccaaggaggagctcatgcgggtgcgcaaggagattgtcgacttccacggcgagatggtgctgctggagaactacagcgccctcaactacacagctagtagcaacttagcctggactgtggctgtgaattagggatgaagcctctagattcctggggctaacaatcagtgtttgccatagctaacatgggtcaaataaagagacgaattgctgtgttgcttgtcagcaagggacaat

SEQ ID NO: 111968 - protein, 155 aa, Zea mays subsp. mays
  misc_feature (1)..(155): Ceres Seq. ID no. 14306340
  misc_feature (1)..(148): Pfam Name: SPX domain Pfam Description: SPX domain
  misc_feature (42)..(148): Homolog of NCBI NO: 37533962 NR Description: hypothetical protein [Oryza sativa (japonica
  misc_feature (1)..(142): Homolog of NCBI NO: 34897330 NR Description: putative signal transduction protein [Oryza
  misc_feature (68)..(143): Homolog of NCBI NO: 16506648 NR Description: IDS-4-like protein [Castanea sativa]
  misc_feature (1)..(29): Homolog of NCBI NO: 15225414 NR Description: hypothetical protein [Arabidopsis thaliana]
  misc_feature (67)..(148): Homolog of NCBI NO: 15225414 NR Description: hypothetical protein [Arabidopsis thaliana]
  misc_feature (1)..(41): Homolog of NCBI NO: 31415907 NR Description: putative SPX domain containing protein
  misc_feature (69)..(148): Homolog of NCBI NO: 31415907 NR Description: putative SPX domain containing protein
  misc_feature (1)..(143): Homolog of NCBI NO: 15241275 NR Description: ids4-related protein [Arabidopsis thaliana]
  misc_feature (1)..(143): Homolog of NCBI NO: 21592813 NR Description: ids4-like protein [Arabidopsis thaliana]
  misc_feature (1)..(148): Homolog of NCBI NO: 15225770 NR Description: expressed protein [Arabidopsis thaliana]
MKFGKSLSGQIVETLPEWRDKFLSYKDLKKRLKLIGAGNGAERQPKRARRDDSGEADAAAAAAAMTPEEAEFMQLLEAELDKFNSFFVEKEEEYIIRQKELQDRVARAAGRESKEELMRVRKEIVDFHGEMVLLENYSALNYTASSNLAWTVAVN

SEQ ID NO: 111969 - protein, 97 aa, Zea mays subsp. mays
  misc_feature (1)..(97): Ceres Seq. ID no. 14306341
RRRLPSKWPFRRRVRGRGIKLASRTHRNNNILPREYSPLPTSPAPHILPSVRSSPPFPFPSISPPHQPPATATITGAIRSPHHSSTPPPRISFLYCG

SEQ ID NO: 111970 - protein, 91 aa, Zea mays subsp. mays
  misc_feature (1)..(91): Ceres Seq. ID no. 14306342
  misc_feature (1)..(84): Pfam Name: SPX domain Pfam Description: SPX domain
  misc_feature (1)..(90): Homolog of NCBI NO: 11358467 NR Description: ids-4 protein-like - Arabidopsis thaliana
  misc_feature (1)..(90): Homolog of NCBI NO: 18417630 NR Description: ids-4 protein - like [Arabidopsis thaliana]
  misc_feature (1)..(84): Homolog of NCBI NO: 37533962 NR Description: hypothetical protein [Oryza sativa (japonica
  misc_feature (1)..(78): Homolog of NCBI NO: 34897330 NR Description: putative signal transduction protein [Oryza
  misc_feature (4)..(79): Homolog of NCBI NO: 16506648 NR Description: IDS-4-like protein [Castanea sativa]
  misc_feature (3)..(84): Homolog of NCBI NO: 15225414 NR Description: hypothetical protein [Arabidopsis thaliana]
  misc_feature (5)..(84): Homolog of NCBI NO: 31415907 NR Description: putative SPX domain containing protein
  misc_feature (1)..(79): Homolog of NCBI NO: 15241275 NR Description: ids4-related protein [Arabidopsis thaliana]
  misc_feature (1)..(79): Homolog of NCBI NO: 21592813 NR Description: ids4-like protein [Arabidopsis thaliana]
  misc_feature (1)..(84): Homolog of NCBI NO: 15225770 NR Description: expressed protein [Arabidopsis thaliana]
MTPEEAEFMQLLEAELDKFNSFFVEKEEEYIIRQKELQDRVARAAGRESKEELMRVRKEIVDFHGEMVLLENYSALNYTASSNLAWTVAVN

SEQ ID NO: 111971 - DNA, 726 bp, Zea mays subsp. mays
  misc_feature (1)..(726): Ceres Seq. ID no. 12634854
atcctatatataggtgcaagcacacacacaagttttcggtcgaagaacatcaaatacatactggctcactcgtgattccttcacccagcagttcgtaaccacctgctaaatcatcaaaaaaatgcccccctgcaaagtagcagcagccttactcctgttgatcatcacaacaatttctgtcaacaccgtaactgggtcgcgatgtaacgctcaggagaagaaccagattgtgagcttgtgccaaatgtacatccagagaggaaccctcgttcagctcccatcccaaactgggccatgctgtgcggcagtgagagagctggagagggtacacaggggtatgcagatgaagtgcatcgccgatctactgaacgctggagatctacagaaatacgatccaactaagatcaagcatcttgacatttcctgctacacttagcatcgttagtttcattcctctcctccccatgcatcgttgtcatgctgtgaagggcgcgatggcgtggaatggatgctggtagcaaagatgctcagaagatgacatttcgttagttatttaattaagtcttccaaggcgtcaatcttcctgacatgtatctttattcgaaaaaaataaactggattatttttggtaaaaaaaaaaaaaaaaaaaaaaaaaaaaaaaaaaaaaaaaccaaaaaaaaaaaaaaaaaagcttatcgataccgtcgacctcaagggggggcccgg

SEQ ID NO: 111972 - protein, 104 aa, Zea mays subsp. mays
  misc_feature (1)..(104): Ceres Seq. ID no. 12634855
  misc_feature (10)..(102): Homolog of NCBI NO: 5042333 NR Description: BETL4 protein [Zea mays]
MPPCKVAAALLLLIITTISVNTVTGSRCNAQEKNQIVSLCQMYIQRGTLVQLPSQTGPCCAAVRELERVHRGMQMKCIADLLNAGDLQKYDPTKIKHLDISCYT

SEQ ID NO: 111973 - protein, 63 aa, Zea mays subsp. mays
  misc_feature (1)..(63): Ceres Seq. ID no. 12634856
  misc_feature (1)..(61): Homolog of NCBI NO: 5042333 NR Description: BETL4 protein [Zea mays]
MYIQRGTLVQLPSQTGPCCAAVRELERVHRGMQMKCIADLLNAGDLQKYDPTKIKHLDISCYT

SEQ ID NO: 111974 - DNA, 835 bp, Zea mays subsp. mays
  misc_feature (1)..(835): Ceres Seq. ID no. 13587576
ggttaactttcacgtccggatgcaaattcgcctcggtcgttcaaccaaacaagctcactcccggccatcaggcgcacaccgctctcccgccgccgtcctgcgtcggagcgatatccctacatccccacctcatttgcacccggattggcttcttcttctactactactggaactctctttgcgatcccaaaatcgcaaaataaaggtaaatcaaaaggaaccgacttaggagctggaatgacatctaggagctttacgaaggaagagatctctaaacataacacaaggaaggactgttggatcgtcatcaaggacaaggtctatgatgtcactccttatgtagaggagcatccaggcggagatgccattctaaataatgctggtggtgattccacagagggcttttttgggccacagcacggcactagggtcttcgatatcatcgaggatttctgcatcggtcagttgaaggcatagggtagcttgtattgaattcgtggaattttccggaaatcaagttttgagaagctacatgttatccaacattttaagcattgcaaccttcaagcatttgagatgccagtataattgttccacaattgtcatcggggctgctaggagctgtgatgtagcacttcgtttttattctgctgttgtgtgactgtgtctttacatttctgttgttggacaagactccaaaacgcttgtaattgttctggctaagggcccgttcggttattcaggaatctactccagaaaggatttcagctggaataattgtataatttgtataacaattagtaacctggaatagttcctagtcttgttccagcct

SEQ ID NO: 111975 - protein, 79 aa, Zea mays subsp. mays
  misc_feature (1)..(79): Ceres Seq. ID no. 13587577
  misc_feature (5)..(77): Pfam Name: Cytochrome b5-like Heme/Steroid binding domain Pfam Description: Cytochrome b5-like Heme/Steroid binding domain
  misc_feature (6)..(77): Homolog of NCBI NO: 7430586 NR Description: cytochrome b5, erythrocyte splice form
  misc_feature (6)..(77): Homolog of NCBI NO: 6166051 NR Description: Cytochrome b5
  misc_feature (6)..(77): Homolog of NCBI NO: 24158926 NR Description: Chain A, Crystal Structure Of F35y Mutant Of
  misc_feature (9)..(77): Homolog of NCBI NO: 19921470 NR Description: CG6870-PA [Drosophila melanogaster]
  misc_feature (9)..(77): Homolog of NCBI NO: 729252 NR Description: Cytochrome B5
  misc_feature (9)..(77): Homolog of NCBI NO: 15238776 NR Description: cytochrome b5 [Arabidopsis thaliana]
  misc_feature (1)..(77): Homolog of NCBI NO: 20137975 NR Description: Cytochrome b5
  misc_feature (9)..(79): Homolog of NCBI NO: 25044825 NR Description: cytochrome b5 [Ananas comosus]
  misc_feature (1)..(77): Homolog of NCBI NO: 15219780 NR Description: cytochrome b5, putative [Arabidopsis thaliana]
  misc_feature (1)..(78): Homolog of NCBI NO: 40253472 NR Description: cytochrome b5-like [Oryza sativa (japonica
MTSRSFTKEEISKHNTRKDCWIVIKDKVYDVTPYVEEHPGGDAILNNAGGDSTEGFFGPQHGTRVFDIIEDFCIGQLKA

SEQ ID NO: 111976 - protein, 75 aa, Zea mays subsp. mays
  misc_feature (1)..(75): Ceres Seq. ID no. 13587578
VNFHVRMQIRLGRSTKQAHSRPSGAHRSPAAVLRRSDIPTSPPHLHPDWLLLLLLLELSLRSQNRKIKVNQKEPT

SEQ ID NO: 111977 - protein, 69 aa, Zea mays subsp. mays
  misc_feature (1)..(69): Ceres Seq. ID no. 13587579
MQIRLGRSTKQAHSRPSGAHRSPAAVLRRSDIPTSPPHLHPDWLLLLLLLELSLRSQNRKIKVNQKEPT

SEQ ID NO: 111978 - DNA, 1068 bp, Zea mays subsp. mays
  misc_feature (1)..(1068): Ceres Seq. ID no. 13600568
cctaatccaaaaaccgcagctctcaagcgagatcgaggcagtgcgcacgccgtgcaggcctctcctccactcaaccgcgcgtcatggccatgttgcgcgagcatctcgacctcatccgcgctcacctcctcgacgacaaccacgacgccgtcagctccgatgactcggcgccgtcccactcgccatcgccatccccatcgccgccggggcgtaggccgctgccagcgctttccgtctcgctgcccccgaggccggcagtcgtcctgcagcagcagcacatgagggcggcggcgccgccgttgcagattcctcagcaggagcagcactgctgcccggaacccgaggaggacgatttccggcggtaccgcggcgtgcggcagcggccgtggggcaagtacgcggccgagattcgggacccgtcgcggaagggcgcgcgcgtgtggctgggcacctatgacaccgccgtggaggccgctcgtgcctacgaccgcgccgcgttccgcctgcgcgggtccaaggccatcctcaacttccccaacgaggtcgcgttaagcaccgctgcatggtgggcgacgcctgctcctcctcctcagcccagcgcgaccgtggccggtaacaagagggcgaggtcgccgcaggagcaggacgctaggtgcatggttagggaggtgaagaaggagcggattcaggagcccgcaagcggaggggcggactacttctgggaggatgagtcgctgaagggggcgatctgcagcctgccgccgctctcaccgttgtcgccgcacccgcacctggccgtgccgcagctctacgtcagctgactgcctgacttgatgtcgtagcaagacagggacggtggtcttactcttacctgatgatagtcttctgagttctttgatatgctagaggagtatagctccaaatattctttcgttctttatttattcgttcagtcgcaagcaagcaaacgtgtcctggcgtagcatgactgcatgagaatactataatggacaatttttaaatataatatataataaataaaagataatttatatagtaacatgattg

SEQ ID NO: 111979 - protein, 245 aa, Zea mays subsp. mays
  misc_feature (1)..(245): Ceres Seq. ID no. 15218967
  misc_feature (91)..(155): Pfam Name: AP2 domain Pfam Description: AP2 domain
  misc_feature (52)..(244): Homolog of NCBI NO: 17473792 NR Description: unknown protein [Arabidopsis thaliana]
  misc_feature (62)..(242): Homolog of NCBI NO: 7489115 NR Description: DNA binding protein EREBP-4 - common tobacco
  misc_feature (42)..(245): Homolog of NCBI NO: 12231294 NR Description: ripening regulated protein DDTFR10/A
  misc_feature (27)..(244): Homolog of NCBI NO: 40060533 NR Description: putative ethylene response factor 5 [Vitis
  misc_feature (37)..(206): Homolog of NCBI NO: 14140143 NR Description: putative ethylene responsive element binding
  misc_feature (204)..(245): Homolog of NCBI NO: 38346168 NR Description: OSJNBa0079A21.15 [Oryza sativa (japonica
  misc_feature (21)..(189): Homolog of NCBI NO: 38346168 NR Description: OSJNBa0079A21.15 [Oryza sativa (japonica
  misc_feature (204)..(245): Homolog of NCBI NO: 33440026 NR Description: Ap26 [Oryza sativa (japonica cultivar-group)]
  misc_feature (27)..(209): Homolog of NCBI NO: 33440026 NR Description: Ap26 [Oryza sativa (japonica cultivar-group)]
  misc_feature (4)..(244): Homolog of NCBI NO: 37536882 NR Description: putative ethylene-responsive element binding
MAMLREHLDLIRAHLLDDNHDAVSSDDSAPSHSPSPSPSPPGRRPLPALSVSLPPRPAVVLQQQHMRAAAPPLQIPQQEQHCCPEPEEDDFRRYRGVRQRPWGKYAAEIRDPSRKGARVWLGTYDTAVEAARAYDRAAFRLRGSKAILNFPNEVALSTAAWWATPAPPPQPSATVAGNKRARSPQEQDARCMVREVKKERIQEPASGGADYFWEDESLKGAICSLPPLSPLSPHPHLAVPQLYVS

SEQ ID NO: 111980 - protein, 243 aa, Zea mays subsp. mays
  misc_feature (1)..(243): Ceres Seq. ID no. 15218968
  misc_feature (89)..(153): Pfam Name: AP2 domain Pfam Description: AP2 domain
  misc_feature (50)..(242): Homolog of NCBI NO: 17473792 NR Description: unknown protein [Arabidopsis thaliana]
  misc_feature (60)..(240): Homolog of NCBI NO: 7489115 NR Description: DNA binding protein EREBP-4 - common tobacco
  misc_feature (40)..(243): Homolog of NCBI NO: 12231294 NR Description: ripening regulated protein DDTFR10/A
  misc_feature (25)..(242): Homolog of NCBI NO: 40060533 NR Description: putative ethylene response factor 5 [Vitis
  misc_feature (35)..(204): Homolog of NCBI NO: 14140143 NR Description: putative ethylene responsive element binding
  misc_feature (202)..(243): Homolog of NCBI NO: 38346168 NR Description: OSJNBa0079A21.15 [Oryza sativa (japonica
  misc_feature (19)..(187): Homolog of NCBI NO: 38346168 NR Description: OSJNBa0079A21.15 [Oryza sativa (japonica
  misc_feature (202)..(243): Homolog of NCBI NO: 33440026 NR Description: Ap26 [Oryza sativa (japonica cultivar-group)]
  misc_feature (25)..(207): Homolog of NCBI NO: 33440026 NR Description: Ap26 [Oryza sativa (japonica cultivar-group)]
  misc_feature (2)..(242): Homolog of NCBI NO: 37536882 NR Description: putative ethylene-responsive element binding
MLREHLDLIRAHLLDDNHDAVSSDDSAPSHSPSPSPSPPGRRPLPALSVSLPPRPAVVLQQQHMRAAAPPLQIPQQEQHCCPEPEEDDFRRYRGVRQRPWGKYAAEIRDPSRKGARVWLGTYDTAVEAARAYDRAAFRLRGSKAILNFPNEVALSTAAWWATPAPPPQPSATVAGNKRARSPQEQDARCMVREVKKERIQEPASGGADYFWEDESLKGAICSLPPLSPLSPHPHLAVPQLYVS

SEQ ID NO: 111981 - protein, 180 aa, Zea mays subsp. mays
  misc_feature (1)..(180): Ceres Seq. ID no. 15218969
  misc_feature (26)..(90): Pfam Name: AP2 domain Pfam Description: AP2 domain
  misc_feature (1)..(179): Homolog of NCBI NO: 37536882 NR Description: putative ethylene-responsive element binding
  misc_feature (1)..(179): Homolog of NCBI NO: 17473792 NR Description: unknown protein [Arabidopsis thaliana]
  misc_feature (1)..(177): Homolog of NCBI NO: 7489115 NR Description: DNA binding protein EREBP-4 - common tobacco
  misc_feature (1)..(180): Homolog of NCBI NO: 12231294 NR Description: ripening regulated protein DDTFR10/A
  misc_feature (1)..(179): Homolog of NCBI NO: 40060533 NR Description: putative ethylene response factor 5 [Vitis
  misc_feature (1)..(141): Homolog of NCBI NO: 14140143 NR Description: putative ethylene responsive element binding
  misc_feature (139)..(180): Homolog of NCBI NO: 38346168 NR Description: OSJNBa0079A21.15 [Oryza sativa (japonica
  misc_feature (1)..(124): Homolog of NCBI NO: 38346168 NR Description: OSJNBa0079A21.15 [Oryza sativa (japonica
  misc_feature (139)..(180): Homolog of NCBI NO: 33440026 NR Description: Ap26 [Oryza sativa (japonica cultivar-group)]
  misc_feature (1)..(144): Homolog of NCBI NO: 33440026 NR Description: Ap26 [Oryza sativa (japonica cultivar-group)]
MRAAAPPLQIPQQEQHCCPEPEEDDFRRYRGVRQRPWGKYAAEIRDPSRKGARVWLGTYDTAVEAARAYDRAAFRLRGSKAILNFPNEVALSTAAWWATPAPPPQPSATVAGNKRARSPQEQDARCMVREVKKERIQEPASGGADYFWEDESLKGAICSLPPLSPLSPHPHLAVPQLYVS

SEQ ID NO: 111982 - DNA, 685 bp, Zea mays subsp. mays
  misc_feature (1)..(685): Ceres Seq. ID no. 13599166
tattacttatccgtctcaaagcagcctagtgccgcaaagtcagtccagtccacaggccttcttcaagcagatatatagcagtaccgtccatgggcaactgcacggcgtcgcagcgcgcagcggagtcgtgggccgacgacggcgagtgggaggaggcggcgtcatcgtcgccgttgtcgtcggagggcgaccaccaccaccatcatcatcaccgcgacgagaggagagaggatcaccacgactccgaggtgaccatcaggatcaccaagaggcagctgcacgagctgattgagaagaacggcggcggccacgggttaccgctaccggggtccgggaggcgccggcggtcgtccgcggagcagctgctggccgacatcatggactccggcgaggtgcaccaccgcgaccaccacagggaggaccactggcactggaagcccgcgctgcagagcatccccgagaccgtcgagtcatcatgactgtcatgcatgatctttcttggtgtttggtggttcagtagctcgatcaggggtcgttattttcgcctcttgttcggtgtgcaagtgtagtcgctagctaatcggtgacacggtgtacatatcaaagttttcagacatgtacatataggtctagggaggtgggagttcattgttaggttaggtccattatatttcagatgtgtggg

SEQ ID NO: 111983 - protein, 129 aa, Zea mays subsp. mays
  misc_feature (1)..(129): Ceres Seq. ID no. 13599167
  misc_feature (1)..(78): Homolog of NCBI NO: 34908836 NR Description: P0684C02.9 [Oryza sativa (japonica
  misc_feature (1)..(129): Homolog of NCBI NO: 34908840 NR Description: P0684C02.11 [Oryza sativa (japonica
  misc_feature (1)..(128): Homolog of NCBI NO: 34908832 NR Description: P0684C02.7 [Oryza sativa (japonica
MGNCTASQRAAESWADDGEWEEAASSSPLSSEGDHHHHHHHRDERREDHHDSEVTIRITKRQLHELIEKNGGGHGLPLPGSGRRRRSSAEQLLADIMDSGEVHHRDHHREDHWHWKPALQSIPETVESS

SEQ ID NO: 111984 - protein, 96 aa, Zea mays subsp. mays
  misc_feature (1)..(96): Ceres Seq. ID no. 13599168
ITYPSQSSLVPQSQSSPQAFFKQIYSSTVHGQLHGVAARSGVVGRRRRVGGGGVIVAVVVGGRPPPPSSSPRREERGSPRLRGDHQDHQEAAARAD

SEQ ID NO: 111985 - DNA, 1786 bp, Zea mays subsp. mays
  misc_feature (1)..(1786): Ceres Seq. ID no. 13574418
  misc_feature: MA Experiment ID: 20000487 Result: Up-regulated in Transcription
  misc_feature: MA Experiment 20000487 PARAMETER Experiment Name: Zm_50mM_NH4NO3_L_to_H_P Parameter: Organism Value: Zea mays
  misc_feature: MA Experiment 20000487 PARAMETER Experiment Name: Zm_50mM_NH4NO3_L_to_H_P Parameter: Timepoint (hr) Value: 4
  misc_feature: MA Experiment 20000487 PARAMETER Experiment Name: Zm_50mM_NH4NO3_L_to_H_P Parameter: Tissue Value: Leaves
  misc_feature: MA Experiment 20000487 PARAMETER Experiment Name: Zm_50mM_NH4NO3_L_to_H_P Parameter: Treatment Value: 50mM NH4NO3 vs. 100mM Mannitol
gcgttcggtggtgactccgggctccgggcgccctgcgcccctggatttcgaaccgagaaagaaagctgctgcccaccgtttcccaagtcccatcgccgcccaagaaccggagccacgccgcagatccgccaaaatcacacctcctagcccgtcctccgtcccaatctcttctcgggccagggaggcggcgggacttggtgcctgcatccgagccctagacatggatcaacctgaggaaaaccctgaattcccaagctgtgatgcctactttgaagctatccagtccaagaagaagttgccactgactttgcaagaatcactaactgctgcctttgctcagattccagtctcatccttccctgaggttccagctggtcgagtaattgaaattcctggtgatacttctgttattgatgctgtaaggactctctctgaacagaacataagggcagcaccagtactgaatccagaacctggggctcctactgattggcaggggaggtaccttggtgtcatcgattactcggcaatcatcctttgggtactagaaaatgctgagcttgctgctgttgcactctcggctgcatcggcaactgctgctggagttggcatgggtgctgttggtgctgttggggtggcagctttgggaacaactggcccagctgctgtagctggcttaactgcagctgcaattggggcttctgttgctggtggattaactgctgaaaagggtgtggcgaaggatgggctaactgctgcagatcatttaggggaggatttctacaaagttttacttcagcaggaacctttcagatcaacaacagttcgatcgattgttgagtcgtaccgctggtctccttttgtccccattacactggacacttccatgctgactgtacttctgttgctctctaagtacagattgcgaaatgtccctgtgattgagcctgaaaagcctatcatcaggaatttcattactcagactggtgttgtcaaagggctgcagcaatgtaaaggaagggactggtttgactacatttctgcacttcctctttcagacttaggacttccatttatgtccattgatgaggttatcaccgtcaacagtgatgatcttatcttagaagctttcaagtgcatgaaggataacaagattggtggtgtcccagtagtagaaggccccaaaagaaaacttgttggcagtgttagcataagggacatccgctttctgttgcttagacccaacttattttcaaatttcaggcagttgacagtcattgaattcatgaagactctaggctccactcttcctgattcagagagcaattgcctggtgaagccaccacccacttgcactcctgacgcttcccttggtagtgttattgacagcattgcatcaagaataacacacaggatatatgtagtggatgatgaccttgaggttgttggtgttgtgactctgcgtgatgtgatctcatgctttattcatgagccacccggttattgcgacaactatttggcttcagcgatggagaagcttgaggggaaaggagtcagatcagtggagaaaatttgagcttttctgtagcgtgaatgttgataataacaggtcagtatgtgaggaaggtttatttggttggaacggtgcattcgtgtcgtgttaatccagcaaatcctgtgtaggttaagtaacaaggcttctgtgctgttaaaaatattttactatgtcatttctttggacggttttctgaacaaatgtgtggtaaccattaggccttgttcggtt

SEQ ID NO: 111986 - protein, 524 aa, Zea mays subsp. mays
  misc_feature (1)..(524): Ceres Seq. ID no. 15222589
  misc_feature (121)..(182): Pfam Name: CBS domain Pfam Description: CBS domain
  misc_feature (278)..(499): Homolog of NCBI NO: 7489654 NR Description: probable transcription regulator protein -
  misc_feature (228)..(505): Homolog of NCBI NO: 19386799 NR Description: OJ1485_B09.7 [Oryza sativa (japonica
  misc_feature (200)..(505): Homolog of NCBI NO: 38346640 NR Description: OSJNBa0072D21.10 [Oryza sativa (japonica
  misc_feature (91)..(198): Homolog of NCBI NO: 21592917 NR Description: unknown [Arabidopsis thaliana]
  misc_feature (259)..(510): Homolog of NCBI NO: 21592917 NR Description: unknown [Arabidopsis thaliana]
  misc_feature (91)..(198): Homolog of NCBI NO: 15228397 NR Description: CBS domain containing protein [Arabidopsis
  misc_feature (259)..(510): Homolog of NCBI NO: 15228397 NR Description: CBS domain containing protein [Arabidopsis
  misc_feature (275)..(513): Homolog of NCBI NO: 18409372 NR Description: CBS domain containing protein [Arabidopsis
  misc_feature (85)..(513): Homolog of NCBI NO: 25404839 NR Description: hypothetical protein T17F3.17 [imported] -
  misc_feature (74)..(522): Homolog of NCBI NO: 34912162 NR Description: P0712E02.24 [Oryza sativa (japonica
RSVVTPGSGRPAPLDFEPRKKAAAHRFPSPIAAQEPEPRRRSAKITPPSPSSVPISSRAREAAGLGACIRALDMDQPEENPEFPSCDAYFEAIQSKKKLPLTLQESLTAAFAQIPVSSFPEVPAGRVIEIPGDTSVIDAVRTLSEQNIRAAPVLNPEPGAPTDWQGRYLGVIDYSAIILWVLENAELAAVALSAASATAAGVGMGAVGAVGVAALGTTGPAAVAGLTAAAIGASVAGGLTAEKGVAKDGLTAADHLGEDFYKVLLQQEPFRSTTVRSIVESYRWSPFVPITLDTSMLTVLLLLSKYRLRNVPVIEPEKPIIRNFITQTGVVKGLQQCKGRDWFDYISALPLSDLGLPFMSIDEVITVNSDDLILEAFKCMKDNKIGGVPVVEGPKRKLVGSVSIRDIRFLLLRPNLFSNFRQLTVIEFMKTLGSTLPDSESNCLVKPPPTCTPDASLGSVIDSIASRITHRIYVVDDDLEVVGVVTLRDVISCFIHEPPGYCDNYLASAMEKLEGKGVRSVEKI

SEQ ID NO: 111987 - protein, 451 aa, Zea mays subsp. mays
  misc_feature (1)..(451): Ceres Seq. ID no. 15222590
  misc_feature (48)..(109): Pfam Name: CBS domain Pfam Description: CBS domain
  misc_feature (205)..(426): Homolog of NCBI NO: 7489654 NR Description: probable transcription regulator protein -
  misc_feature (155)..(432): Homolog of NCBI NO: 19386799 NR Description: OJ1485_B09.7 [Oryza sativa (japonica
  misc_feature (127)..(432): Homolog of NCBI NO: 38346640 NR Description: OSJNBa0072D21.10 [Oryza sativa (japonica
  misc_feature (18)..(125): Homolog of NCBI NO: 21592917 NR Description: unknown [Arabidopsis thaliana]
  misc_feature (186)..(437): Homolog of NCBI NO: 21592917 NR Description: unknown [Arabidopsis thaliana]
  misc_feature (18)..(125): Homolog of NCBI NO: 15228397 NR Description: CBS domain containing protein [Arabidopsis
  misc_feature (186)..(437): Homolog of NCBI NO: 15228397 NR Description: CBS domain containing protein [Arabidopsis
  misc_feature (202)..(440): Homolog of NCBI NO: 18409372 NR Description: CBS domain containing protein [Arabidopsis
  misc_feature (12)..(440): Homolog of NCBI NO: 25404839 NR Description: hypothetical protein T17F3.17 [imported] -
  misc_feature (1)..(449): Homolog of NCBI NO: 34912162 NR Description: P0712E02.24 [Oryza sativa (japonica
MDQPEENPEFPSCDAYFEAIQSKKKLPLTLQESLTAAFAQIPVSSFPEVPAGRVIEIPGDTSVIDAVRTLSEQNIRAAPVLNPEPGAPTDWQGRYLGVIDYSAIILWVLENAELAAVALSAASATAAGVGMGAVGAVGVAALGTTGPAAVAGLTAAAIGASVAGGLTAEKGVAKDGLTAADHLGEDFYKVLLQQEPFRSTTVRSIVESYRWSPFVPITLDTSMLTVLLLLSKYRLRNVPVIEPEKPIIRNFITQTGVVKGLQQCKGRDWFDYISALPLSDLGLPFMSIDEVITVNSDDLILEAFKCMKDNKIGGVPVVEGPKRKLVGSVSIRDIRFLLLRPNLFSNFRQLTVIEFMKTLGSTLPDSESNCLVKPPPTCTPDASLGSVIDSIASRITHRIYVVDDDLEVVGVVTLRDVISCFIHEPPGYCDNYLASAMEKLEGKGVRSVEKI

SEQ ID NO: 111988 - protein, 321 aa, Zea mays subsp. mays
  misc_feature (1)..(321): Ceres Seq. ID no. 15222591
  misc_feature (44)..(296): Homolog of NCBI NO: 34912990 NR Description: P0663E10.8 [Oryza sativa (japonica
  misc_feature (44)..(296): Homolog of NCBI NO: 6650528 NR Description: putative transcription factor X2 [Oryza sativa
  misc_feature (75)..(296): Homolog of NCBI NO: 7489654 NR Description: probable transcription regulator protein -
  misc_feature (25)..(302): Homolog of NCBI NO: 19386799 NR Description: OJ1485_B09.7 [Oryza sativa (japonica
  misc_feature (1)..(302): Homolog of NCBI NO: 38346640 NR Description: OSJNBa0072D21.10 [Oryza sativa (japonica
  misc_feature (56)..(307): Homolog of NCBI NO: 21592917 NR Description: unknown [Arabidopsis thaliana]
  misc_feature (56)..(307): Homolog of NCBI NO: 15228397 NR Description: CBS domain containing protein [Arabidopsis
  misc_feature (72)..(310): Homolog of NCBI NO: 18409372 NR Description: CBS domain containing protein [Arabidopsis
  misc_feature (1)..(310): Homolog of NCBI NO: 25404839 NR Description: hypothetical protein T17F3.17 [imported] -
  misc_feature (1)..(319): Homolog of NCBI NO: 34912162 NR Description: P0712E02.24 [Oryza sativa (japonica
MGAVGAVGVAALGTTGPAAVAGLTAAAIGASVAGGLTAEKGVAKDGLTAADHLGEDFYKVLLQQEPFRSTTVRSIVESYRWSPFVPITLDTSMLTVLLLLSKYRLRNVPVIEPEKPIIRNFITQTGVVKGLQQCKGRDWFDYISALPLSDLGLPFMSIDEVITVNSDDLILEAFKCMKDNKIGGVPVVEGPKRKLVGSVSIRDIRFLLLRPNLFSNFRQLTVIEFMKTLGSTLPDSESNCLVKPPPTCTPDASLGSVIDSIASRITHRIYVVDDDLEVVGVVTLRDVISCFIHEPPGYCDNYLASAMEKLEGKGVRSVEKI

SEQ ID NO: 111989 - DNA, 1361 bp, Zea mays subsp. mays
  misc_feature (1)..(1361): Ceres Seq. ID no. 13599169
  misc_feature: MA Experiment ID: 108523 Result: Down-regulated in Transcription
  misc_feature: MA Experiment 108523 PARAMETER Experiment Name: Zm_42deg_Heat_P Parameter: Age (day) Value: 8
  misc_feature: MA Experiment 108523 PARAMETER Experiment Name: Zm_42deg_Heat_P Parameter: Organism Value: Zea mays
  misc_feature: MA Experiment 108523 PARAMETER Experiment Name: Zm_42deg_Heat_P Parameter: Plant Line Value: 35A19
  misc_feature: MA Experiment 108523 PARAMETER Experiment Name: Zm_42deg_Heat_P Parameter: Temperature (deg C) Value: 42 vs. 22
  misc_feature: MA Experiment 108523 PARAMETER Experiment Name: Zm_42deg_Heat_P Parameter: Timepoint (hr) Value: 6
  misc_feature: MA Experiment 108523 PARAMETER Experiment Name: Zm_42deg_Heat_P Parameter: Tissue Value: Aerial
  misc_feature: MA Experiment ID: 108527 Result: Down-regulated in Transcription
  misc_feature: MA Experiment 108527 PARAMETER Experiment Name: Zm_5mM_NO_P Parameter: Age (day) Value: 8
  misc_feature: MA Experiment 108527 PARAMETER Experiment Name: Zm_5mM_NO_P Parameter: Organism Value: Zea mays
  misc_feature: MA Experiment 108527 PARAMETER Experiment Name: Zm_5mM_NO_P Parameter: Plant Line Value: 35A19
  misc_feature: MA Experiment 108527 PARAMETER Experiment Name: Zm_5mM_NO_P Parameter: Timepoint (hr) Value: 6
  misc_feature: MA Experiment 108527 PARAMETER Experiment Name: Zm_5mM_NO_P Parameter: Tissue Value: Aerial
  misc_feature: MA Experiment 108527 PARAMETER Experiment Name: Zm_5mM_NO_P Parameter: Treatment Value: 5mM NO vs. No Treatment
  misc_feature: MA Experiment ID: 108528 Result: Down-regulated in Transcription
  misc_feature: MA Experiment 108528 PARAMETER Experiment Name: Zm_Imbibed_Seeds_P Parameter: Age (day) Value: 5 vs. 2
  misc_feature: MA Experiment 108528 PARAMETER Experiment Name: Zm_Imbibed_Seeds_P Parameter: Organism Value: Zea mays
  misc_feature: MA Experiment 108528 PARAMETER Experiment Name: Zm_Imbibed_Seeds_P Parameter: Plant Line Value: 35A19
  misc_feature: MA Experiment 108528 PARAMETER Experiment Name: Zm_Imbibed_Seeds_P Parameter: Tissue Value: Aerial vs. Embryo
  misc_feature: MA Experiment ID: 108530 Result: Down-regulated in Transcription
  misc_feature: MA Experiment 108530 PARAMETER Experiment Name: Zm_Imbibed_Seeds_P Parameter: Age (day) Value: 6 vs. 2
  misc_feature: MA Experiment 108530 PARAMETER Experiment Name: Zm_Imbibed_Seeds_P Parameter: Organism Value: Zea mays
  misc_feature: MA Experiment 108530 PARAMETER Experiment Name: Zm_Imbibed_Seeds_P Parameter: Plant Line Value: 35A19
  misc_feature: MA Experiment 108530 PARAMETER Experiment Name: Zm_Imbibed_Seeds_P Parameter: Tissue Value: Aerial vs. Embryo
  misc_feature: MA Experiment ID: 108536 Result: Down-regulated in Transcription
  misc_feature: MA Experiment 108536 PARAMETER Experiment Name: Zm_Meristem_P Parameter: Age (day) Value: 8
  misc_feature: MA Experiment 108536 PARAMETER Experiment Name: Zm_Meristem_P Parameter: Organism Value: Zea mays
  misc_feature: MA Experiment 108536 PARAMETER Experiment Name: Zm_Meristem_P Parameter: Plant Line Value: 35A19
  misc_feature: MA Experiment 108536 PARAMETER Experiment Name: Zm_Meristem_P Parameter: Tissue Value: Shoot Meristem vs. Above Shoot Meristem
  misc_feature: MA Experiment ID: 108543 Result: Up-regulated in Transcription
  misc_feature: MA Experiment ID: 108556 Result: Down-regulated in Transcription
  misc_feature: MA Experiment 108556 PARAMETER Experiment Name: Zm_Drought_P Parameter: Age (day) Value: 9
  misc_feature: MA Experiment 108556 PARAMETER Experiment Name: Zm_Drought_P Parameter: Organism Value: Zea mays
  misc_feature: MA Experiment 108556 PARAMETER Experiment Name: Zm_Drought_P Parameter: Plant Line Value: 35A19
  misc_feature: MA Experiment 108556 PARAMETER Experiment Name: Zm_Drought_P Parameter: Timepoint (hr) Value: 24
  misc_feature: MA Experiment 108556 PARAMETER Experiment Name: Zm_Drought_P Parameter: Tissue Value: Aerial
  misc_feature: MA Experiment 108556 PARAMETER Experiment Name: Zm_Drought_P Parameter: Treatment Value: Drought vs. No Drought
  misc_feature: MA Experiment ID: 20000108 Result: Up-regulated in Transcription
  misc_feature: MA Experiment 20000108 PARAMETER Experiment Name: Zm_Root-Tips_P Parameter: Age (day) Value: 12
  misc_feature: MA Experiment 20000108 PARAMETER Experiment Name: Zm_Root-Tips_P Parameter: Organism Value: Zea mays
  misc_feature: MA Experiment 20000108 PARAMETER Experiment Name: Zm_Root-Tips_P Parameter: Tissue Value: Root tips vs. Root mid region    35
  misc_feature: MA Experiment 20000108 PARAMETER Experiment Name: Zm_Root-Tips_P Parameter: Tissue Value: Root tips vs. Root mid region   Sequence Listing-Misc Features (4)
  misc_feature: MA Experiment ID: 20000478 Result: Down-regulated in Transcription
  misc_feature: MA Experiment 20000478 PARAMETER Experiment Name: Zm_5mM_SA_P Parameter: Age (day) Value: 11
  misc_feature: MA Experiment 20000478 PARAMETER Experiment Name: Zm_5mM_SA_P Parameter: Organism Value: Zea mays
  misc_feature: MA Experiment 20000478 PARAMETER Experiment Name: Zm_5mM_SA_P Parameter: Plant Line Value: 35A19
  misc_feature: MA Experiment 20000478 PARAMETER Experiment Name: Zm_5mM_SA_P Parameter: Timepoint (hr) Value: 72
  misc_feature: MA Experiment 20000478 PARAMETER Experiment Name: Zm_5mM_SA_P Parameter: Tissue Value: Aerial
  misc_feature: MA Experiment 20000478 PARAMETER Experiment Name: Zm_5mM_SA_P Parameter: Treatment Value: 5mM SA vs. No Treatment
  misc_feature: MA Experiment ID: 20000479 Result: Down-regulated in Transcription
  misc_feature: MA Experiment 20000479 PARAMETER Experiment Name: Zm_Drought_P Parameter: Age (day) Value: 10
  misc_feature: MA Experiment 20000479 PARAMETER Experiment Name: Zm_Drought_P Parameter: Organism Value: Zea mays
  misc_feature: MA Experiment 20000479 PARAMETER Experiment Name: Zm_Drought_P Parameter: Plant Line Value: 35A19
  misc_feature: MA Experiment 20000479 PARAMETER Experiment Name: Zm_Drought_P Parameter: Timepoint (hr) Value: 48
  misc_feature: MA Experiment 20000479 PARAMETER Experiment Name: Zm_Drought_P Parameter: Tissue Value: Aerial
  misc_feature: MA Experiment 20000479 PARAMETER Experiment Name: Zm_Drought_P Parameter: Treatment Value: Drought vs. No Drought
  misc_feature: MA Experiment ID: 20000480 Result: Down-regulated in Transcription
  misc_feature: MA Experiment 20000480 PARAMETER Experiment Name: Zm_Drought_P Parameter: Age (day) Value: 11
  misc_feature: MA Experiment 20000480 PARAMETER Experiment Name: Zm_Drought_P Parameter: Organism Value: Zea mays
  misc_feature: MA Experiment 20000480 PARAMETER Experiment Name: Zm_Drought_P Parameter: Plant Line Value: 35A19
  misc_feature: MA Experiment 20000480 PARAMETER Experiment Name: Zm_Drought_P Parameter: Timepoint (hr) Value: 72
  misc_feature: MA Experiment 20000480 PARAMETER Experiment Name: Zm_Drought_P Parameter: Tissue Value: Aerial
  misc_feature: MA Experiment 20000480 PARAMETER Experiment Name: Zm_Drought_P Parameter: Treatment Value: Drought vs. No Drought
  misc_feature: MA Experiment ID: 20000488 Result: Down-regulated in Transcription
  misc_feature: MA Experiment 20000488 PARAMETER Experiment Name: Zm_50mM_NH4NO3_L_to_H_P Parameter: Organism Value: Zea mays
  misc_feature: MA Experiment 20000488 PARAMETER Experiment Name: Zm_50mM_NH4NO3_L_to_H_P Parameter: Timepoint (hr) Value: 8
  misc_feature: MA Experiment 20000488 PARAMETER Experiment Name: Zm_50mM_NH4NO3_L_to_H_P Parameter: Tissue Value: Leaves
  misc_feature: MA Experiment 20000488 PARAMETER Experiment Name: Zm_50mM_NH4NO3_L_to_H_P Parameter: Treatment Value: 50mM NH4NO3 vs. 100mM Mannitol
  misc_feature: MA Experiment ID: 20000492 Result: Down-regulated in Transcription
  misc_feature: MA Experiment 20000492 PARAMETER Experiment Name: Zm_Hybrid_Seed_Dev_P Parameter: DAP Value: 12
  misc_feature: MA Experiment 20000492 PARAMETER Experiment Name: Zm_Hybrid_Seed_Dev_P Parameter: Organism Value: Zea mays
  misc_feature: MA Experiment 20000492 PARAMETER Experiment Name: Zm_Hybrid_Seed_Dev_P Parameter: Plant Line Value: 35A19
  misc_feature: MA Experiment 20000492 PARAMETER Experiment Name: Zm_Hybrid_Seed_Dev_P Parameter: Tissue Value: Fert Kernel vs. Unfert Floret
  misc_feature: MA Experiment ID: 20000535 Result: Down-regulated in Transcription
  misc_feature: MA Experiment 20000535 PARAMETER Experiment Name: Zm_Hybrid_Seed_Dev_P Parameter: DAP Value: 30 vs. 12
  misc_feature: MA Experiment 20000535 PARAMETER Experiment Name: Zm_Hybrid_Seed_Dev_P Parameter: Organism Value: Zea mays
  misc_feature: MA Experiment 20000535 PARAMETER Experiment Name: Zm_Hybrid_Seed_Dev_P Parameter: Plant Line Value: 35A19
  misc_feature: MA Experiment 20000535 PARAMETER Experiment Name: Zm_Hybrid_Seed_Dev_P Parameter: Tissue Value: Embryo vs. Unfert Floret
gtgtgtcatttctctctgacgggtgagatttggtttggatctggtcggaccaggtgctccacgcgatggcgcagaaggagactaatggcagcaacggcgatcacatctccacccgcccgccgccgaccccctcgcccctccgcttctccaagttctttcaggctaacctgcggatcctggtcactggtggggcgggcttcatcggctcgcacctcgtagacaagctcatggagaacgagaagcacgaggtcattgttgctgataactttttcactggttcaaaagacaacctgaagaagtggattggccacccaagatttgagctcatccgtcatgatgtcaccgagccgcttcttgtggaagttgaccaaatctatcaccttgcttgccctgcttcaccaatcttctacaagcacaaccctgttaagaccatcaagacaaatgttattggtaccctgaacatgctaggacttgcaaagagagttggagctaggattttgttgacatcaacctctgaagtttatggtgatccacttgagcatcctcaaactgaggcctactggggcaatgttaacccgattggtgttaggagttgttatgatgagggtaagcgtgtagcagagacgctgatgttcgactatcacaggcagcatggcattgaaatccggattgccaggattttcaacacctatgggcctaggatgaacattgatgatggccgtgttgttagcaacttcattgctcaggctgtgcgcggtgagcccctgactgtccagaggccaggaacacagactaggagtttctgctatgttgccgatatggttgatggtcttattaagctgatgaatggaaacaagactggaccgattaacttggggaacccaggtgaattcaccatgctggaacttgctgagaatgtgaaggagttgatcaacccagatgtgacagtgacgatgaccgagaacactcctgatgatccccgccagaggaagccggacatcacaaaggcgaaggaagttctgggatgggagcccaagatcgtcctgcgggacggcttggtgctcatggaggatgatttccgggagcgcctgaccgtgcccaagaaaaccaaggcctaaattgccctgcagttggggaagaatatccacacggggaagcatactcatagtcgggctcgtcattatttgtggccacatttcattacggaatttgagttccaataaacttaatattcctttgtcgttcaccttgaaggattgtattattagaattttcatacagggctggccattcgagtctctgcctacgcagatcttgtggtacttgtgtttgtagccaatgtgtgagtaaaagtcgattat

SEQ ID NO: 111990 - protein, 350 aa, Zea mays subsp. mays
  misc_feature (1)..(350): Ceres Seq. ID no. 13599170
  misc_feature (37)..(342): Pfam Name: NAD dependent epimerase/dehydratase family Pfam Description: NAD dependent epimerase/dehydratase family
  misc_feature (35)..(342): Homolog of NCBI NO: 15227109 NR Description: NAD-dependent epimerase/dehydratase family
  misc_feature (84)..(346): Homolog of NCBI NO: 2351580 NR Description: thymidine diphospho-glucose 4-6-dehydratase
  misc_feature (15)..(346): Homolog of NCBI NO: 14030703 NR Description: AT5g59290/mnc17_180 [Arabidopsis thaliana]
  misc_feature (9)..(346): Homolog of NCBI NO: 15231432 NR Description: NAD-dependent epimerase/dehydratase family
  misc_feature (15)..(346): Homolog of NCBI NO: 15237853 NR Description: NAD-dependent epimerase/dehydratase family
  misc_feature (7)..(346): Homolog of NCBI NO: 13591616 NR Description: UDP-D-glucuronate carboxy-lyase [Pisum sativum]
  misc_feature (6)..(347): Homolog of NCBI NO: 15226950 NR Description: NAD-dependent epimerase/dehydratase family
  misc_feature (7)..(347): Homolog of NCBI NO: 11270075 NR Description: dTDPglucose 4,6-dehydratase (EC 4.2.1.46)
  misc_feature (1)..(350): Homolog of NCBI NO: 18447934 NR Description: UDP-glucuronic acid decarboxylase
  misc_feature (1)..(350): Homolog of NCBI NO: 11121508 NR Description: d-TDP-glucose dehydratase [Phragmites australis]
MAQKETNGSNGDHISTRPPPTPSPLRFSKFFQANLRILVTGGAGFIGSHLVDKLMENEKHEVIVADNFFTGSKDNLKKWIGHPRFELIRHDVTEPLLVEVDQIYHLACPASPIFYKHNPVKTIKTNVIGTLNMLGLAKRVGARILLTSTSEVYGDPLEHPQTEAYWGNVNPIGVRSCYDEGKRVAETLMFDYHRQHGIEIRIARIFNTYGPRMNIDDGRVVSNFIAQAVRGEPLTVQRPGTQTRSFCYVADMVDGLIKLMNGNKTGPINLGNPGEFTMLELAENVKELINPDVTVTMTENTPDDPRQRKPDITKAKEVLGWEPKIVLRDGLVLMEDDFRERLTVPKKTKA

SEQ ID NO: 111991 - protein, 296 aa, Zea mays subsp. mays
  misc_feature (1)..(296): Ceres Seq. ID no. 13599171
  misc_feature (1)..(288): Pfam Name: NAD dependent epimerase/dehydratase family Pfam Description: NAD dependent epimerase/dehydratase family
  misc_feature (1)..(288): Homolog of NCBI NO: 15227109 NR Description: NAD-dependent epimerase/dehydratase family
  misc_feature (30)..(292): Homolog of NCBI NO: 2351580 NR Description: thymidine diphospho-glucose 4-6-dehydratase
  misc_feature (1)..(292): Homolog of NCBI NO: 14030703 NR Description: AT5g59290/mnc17_180 [Arabidopsis thaliana]
  misc_feature (1)..(292): Homolog of NCBI NO: 15231432 NR Description: NAD-dependent epimerase/dehydratase family
  misc_feature (1)..(292): Homolog of NCBI NO: 15237853 NR Description: NAD-dependent epimerase/dehydratase family
  misc_feature (1)..(292): Homolog of NCBI NO: 13591616 NR Description: UDP-D-glucuronate carboxy-lyase [Pisum sativum]
  misc_feature (1)..(293): Homolog of NCBI NO: 15226950 NR Description: NAD-dependent epimerase/dehydratase family
  misc_feature (1)..(293): Homolog of NCBI NO: 11270075 NR Description: dTDPglucose 4,6-dehydratase (EC 4.2.1.46)
  misc_feature (1)..(296): Homolog of NCBI NO: 18447934 NR Description: UDP-glucuronic acid decarboxylase
  misc_feature (1)..(296): Homolog of NCBI NO: 11121508 NR Description: d-TDP-glucose dehydratase [Phragmites australis]
MENEKHEVIVADNFFTGSKDNLKKWIGHPRFELIRHDVTEPLLVEVDQIYHLACPASPIFYKHNPVKTIKTNVIGTLNMLGLAKRVGARILLTSTSEVYGDPLEHPQTEAYWGNVNPIGVRSCYDEGKRVAETLMFDYHRQHGIEIRIARIFNTYGPRMNIDDGRVVSNFIAQAVRGEPLTVQRPGTQTRSFCYVADMVDGLIKLMNGNKTGPINLGNPGEFTMLELAENVKELINPDVTVTMTENTPDDPRQRKPDITKAKEVLGWEPKIVLRDGLVLMEDDFRERLTVPKKTKA

SEQ ID NO: 111992 - protein, 218 aa, Zea mays subsp. mays
  misc_feature (1)..(218): Ceres Seq. ID no. 13599172
  misc_feature (1)..(210): Pfam Name: NAD dependent epimerase/dehydratase family Pfam Description: NAD dependent epimerase/dehydratase family
  misc_feature (1)..(210): Homolog of NCBI NO: 15227109 NR Description: NAD-dependent epimerase/dehydratase family
  misc_feature (1)..(214): Homolog of NCBI NO: 2351580 NR Description: thymidine diphospho-glucose 4-6-dehydratase
  misc_feature (1)..(214): Homolog of NCBI NO: 14030703 NR Description: AT5g59290/mnc17_180 [Arabidopsis thaliana]
  misc_feature (1)..(214): Homolog of NCBI NO: 15231432 NR Description: NAD-dependent epimerase/dehydratase family
  misc_feature (1)..(214): Homolog of NCBI NO: 15237853 NR Description: NAD-dependent epimerase/dehydratase family
  misc_feature (1)..(214): Homolog of NCBI NO: 13591616 NR Description: UDP-D-glucuronate carboxy-lyase [Pisum sativum]
  misc_feature (1)..(215): Homolog of NCBI NO: 15226950 NR Description: NAD-dependent epimerase/dehydratase family
  misc_feature (1)..(215): Homolog of NCBI NO: 11270075 NR Description: dTDPglucose 4,6-dehydratase (EC 4.2.1.46)
  misc_feature (1)..(218): Homolog of NCBI NO: 18447934 NR Description: UDP-glucuronic acid decarboxylase
  misc_feature (1)..(218): Homolog of NCBI NO: 11121508 NR Description: d-TDP-glucose dehydratase [Phragmites australis]
MLGLAKRVGARILLTSTSEVYGDPLEHPQTEAYWGNVNPIGVRSCYDEGKRVAETLMFDYHRQHGIEIRIARIFNTYGPRMNIDDGRVVSNFIAQAVRGEPLTVQRPGTQTRSFCYVADMVDGLIKLMNGNKTGPINLGNPGEFTMLELAENVKELINPDVTVTMTENTPDDPRQRKPDITKAKEVLGWEPKIVLRDGLVLMEDDFRERLTVPKKTKA

SEQ ID NO: 111993 - DNA, 1205 bp, Zea mays subsp. mays
  misc_feature (1)..(1205): Ceres Seq. ID no. 15180619
  misc_feature: MA Experiment ID: 108689 Result: Down-regulated in Transcription
  misc_feature: MA Experiment 108689 PARAMETER Experiment Name: Zm_Drought_Roots_P Parameter: Age (day) Value: 9
  misc_feature: MA Experiment 108689 PARAMETER Experiment Name: Zm_Drought_Roots_P Parameter: Organism Value: Zea mays
  misc_feature: MA Experiment 108689 PARAMETER Experiment Name: Zm_Drought_Roots_P Parameter: Plant Line Value: 35A19
  misc_feature: MA Experiment 108689 PARAMETER Experiment Name: Zm_Drought_Roots_P Parameter: Timepoint (hr) Value: 24
  misc_feature: MA Experiment 108689 PARAMETER Experiment Name: Zm_Drought_Roots_P Parameter: Tissue Value: Roots
  misc_feature: MA Experiment 108689 PARAMETER Experiment Name: Zm_Drought_Roots_P Parameter: Treatment Value: Drought vs. No Drought
agccacgcacgcgcacaggcacagtcagagcgagatcagggaagaggggggaggaggaggaggaggaagaagaagaagcaggcatggagcctcatcacgcaaacaagccaaagccaaggccaaagctcagcgcgaagcactccaagttcatctcctgcaagctctacatctccgaatcccgcaacgctacggccgtggacgcagtggagcgtgcgagcaagagcgacccccaggtggtcgtcgtcagccagttcggggaccatcactacaaccgtttccgctacacgcttgtctcctacatcgtcgtcgacgacgacggcgtcgacggcggcggcggatcgtcggcggctggagaggcgatagtagtacatagcccgatcaggaaggtgttgctggcaatgatggaggccgcgttctcaagcatagacctggaatcgcagtcgggagcgcatccgaggatgggcgtcgtggacgacctgtccttccaccccgtgggccaagcgacagtcgaggacgccgcttctctggctaggcaggtagcgtctgacattgcctgcatcgcagcagtcccagtgttcctgtacgcagcagcccacccggcggggaagtcggtgggcgcggtccggcgtgagctcggctactaccgcccaaactacaggggcaaccagtggtcaggcagcgtgctccccgacgtcctgccggtgaagcctgacgtcggtccggcccacgtcgtctcgcacaagagaggcgctacgacggtgggcgtcacgccttggatcgagggctacaatgtccccgtgctgtgcaaggacgtcgccaccgtcaggaggatcacccgtggtgtcactggacgcagcggagggcttcccacggtgcaggctctcgcgctcttccatggagatgactgcaccgagattgcgtgcttgctggatccagaccatgccagcgcctatcaagttcagaccgtcgtggaacagattgcaggagaccagggacttgaggttgagcagggatactacactgacataaccaaggacgaagcgctcgataagtatctcaagattgcttgcgctgacgactgatgagcttgtagaaataaatacatggggtaaatgtaaactcatgtttgtagcactgatgctgctgctggagcattattttttgcccgtgtaaattcgattttgcatctgaaaacttgagtttgg

SEQ ID NO: 111994 - protein, 359 aa, Zea mays subsp. mays
  misc_feature (1)..(359): Ceres Seq. ID no. 15180620
  misc_feature (262)..(310): Pfam Name: Formiminotransferase domain Pfam Description: Formiminotransferase domain
  misc_feature (126)..(334): Homolog of NCBI NO: 28211902 NR Description: glutamate formiminotransferase [Clostridium
  misc_feature (132)..(300): Homolog of NCBI NO: 13540922 NR Description: Glutamate formiminotransferase [Thermoplasma
  misc_feature (44)..(98): Homolog of NCBI NO: 34897974 NR Description: hypothetical protein~similar to Oryza sativa
  misc_feature (197)..(355): Homolog of NCBI NO: 34897974 NR Description: hypothetical protein~similar to Oryza sativa
  misc_feature (52)..(98): Homolog of NCBI NO: 25411995 NR Description: hypothetical protein At2g20830 [imported] -
  misc_feature (124)..(354): Homolog of NCBI NO: 25411995 NR Description: hypothetical protein At2g20830 [imported] -
  misc_feature (52)..(355): Homolog of NCBI NO: 34898040 NR Description: OSJNBa0038F22.18 [Oryza sativa (japonica
  misc_feature (52)..(355): Homolog of NCBI NO: 5734618 NR Description: Similar to Arabidopsis thaliana chromosome II BAC
  misc_feature (52)..(98): Homolog of NCBI NO: 18399493 NR Description: expressed protein [Arabidopsis thaliana]
  misc_feature (124)..(354): Homolog of NCBI NO: 18399493 NR Description: expressed protein [Arabidopsis thaliana]
PRTRTGTVRARSGKRGEEEEEEEEEAGMEPHHANKPKPRPKLSAKHSKFISCKLYISESRNATAVDAVERASKSDPQVVVVSQFGDHHYNRFRYTLVSYIVVDDDGVDGGGGSSAAGEAIVVHSPIRKVLLAMMEAAFSSIDLESQSGAHPRMGVVDDLSFHPVGQATVEDAASLARQVASDIACIAAVPVFLYAAAHPAGKSVGAVRRELGYYRPNYRGNQWSGSVLPDVLPVKPDVGPAHVVSHKRGATTVGVTPWIEGYNVPVLCKDVATVRRITRGVTGRSGGLPTVQALALFHGDDCTEIACLLDPDHASAYQVQTVVEQIAGDQGLEVEQGYYTDITKDEALDKYLKIACADD

SEQ ID NO: 111995 - protein, 332 aa, Zea mays subsp. mays
  misc_feature (1)..(332): Ceres Seq. ID no. 15180621
  misc_feature (235)..(283): Pfam Name: Formiminotransferase domain Pfam Description: Formiminotransferase domain
  misc_feature (99)..(307): Homolog of NCBI NO: 28211902 NR Description: glutamate formiminotransferase [Clostridium
  misc_feature (105)..(273): Homolog of NCBI NO: 13540922 NR Description: Glutamate formiminotransferase [Thermoplasma
  misc_feature (17)..(71): Homolog of NCBI NO: 34897974 NR Description: hypothetical protein~similar to Oryza sativa
  misc_feature (170)..(328): Homolog of NCBI NO: 34897974 NR Description: hypothetical protein~similar to Oryza sativa
  misc_feature (25)..(71): Homolog of NCBI NO: 25411995 NR Description: hypothetical protein At2g20830 [imported] -
  misc_feature (97)..(327): Homolog of NCBI NO: 25411995 NR Description: hypothetical protein At2g20830 [imported] -
  misc_feature (25)..(328): Homolog of NCBI NO: 34898040 NR Description: OSJNBa0038F22.18 [Oryza sativa (japonica
  misc_feature (25)..(328): Homolog of NCBI NO: 5734618 NR Description: Similar to Arabidopsis thaliana chromosome II BAC
  misc_feature (25)..(71): Homolog of NCBI NO: 18399493 NR Description: expressed protein [Arabidopsis thaliana]
  misc_feature (97)..(327): Homolog of NCBI NO: 18399493 NR Description: expressed protein [Arabidopsis thaliana]
MEPHHANKPKPRPKLSAKHSKFISCKLYISESRNATAVDAVERASKSDPQVVVVSQFGDHHYNRFRYTLVSYIVVDDDGVDGGGGSSAAGEAIVVHSPIRKVLLAMMEAAFSSIDLESQSGAHPRMGVVDDLSFHPVGQATVEDAASLARQVASDIACIAAVPVFLYAAAHPAGKSVGAVRRELGYYRPNYRGNQWSGSVLPDVLPVKPDVGPAHVVSHKRGATTVGVTPWIEGYNVPVLCKDVATVRRITRGVTGRSGGLPTVQALALFHGDDCTEIACLLDPDHASAYQVQTVVEQIAGDQGLEVEQGYYTDITKDEALDKYLKIACADD

SEQ ID NO: 111996 - protein, 227 aa, Zea mays subsp. mays
  misc_feature (1)..(227): Ceres Seq. ID no. 15180622
  misc_feature (130)..(178): Pfam Name: Formiminotransferase domain Pfam Description: Formiminotransferase domain
  misc_feature (1)..(202): Homolog of NCBI NO: 15643606 NR Description:
  misc_feature (1)..(216): Homolog of NCBI NO: 16082441 NR Description: probable glutamate formiminotransferase
  misc_feature (1)..(222): Homolog of NCBI NO: 20806959 NR Description: Glutamate formiminotransferase
  misc_feature (1)..(202): Homolog of NCBI NO: 28211902 NR Description: glutamate formiminotransferase [Clostridium
  misc_feature (1)..(168): Homolog of NCBI NO: 13540922 NR Description: Glutamate formiminotransferase [Thermoplasma
  misc_feature (65)..(223): Homolog of NCBI NO: 34897974 NR Description: hypothetical protein~similar to Oryza sativa
  misc_feature (1)..(222): Homolog of NCBI NO: 25411995 NR Description: hypothetical protein At2g20830 [imported] -
  misc_feature (1)..(223): Homolog of NCBI NO: 34898040 NR Description: OSJNBa0038F22.18 [Oryza sativa (japonica
  misc_feature (1)..(223): Homolog of NCBI NO: 5734618 NR Description: Similar to Arabidopsis thaliana chromosome II BAC
  misc_feature (1)..(222): Homolog of NCBI NO: 18399493 NR Description: expressed protein [Arabidopsis thaliana]
MMEAAFSSIDLESQSGAHPRMGVVDDLSFHPVGQATVEDAASLARQVASDIACIAAVPVFLYAAAHPAGKSVGAVRRELGYYRPNYRGNQWSGSVLPDVLPVKPDVGPAHVVSHKRGATTVGVTPWIEGYNVPVLCKDVATVRRITRGVTGRSGGLPTVQALALFHGDDCTEIACLLDPDHASAYQVQTVVEQIAGDQGLEVEQGYYTDITKDEALDKYLKIACADD

SEQ ID NO: 111997 - DNA, 721 bp, Zea mays subsp. mays
  misc_feature (1)..(721): Ceres Seq. ID no. 13599500
atatacatatattaacattttcatacacctaaaaatatatccaaacccatttgatctaatagtaaatacataatttatttggtgaagctagaagaatgggtgcatttgattatatatctagcttttgttcatatacatactctaatgccaaaaccaagcgtaagccattgcagacagtggaaatcaaggtcaaaatggactgtgacggctgtgaaagaaaacttagaaacgtggttcgtcgcatgaaaggcgtgaaaacggtggaggtgaaccggaaacagagccggctaacggtgaacggtcacgtggacccaaacaaggtgttgaagagagtgaagagcacagggaagaaggcagagttttggccttacatacctcagcatatggtctattaccctttcgcgcctggcatgtacgacaaacgtgcgcctgcaggccacatccgcaaccctacacaagcgtttccagccgcaaacgcacctggtgaaaactacgtttccctcttcagcgacgacaacgtccacgccgcttgttccatcatgtgaaatatgtaagaagcagaatataatataataatctatattttcttctttgtgtacacatctacttttgcaagttgcaactattctcataatacagaaaaggtcatgtataaactatgtaataaattatagagacatattttcacaaaaaaaaaaaaaaaaaagcttatcgataccgt

SEQ ID NO: 111998 - protein, 149 aa, Zea mays subsp. mays
  misc_feature (1)..(149): Ceres Seq. ID no. 13599501
  misc_feature (29)..(89): Pfam Name: Heavy-metal-associated domain Pfam Description: Heavy-metal-associated domain
  misc_feature (1)..(149): Homolog of NCBI NO: 23304411 NR Description: farnesylated protein 1 [Hordeum vulgare subsp.
  misc_feature (1)..(149): Homolog of NCBI NO: 38346843 NR Description: OSJNBa0091C12.3 [Oryza sativa (japonica
  misc_feature (2)..(149): Homolog of NCBI NO: 15235984 NR Description: copper chaperone (CCH)-related [Arabidopsis
  misc_feature (1)..(149): Homolog of NCBI NO: 34914538 NR Description: OSJNBa0094H06.16 [Oryza sativa (japonica
  misc_feature (1)..(149): Homolog of NCBI NO: 28866017 NR Description: farnesylated protein 2 [Hordeum vulgare subsp.
  misc_feature (1)..(149): Homolog of NCBI NO: 28866019 NR Description: farnesylated protein 3 [Hordeum vulgare subsp.
  misc_feature (1)..(149): Homolog of NCBI NO: 15219990 NR Description: copper chaperone (CCH)-related [Arabidopsis
  misc_feature (1)..(149): Homolog of NCBI NO: 32442810 NR Description: putative farnesylated protein [Brassica rapa
  misc_feature (1)..(149): Homolog of NCBI NO: 15223925 NR Description: copper chaperone (CCH)-related [Arabidopsis
  misc_feature (1)..(149): Homolog of NCBI NO: 15237967 NR Description: copper chaperone (CCH)-related [Arabidopsis
MGAFDYISSFCSYTYSNAKTKRKPLQTVEIKVKMDCDGCERKLRNVVRRMKGVKTVEVNRKQSRLTVNGHVDPNKVLKRVKSTGKKAEFWPYIPQHMVYYPFAPGMYDKRAPAGHIRNPTQAFPAANAPGENYVSLFSDDNVHAACSIM
